United States Patent Application Publication US 2024/0301345 A1 - sequence listing, part 22

SEQ ID NO: 3822 - DNA, 31679 bp, Unknown
  R35_2m  MAG No. k141_8185
gaggaagtcgtcaatcggcagctcaggcaggtacagacgcttggcggagttctggaaacgctcggcgttcgcatccgggcggaacagccaggtggagccgtcggcatgacggtaagccttgaggccctcgaagcactcctgtgcgtagtgcagcacggaagcacccgggtccatcttgagcggtgcgtacggttcgacgcggcggtcggaccagccttcgcccttggtccaagtcatgtgggtcatgttgtcggagaacacctggccgaaagccggcttgtcgatgagggactggcgcttctcatcggatgcggggttgtcgttcggcagtacggtgaacggttcggtgagcttgtcgagtgctgccggatcgtggtgcgtgttttcagtcatcactagctacttcttcttgactttggcggcccgaaagccaccatatggggtgtgtgctgtgcgcttgtggcgcgaactctgttgcatacttttgcacacccatgtgttactcgtgtggcagagttcacatggtgaaaaaacgaagaagcccacaccgttctcaacggctgcgggcttccacgtttcagttatgttctgaattgttcgctatcgaagcgaccgactcacttggcgtcggcagccggagcagcggcggcgtcagccggggcggcagcagcttccggagcggtggtggactcggtggcatcctccggcacctcgacggtgacgacggactcctccggatcctcgacgtccagctcgacgccctcaggcaggacgacatccttggcgaacaccttggtgccgtcggtcaggccttcgacgctgaccacgatcttctcgggcaggttggtgacgtcggcgcggaccttgagctcctgaatgtcgacgaacgccacggcagcacccttcggggtgccttccacgaacaccggcacctcgacgtcgatcttctcgccggccttgacctcgaggaagtcgatgtgctcgatgatgcgcttgaccgggttcttctgcacgtccttgacgacggccatcttggtgttgccgtcgaaggcgatggtgaacagggcgttggtgtgacgcagggccagggtggtctcgcgcatcggcaaggtcacgaaggcgggctcttcgccgccggcgtagatggtggccggaatcttgttggcaacgcgcagacgacgagcaacgcccttgccgaactcggaacgggcctcgccctcaagcttaatggtggtagccataatggatactccttgtatcttcgtttcgtactgtctcgctcagacgccacgacgcgccgaaagacaccctacaaggagtgaaatacgccgagtcgataacggaatctgtgtcatgtgtcagcatgcacacttccctcgccaaagcaacaattgtcaagtatacgccaaccccggactttgcgtaatgatgcttcgatgacactgcatataggccgtcccagctacgtcaacgtacggtttccgcgaaataatccctaactttgtgaagaacgtacgcttacccgttctcatcatacggttttcacgaaatcgttcgccatttcgtgaaaaccgtacgctcagcgacactcagtgtacggtctttcacgaagttggggatgatttcgaaaaataacgtacgatggtgagtaccgtatcgggaggttgatatgactcgttcggacgacgtcatcaatgaggatgaccatgacgtcatcgccgcacacactcgcgttgtcaggggtatggctgcggcacttgccgcgatagccgccacaggagccggcgtcacagccgcggccgccaacgtcatgttcatgttcgcgctggacaccaaggccaaacgttcgatgttcaacatgccgcacgaggagacgccgaaaggcatcgaattcgacatgtccgagcagcttgaggccggccggtggttcgaggaggccaagcaatcggtcacgctgcgcagccatgatggatggaaactccacggctggctgttggacccggattgttccgacccacagccgcatctatacgcgatctgctgccatggctataccggagagcccgcggaaatggccaaatgggcgcatcgctatgcgcaactcggttttacggtcctgctacccgcgcagcgcgcccatgagttgagcgaagggcgttacgtgggtatgggattgctggaaagcgacgatctgttgggctgggtttcgctgatcaccgcagctgatccggatgcacgcattctgttgcatggcaattcgatgggcgccgccacggtgatgatggcggccggcgatgcgcgactcccccgcaacgtcgtcgccgcgatttccgattgcggatacagttccgtggtctcgcagtttacggataatgccgaggcgatgttccgtttgccgcactcgttggccgtgctgctggtcaaagtggccagtcatgtgtctaaacgcaaggctggataccggtttgaggacgcctcctgtgtgaaggcattacggcacgcgactattccgatgatgttcattcatggcggagcggatacttttgtcaacccgaagtatctggacatcaattacaacgcctgcgccagcatcgaccgcgagaagctgctgattcccggcgccgaccacacgatgagcgccagcaccgatccggaccactattggcgtcgcgttaacggctttgttaagcgggtgtttgggctgtagtagatatagaagcttggctcccctctgtgaggggagccaagaatggttacgcgagcagttccttgacggcggcgatgacggactgcagactcttcttcgcgtcaccgaacagcatctgggtgttgtcctcgaagtagagctcgttctggataccggcgtagcccatgccgcggccacgcttcatgaccacgacgttctgggacttgtcgacgtcgagaatcggcataccggaaaccggggtgccaggacggcgagcggccgggttggtcacatcgttggcgccgacgaccagagccacgttggcctgcgggaactgcgggttgatctcatcgagatccacgagctcctcgtagggcacgttggcctcggccagcagcacgttcatgtggccaggcatacggcctgcgaccgggtgaatggcgtaggagacttccacgccgtggcccttgagcagttcgccgaggtcggcaagctcgcgctgggcctgagcctgagccagaccgaagccgggcacgaagatgaccttctgcgcgtagacgagctgaacggccagatcgtccggcgtggtctccttcatggtgccttccggaccgtcgccagcagcagcggcgtcagcaccaccgccgaagccaccggccaagacggagagcagcgggcggttcatggcctgagccatgaggatggacagggtcacacctgcggaaccgacgagtgcgccggccacgatcagggcaacgttgtcaatcgccagaccggacatggccacagcagtaccggtgcatgcgttgagcacggagatcaccactggcatatcagcgccgccgatcggaatcacgaacaccaggccgtagcacagggcgaacacggtggtcagaatcgaccacagcagacgctgttcgggctggacgcacagcatgaccagcgaggcgacagacagcacggcgaacagaatgttccatacgcccttgctcggcaggttcagcttcttgacccacttgatgccctgtagcttgccggcagcgatgagcgagccggtgaaggtcacagaaccaatgagaataccgagaccagcggtgatgagcaccacgatgtccggggtgccttccttggtcaggatgtcgttcagggccacgagtgcggcagcgccaccacccacggtgttgaacacggaaaccagctgcggcatgtcggtcatcttcaccttcttggcggagacgacaccggccacggcaccgatcaggatgccgacgaccagcaccaccacggcgacaatgttcacgaagcccttggcgaaaagcacgatgaacgccatgagcacggccacgaccatgccgaacgcggagatctggttacccttgcgggcggtcttcggcgaattcatgaaatgcagaccgaccacgaacaggacggcagagaacaggtagacgaaccatgcgacgatgtcgatggcgccaacggttgcggaggtcattacttcgactcccccttcttctcgttcttgctggacttgaacatctcaagcatgcggtcggtgaccacgtagccaccaacgacgttcatggtgcccagcacggcggccaggaagatgaacacgtaggccagtgggctattggcttcggctgccacgatcacaacgccgacgatgacgatgccgtggatggagttcgcgccggacataagcggcgtgtgcagggtggcgggcaccttgccgatgacctcgataccgatgagcagcgcgaggacgaacagggtaatggaaacgacgagagtaggcatggtattccttcttccttacttctcggacttctcggcatcggcagcagctgccggggcggcggcgcggccggcaaccaccagcgcgtcatcaagttcttcggtgagatcctggccgagcttgccgtcacgcacgaagtgcacgaggatgtcggccacattgcgcgaaagcaggttggatgcggtggtggcgacgccggaggccaggtagggagcgccgatcagcttgacaccgccctcggtgacctgctcgccgacggcggaaccctcgacgttgccgccgaggtcggatgctgcgcagtccacgatcacggcaccacgcttgagacccttgacgccggctgcggtgagcagcaccgggggcttacggcccgggaccttggcggtggtgatgatgatgtcaaagccggcggccttctcatcgacggcagcctgctgctgagcctgctcttcggcgctcaacgcgcgggcataaccgccctcgccctggcccttggagaagtcaagtcccagatcaaggaacttcgcgccgagggactcgacctcgccctgggaggcgggacgcacgtcgtacgcggtgacgaccgcgcctagacgcttcagcgtaccaatggcctgcaggccggcgatgccggcaccgagcaccagcgccttagccgggcgaatcgtgccggcggcggtggtcatcatcggcaggaaggaaccgtaagcatcggcggcggtgatggctgccttgtagcccatcacggagttctgagaggtcatctcatccatggactgggcgctggaaagcttacggggcagcttttcgatggcgatgcccaccagaccggccttctcgagcgcggccacgtaatcggcatcggtgaaggaaccgagcatgccaatgacccactggccggccctgagcttggccacggtctcggcggacggtcggtccacaaaaccgagcgcgtcggcttcggcgagcacctcgtcgcggctggtcaccttcgcaccggccttttcgtaatcctcatcggtgtattcggcggcaatgccggcaccggcctcaataatcgaggagactccgctcctcttcagccgggtgacgatatccggcgtcaacgcgacgcgggattccgtttcggacgtttcattcaaaacgccgaacaccacggtggcttctgggttttgcgccatgagagccctttcttgttctacttcaaaatggacatggttatccgcatagaaagtgtagtcggaaggtaaagaccatgacttgagattccgccaatcgaaacagaaacgaacccgaaattagtgagaaatacgaatgtatccatgtgcattgcggatgaattgctcggaagtcgtccaacaatcacccggcatcgatcagcaaccaaccgctcagtaattatcgacaatcaccgtttcgtagctcacggttactcaacaatatcgggacctgtgcaatattttgcctcgcactcccctaacccgccagaatcctacggttgcgtaaggtgacgagttcggtttgggcgattacaatttgaactttgagaagcgttcgcctcatggctggacgacactgaaaggtttacaggagcaagacttgtcggttatcaattccttcacgcagcacactatcaatctcacccgtaaggcgctcaggttgggatccgacttcgtccacccggtccacgacgacaccccggacgagcccgattacctgtccaacgccgacgtgccggtcgagaccgatatcgctttgcctcacagcgacgattgggacgacggccacctgaccgtcaccgacatcgaccccgccaccggcctgctcaccacctccaccgaaggcaatccgccgctggacgaaggtacgtccatctacgacctgtatgcggaccgcgccgaacgtatgggcgatgagccgctgtacacctacaagtccggcaacgattgggtgaccgtcaccgccaacgagttcctggctgacgtgcgtgccgtggccaagggcctgatccattacggcctgaagaagggcgatgccgtggcattcatgtgccgaacttcctacgactgggacctgaccgacgcggcgatcatggcgtgcggcggcgtgctggccaccatctacgacaccgattccgccgagcagattcgcaatatcgtcaacaactccgatgcccgactgctgatcgtgcaggacacggacatgcgtaagaaggcggatgggtccgtcgaagagtgcccgtccctggagcacatcatcaccatcgagaccggtggcttggacgaaatcaaggcctacggcaccacggtctcggacgaggagctggacgagcgcatcgattcggtcaagaagaccgacctgtgctccatcgtgtacacctccggttccacggccgcgccgaaaggcgtggagatgacccacgagcactactgccaaaccgcgctgaatctgccggcctacatgcccgatctgctgcacgacaagaggaacaccatcctgctgttcctgccgcaggcccattccttcgcccgcgccatcaactacatcgtcgtctcctcgaacgtccgcatctacatcgccaccggcatcaagacgctgatcagcgatctgcaggtggccaagcccactctcatgatcgtggtgccgcgcgtgctggagaaggtgtacaacgccgcgtcccagaaggccggccacggccccaagggcgtggtgttcgcctccgccgtggtggctgcgcagaactatatgaaggaagtctccgccaatggcaaggcaggtgcactgacccgcactcgccgcgctgccttcgatccgattgtctactcttcgctgcgcgaagtgctcggcggtcgcgccaagtggattgtggccggcggtgccccgcttgacccggaactgctggctttcttccgtggcgcgggtgtgcctgtatacgagggctatggtctgaccgaaaccaccgcgccgtgcgcgttcaacccgctgggtacgccgttccacgctggttccgtgggcatcgcattccccggattctccctgcgcatcgccgaggacggcgaaattcaggtcaagggtcgtgctgtgttcccgcgctatcacaagaacgacgaggccactgagctgtcgttcaccgaagatggctggtatgccaccggcgatctgggccgcatcgacaacgacgggttcctgtacatcaccggacgcaagaaggacctgatcatcaccgccggcggcaagaacgtctcccccggcccgatcgaggaggtcatccagcgttgcgagatcgtctcccaggcgttggtgctgggcgacaaacgcccgttcatctccgccctggtgacgttggacgagaagtcgttgcgcccgtggctcgccgccaaggggcttgacgagaacatgccgctggaggatgccgccaagaacgccgccgtgcgcgccgaagtgcagcagtgggtcgatcaggccaacgagggcgtctcccgcgccgaatccgtacgcaagttcatcatcctgcctgaagagttcacccaggagaacggcctcatgaccgcctccatgaaggtgattcgtcccaaggtcatcaagcgctactccaccctcctcaacacccagatgtacaccaagaagaagtaaggaggactcgagtacagcaaaagggagattccattggaatctccctttgttataaccggccgaaggccgattcctagaagcctaggcgctccagctgcttggggtcggactgccagcctttggctaccttgacgtggaggtcgagcttggctttttggccgacaatgcggttgaccggggtgcgcagcttcttcttgacgtaggtgaggttcgaggcgcccttgccgatgatgatcggcttctgggagtcacgctccacgtaaatggacacgttgacctgcgccttgccgtcatagccctgaccggtctcgttgtcttccggatagtcgatggaatcgaccaccacggccagcgaatgcggcagctcgtcgtccagggtctcaaggaacgcaccgcgcacgagttcggcgatggtgtcttccggacgctcctcgctgatctgatcgtccgggtacatctgcgggccctcgggcgtgtgctcaatgagcacgttcttcacttcagccagattgtcgtgcttcagggcgctcaccggcacgatgtccgagaaatcggcgaaatcgttgatttcgatgagcttgttgatgagttgctgacggccaagctcgtcgatcttggtgacgatggcaatcagcgggatgcgccacttgaacgtaccgtcctcacgcttggtggcgaagtcggtacgcagtcgggaaagaatacgcttgtcgccggggccgatttcctggtcggcgggcagcaggaaggccaccacgtccacatcggccaaggattcgtcgaccacgtcgttcagacgctggccaagcaacgtacgcgggcggtggataccgggcgtgtccacgagcacgagctgcgcgtggtcggcggtcaggatgccgcgaatcgccttacgggtggtttccgggcgagaggatgcgatggcgatctgcttgccaatcaacgcgttgatcaacgtggatttgccgacgttcgggcggcccaccacggccacgaatccggagcgatacggcacgtcctgcttggtcacattctccgtttcaccggtcgcgtcgacttcggcaacgccggcaacatcggaagcatcggtgacgtcaatgtcatcgacgtcgttcgtgctgttgttctggtcggtcatatcactccttgctggcggtatcatcgccttcgacgggctcgccgtcagtttcctcatgggtcctgctattttcctcgccgccctcgacgtgcgccggttcgacgacgatggtggacaccttcttgcggcgtccggcggagtccacggcggtcagtcgcagaccgcgcgtcacggccgaagcaccgacaatcggcacgcggcccagaatcttggtcagcaggccgtacacggtatcgacatcgtcctcatcaatgtcgatctcgaagatctcctccagatcggcaatcggcgtacgggcgggcatcttccacttgttgtcgccgattttctccggctcggtacgctgggtgcggtcgtgctcgtcttccagctcgccgacgatctgttcgatggcatcctcgatagtcaccatgccggcgatgccgccatactcatcgaccaccacggccacatgttggcgggaacgctgcatctcatggaacaggtcgtccaccggcttggattcgggaacaagcagcggctgccggacgatggattcgaccgtgcgctccatggccgccgggttgaaggcggtggcgcgcacggcgtccttcaaataggccacgccgatcaggtcatccacatcctcaccgatcaccggcacgcgggagaaaccggagcgggagaacagtttcagcgcggaagacagtgtggagtcgcgctccatgcagatcatatcggtgcgcggcaccatgatctcgcgagtcaacgtatcagacagggtgagcacgttgcgcaacatttcggagacttccggatcgaagtcgttggactccaccagtcggtcgatggcggccttgccctgctcgagctgaatcttctcaagctcctcgtcatcggacagatcggagtccttggagcggcggcccggccccttggaaccggacttgtcgccaccgatgcgtgcgaacggcgtgagcttggtggccaacgacacgatgcgcgagttggaaatcatgatgtcgaccggcttggtcatgccggcggtgcgcgggcggaccagtacggagaccacggctacgataatcgcgaacaggaatccggcgagcagttcaacccacagttccgcaccccacagggatgcgatggaagacaccagtacgccgtcgagcacattgcaggcgatgcggaagaacgcacagctgccggcggtggcgtaacggtcggcgatgagccgttgcacgcgatgaatcttgtcgatcttcttcatcttgaggaactggcttgcttcggagtcggtctgcacctcgaggatgagattgttgaggctggctcgcgttacgcgggccacggcgccttcagcggcggccatggtcagcgaaagccagacgaacagggccgccacaagtacgagaatgacggtgacggcgatcagcgtggtactggaatactccataatgttttttcggtgtccttgaatgtccttgaacggtatagaataatccgaatttggtgtgattgatttggaagtttatttggaatcgaggtcgcggccagcaccgtgcgcggcgtcgtacagggccagcgcgtcgggtgtgccggcgggcagcatggcctgcacgttggcatcgtggcgcagggcgaagaaggtgagcagcagctgtcgctgcaagccgaacatctggcgctcctgctcgggggtcacgtggtcatagccgagcaggtgcaggatgccgtggatggtgagcaatagcatctcctgcatggtgctgtgcccggctgcggcagcctgttgggcagcgacccacgggcagatgacgatgtcgccgagcactccttccatcacggttttgccgtcgccagggcgcagctcgtccatcgggaagctcatcacgtcggtcgggccttcgaggttcatccaacgcatgtgcagttcggcgatgggatcgggatccacgaacatgatggtcaggtcggactgggtgctcacgcgcatctggtcgagtacccaaatacccaaatcggagaagaccttggggtcgatgacccactgggtttcattggtgacgtcaacgctcatcgtctgtctcactttggttggttgaatccgcttgctggcgggcatcgaagtcggtatggttgcggcggcccttgcgttcgatgtcgcggtggtcgccggcgatggcggagtgacggtcgtaggcggccacgatctggccgaccagctggtgacgtaccacgtcctcggttttgagatgcacgaatgcgatgtcgtcgatgccgcccaggatgcgttcgatggtggccagtcccgagcgcggcacggtcaggtccacctgcgagatatcgccggtgatgaccatcgtggtgttgaagcccagacgggtcaggaacatcttcatctgctgttcggtggtgttctgagcctcgtcgaggatcacgaacgcgtcgttcagcgtacggccgcgcatgtaggcgagcggcgccacttcgatggagccgtcgtccatgtaccgcttgagctggtcggcgccgagcatgtcgccaagcgcgtcgtacagcgggcgcagatacgggtcaaccttgtcgttcagcgtgccgggcagaaagccgaggctttcgccggcctccacggccgggcgcgtgaggatgatgcggcgaatctgcttgtcctggaaggcacgcacagccttggccacggccagatacgtcttgccggtgcctgcgggaccaatgccgaaggtgatggtgtgcgattcgatggcgttcacgtaggccacttgtccggcggttttcgcacggaccggcacgccggcggcaaaggtgatgacgccgggaaccgtgggcttgcggtacgtcgggtcgtgggagccggcagaacgtgcatgggcgcgttcgtttgaggtcgattgcgccagtttgtcatgcaccgggccgtgacctggatgttcgaggcgcacgtggttcttgagcacgttctggtcgagcatgcgacgcacggtgtcggcgtccataggcgcggtgtaggcggcttggatgatggtgttgaccaaatcctcggcctgtgcggcctgggcttcggtctgcttggagcgggagacgatcgccacgcggttgccgcgcacgataatcgtcaggtccggaaaggcgcgctccacctcgcgaatgacctcgtcaaccgggccgagcacggcgacggggtcaagttggggcgggatggtgatggtacgtgtagtcgttgccacgaagcggatattcccctactactcgtcgagcttttcgccggtcatcacgtgcgcgtgcacgtggaagacggtctggccggcgtcgagaccggtgttgaacaccagtcggtaggcgccgtgaaattccttgtcggcgatgttctgcgcgatggagacgatgtgggccagctcggtcgggtcgtcggcggcaagttcggcgacgttggcgtagtgcttcttgggcaccacgagcacgtggaccttggccttggggttgatgtcgttgaatgcgtaggtcgtctcgtcctcgtagaccttgctgctgggaatctgccctgcgatgatcttgcagaacaggcaatcgtcggattcgctcatcatgctccttggtttgatgttgctacgcaccagcttagcgcgtgggcgttactcgtaacgtcccaacacccgagacaacagcgacaacgctacaggaccggccgtcgcggctctcagaatattgtgccccagtacgcagctcaccgctccggccttgacgaaatcagctacctcctgctcactgatgccgccctcaggcccgaccaccacactgacagtccgcggccggccgtcctggagcgtgcgttccaccaactgcgtaaccttctcctccacgccggaccacgtatcggtagcatcctgatgcagcacaatcaccacatcgccatgcacgcaggccctgcggcagatggccacgacctccttgctggacgcgcacgcctccagttgcggcttaaaagcgcgccgcgactgctcggtggcggcatccagtaccgaattccacttcttgtccgtacggccgaccttccacttggcaatggatcggtccgcctgccatggcaccacttggtcgacgccaatctgcgtagccatatcgatggcctgctcatcatggccggttttcgccaatgcctgaatcagcgccaaacgggtgagcggctcgggttcgcgccccacttccacaacttcagcaagtccggcttcaggatcggccatcactgcctggattctcaagccgttgccgtcggaaagttgcaggctgtcccccgccttgagtcgcatagcctgcacagcatggcgcttgatgtgcgcgggcagggttagcttccagccggcgtgaagttcgtcgctgttcaccgggacatcgtcgacctgcgggtcgaaaagaaaaagggcatcagtcatgacttcaaggctacacgcgacacgccgggcacacgcgcgaattgcatccctgtaatttcatgctaagctatttactcgttgtccaaacgacacctgcccgggtggcggaatggtagacgcgctagcttgaggtgctagtgcctattttatacgggcgtacgggttcaagtcccgtctcgggcacagataaaccccttgcattgcaaggggtttttcgttatctgcacacacgaaaggccaccaatgcagttcatcacgctggacaccgttgacgacccgcgcgtcgaagcgtatgtgagcctcaccgaaatgcagttgcgcaatcgcttggaaccagccaagggcgtgttcatcgccgagtcccccaaggttatcgaccgcgcgctggccgctgaccgcgaaccgctgtcactgctggtcgaggaaccttggctggagggcatgaaagacaccttcgacttcatcgacgggcgctggggcacggacattcccgtctacgtggcctcacctgagcagctcaagcgactgaccggctatcgtctgcatcgcggcgccctatgcgcgatgcgacgctggccgctgccctccgtagccgaggtctgcaggagcgcccgccgcgtggcagtaatggaaaacatcgtggaccacaccaatgtgggcgcactgatgcgttcggcagccgcgctcgatgtggatgccgtgctggccacaccctcctgcggtgatccgctgtaccgacgagccgctcgtgtgtcgatgggcaccgtattccagattccgtggacccgtatcaccgggttcaacgacgacggtaccgaaaacaagcattactggccgttccagggcatcgacgagttgaagtcgctgggcttcaccaccgtggccatggcattggaggatcgttcgatttcgttggacgagctgacacgccgtctgcacgcgcctgccgaagatccgacgcatatcgacaagctcgcgatgatcttcggcaccgagggcgacggcctgtcccaccatacgattgcccgcgccgatttgaccgtgaagattccgatgagccacggcgtggatagtctgaacgtggcggcatccagcgcagtggcgttctacgcgacacgctaaggaatcgcacgcgctccgaaaaggccggatccttaaacaaatctacgaaactgttcatcgcaagttcacggcacgcgggggcgaaagccttgcatgttcgaatttttctgcaattattaactatgtaaaccgaatgcaaggaagcatccggcccagcagtgcggtgtcgaaagacgctcagtaacagagaggacagttacgatggccaagaatcccaagattctgtcgattgtgcttgcaggtggtgaggggacccgcctgatgccgttaacccgcgatcgcgcgaagcccgccgttcccttcggtggtgtgtatcgtctgatcgatttcccgttgagcaatctggtgaactccgggtaccgtcaggtcgtggtgctcacccagtacaagtctcactcgcttgaccgccacatctcccaggtctggcgtttctccccgctgcttggctcgtacgtctcccctgtgcccgcgcagcagcgtctcggcaagcactggtacctcggctccgccgacgccatctaccagaccatcaacatcatcgaggacgtccagccggacatcgtggtgatcgtgggcgccgaccacgtctaccgcatggacttcgaacagatggtacagcagcacatcgagtccggcgccgagttcaccgtggccggtatccgccagcccatcgaggaatcgaaccagttcggtgtaattgaggtcgatcccgatcacccgaacatgatcaggaacttccaggagaagccggccaccaccaccggtctgccggacaatccgaaccagattctggcttccatgggtaactacgttgccaacaccaaggccctgttcgaggctctggctcttgatgagaaggctgccgacaccaagcatgacatgggcggcgacatcgccccgtacttcgcttcccgcaacgaggccggcgtctacgacttcaactcgaacgagattccgggttccacggtcactgatcacgcttactggcgcgacgtcggtacgattaagcagttctacgatgcgcacatggatctgatcgcctatgtgcccgagttcaacctgtacaaccaggattggccgatttacacgatgtccggcaacctgccgccggccaagttcgtgcacgccggccgcgaccgtctgggccacgccaccgattcgatcgtctcccccggtgtgatcgtctccggcggtgaagtgcaccactccgtgctctcccccaatgtgcatatccactcgtgggcacagatcgtcgattccgtgctgttcgacggtgtgatcatcaaccgccgcgcccgcgtgtacaaggcgattctcgacaagaacgtggtcctgaccgaaaactccactgtcggcatcgataccgagcacgatctggcccgtggcttcaccgtcacgccggacggcatcacggttgtcccgaagaacaccatcgtcgatgactgattgaccagtccagacttggaaaagccccgcatcatgcggggcttttctcgtatagagctccctcatcagagggagcttactaagcgctatcagtactttggcatgttgtcgaagttgaagccaagggcggcgagctggtcgcggccttcgggcgtgatgcgctccatggtccagcgcgggtcccacgtccagtcgatgcggaactcctcgaccagaccggccagcgtggatgcgcattcgtcctcgataaggtcggtcagcgggcaggccggcgtggtcagcgtcatcgtaataatggcgcggcctagctcatcgatctcaatgccgtagaccagacccaaatcgatcacgtcgatgccaagctccggatcaatcacctgatgcagtgcctcgcgcacgtcttcggcagtggcgcggccgatatcgtcaatcgccttgatcggaatctcgctgccatcggactgttcgtcatcccggcaaccgcatttgccatggtgaccgccacacgcacaggtgtcatcgccggacgcagcagagtgctcgatcgggcgtccgttcgggaagcccttggccaaggccgggttggccatcacgcggcgagcggcctcctcgtcctgcaggacgccgttgacggcatcgaaaacggacggctgtggttcgggaaccaaattatcgttggacatatttcctcagttctttgcagcgagggctttggcgatggagtccttcagcccttcccagcctagcagagcgcatttgatgcgcatagggtatttcgacacgccttggaataccacggcgtcgccgagcttttcttccaggttctcgtcgtccagaccggcaccgcgcgattccatcagcttgtggaatgtctgttccagatccatggcctcgtccacggttttgccgtccaccagatcgaccatcaccgacaggctggcctgcgaaatggagcagccgtggccgtcccacaccaatcgcttgatggtgtgcggttcgtcatcggagacttcgacatggatggtcgcctcgtcgccgcaggtcgggttgaactggtgcgattcaccgggcgtgcagtattcgtggctggcttgcacggtgacattggccgccgcgtccgcggactgttcgaccgccgcgttgggcgcaaaggattccttgccatgcggatgttttgacgcctcgaggatgacctcttggtacatctgttcgaggtcatccccgctcataccgaattcgttcatggtgttctgttttactccactccaaagaacttacggatgcccttggccgcttcgaccaatgcttgggcatcttcgaccgaattgtagacaccggaggaggcacggttggatgcgtataggccgaagtggcggtgcaccggctgggcgcagtggtgtcccacgcgaatcgcgatgccctgggcgtcgatgaactggcccacatcgtgcgggtgcacgccggccacgtcgaacgccacggtaccgatgcggtccacgttttcgcgcggtccgaggatgcgaatgccatcgatgtcgccgagcttcagcagttcggcggcgatggtcttctcatgggcctcgatgttctcgagcccgatgttcatcatccattcggcggcgacgcctgcggccaccacttgggcgaccggctgggtgccggcctcgaagcgggccggaggggccatgtattgggcctcgtggtccatgtaggcgagttcgaccatggagccgccgaagttggccggcggcagggcttcgagcagttcgcgcttaccgtacaggaaaccgacgccggtaggaccgtacatcttgtgcgcgctccaggcagcgaagtccacatcaagcgcatggaaatcgactttgaggtgcggtacggactggcaagcgtccaagatgaagatcgaacctacttcatgcgcacgcttgatgataggggcgatgttggtgatggcacccgtggtgttgcccacgtgggtgacggccacgaccttggtacgctcggtgatgacttcgtcgaggttgtccgtgcgaacgcgaccgtcctcggtcaggtcgatccacttgaaggtggcaccggtacggtaggccagctcctggaacggcagcagcaccgaatgatgttccgcgcgcgagacgacgatctcatcgcccggcttcagggcaaaacgcttggcggcttctcccccccggcccagcgacgcattgccgaacgcggtggcgagcaggttcagtccggccgtggcaccaccggtgacgacgacctcctcttcaccttcggccgtattcgcgccaacgagcttggcgaccttggcacgggcctcttcgaaggccatggtactacgggccgccagctcgtgggcaccgcggtgcacaccggcgttaatcgtacgataaaaatccgcctcggcgtcgatcaccgcattcggcttctgcgaggtggccgcagaatccaggtacacgagcgggtgcccgtgaatctcctgattcagaatcgggaactcgccccgaatctccttaaaatcaaccattatgttcccctacttacgcaacaattgtacgaaacgagtgggagtctgacatggcctgttcgcgaccgtaaagacttggcctagcggcccggagcgtgtcgagaatagggcatgtcagactcccacggtcacggactcaggccagtgcggactcggagtcggcgccttcgggcaggtactggtcgtagccgttctcttcgagttcgtcggccagctcagggccgccggtcttgacgaagtggccgtcggcgaacacgtgcacgatgtccggcttgatgtacttcaagatacgggtgtagtgcgtgaccatgaggatgccgaactggttggcttccttggcgcggttcacgccttcggacacgatgcgcagggcgtccacgtccaagccggagtcggtttcgtcaaggatggcgaacttcggcttcagcagttcgagctgcagcacttcggcgcgcttcttttcaccgccggagaagccttcgttcacggaacgggaggcgaacttcgggtccatcttgaggcgcttcatggctgcggacaggtccttggcccactggcgaataccgggagcctcgccgtcgatttcggtcttggcggtgcgcaagaagttggtcatggacacgcccggtacttcgaccgggtattgcatggccaggaacaggccggccttggcgcgctcgtccggagtcatcttgaggatgtccttgccgtcgaggagggcctcgccggagtcgaccacgtacttggggtggccggccaacgtgtaggcgagagtggacttgccggaaccgttggggcccatgatggcgtgggtttcgccggagtggacggtcagggtggcgcccttcaggatcggcttgatgccttccttggtttcgacgtggacgtgcaggtccttgatttcgagtgttgacattgttgtgctcctaaaaatgctgttcttacttgtcttcgaggacctgtgccatggcgtcgttttcgccacgggccagtcggcggtcaatcacggtcatcagatgttcggagatggcgggaatgccgatctcctcgacgagttcgccgaagaagccgcgcaccacgagcttgcgggcgtcggtttcggggatgccgcgggattcgaggtagaacagttcctcgtcgtcgaagcggcccaccgaagaggcgtgaccggcaccgatgatgttgccgttttcgatttcgaggttcggctcggaatcggcgatggcacccggggtcaggaccaggttgcggttgagctcgtaggagtcggtgccgggggcggtgggctggatgagcgcgttgcccacccaagtggagtgcgcgcccttgccgtcaagcgcgcccttgtagaccacgcgggacttgcagtcggggtggttgtgtaccaccatcgtgcggtgttcgatgtgctcgccggggtccacgaagtagatgccgagcatgttgaggtcgccttgttcgccgccgaagtcctgatccatgcggatgcggacgatgtcgccgcccaaggtcacgacggagtggcgcagggatgcgccttcgccgacatggatgcggtggttggccacatgcttggcggttttggcccattcctgaacgaacgtggtggagacgtgcgagtccttgccggtggtgatttccacgccttcggccagtcgtgcgtcaccgtcgtgttccacgacgacgtccgcatgagccttgtcggcggcggcgatcaccagatggaaggcgtcgaggtcctcccccgcgccgtgcaccttgacgagcacgggctgggcgatctcaccggacagttccagaatggttgcggtgtggccggattcccattcgactgcggagacgcggtcattgggcttggacacagtgccggacaggccctcaccgagcttgatctggctgagcttcacgccttcggccaacggcgagccgtcaatcatggagacttcgatctgcgtttcgccggaaggcttgaacacggtgaagaactcgttgatgcgctcgataggcgtgtagcgccattcgtcctgcttgcggctgggctccgggtagtcgcctgcgttgaacgaacgcacggcatggtccacggaggacggcatggcggccggaatcgcgtacgggtcgttggggtcggcgaccggaatcttgatttccttgacgggtgttgtgttgtcggtcatcggaatcagcccaccgatccttccatctgaagttccacaagtctgttgagttcaagcgcgtattccatcggcagctcgcggctgatcggttcgacgaagccgcgcacgatcatgcctcgcgcctcttcctccgtgagtcctcggctcatcaggtagaagagctggtcttcggaaatcttggaaacggtggcttcgtgggccatcgaaacgtcgtcttcgcgaacgtcgacgtgcgggtaggtatcggagcgggagaagtcgtcgaccagcagggcatcgcacacggtcgagttggacgaaccgtacgcgcccttgacgattttgaccagaccgcggtaggcggagcggccgccgccgcgcgagatggacttggcgacgatggtggagctggtgtgcggtgccaagtgaatcatcttcgcgcccgtgtcctggtactggcccttgccggcgaagccgagggacatggtggatgccttggcgtacggttcggcgaggatgcaggccgggtacttcatggtggccttggaaccgatgttgccgtccacccactccatcgtgccgccctcacgcacgtaggcacgctgggtgacgaggttgtagacgttgttcgaccagttctgcacggtggtgtagcgcacgcgggcgtgcttctcgacgatgatctcgacgatggcggcgtgcagcgagtcctcggaccagatcggggcggtgcagccttccacgtagtgcacgtaggagccttcgtccgcgatgatcagcgtacgttcgaactgacccatggccggggtgttgatgcggaagtatgcctgcaacgggatgtccacgtgcacgcccttcggcacgtatacgaacgagccgccggaccatgccgcggtgttgagggcgccgaacttgttgtcctccgggggcacgacggtgccgaagtacttcttgacgagttcagggtattcgcgcacagcggtgtccgtgtcgacgaagatcacaccctgcttcttcaggtcctcacgaatggagttgtagatcacctcggactcgtactgggcagccacgccggagacgaggcggttcttctccgcctccgggatgccaaggcgatcgtaggtgttgcggatgtcgtccggcagctcctcccacgacttcgcctgcttctcgatcggcttgacgtagtacttgaagtcgtcggcgttgaagccggagagatccacaccccaatcgggcatgggcttttcgaggaacgccttgaatccacgcagacgcatgtcgagcatccactgcggctcgcctttgtcggcgctgatcgcgcgtacgacgttctcatcaatgcctcgttttgcggcttcgccggcggcatcagaatcatgccagccatagttgtagtcgccgaactggctgatgatctcgtcatccttcttgatcttgtcctcgttgacgcgggtacgatcagccacatactggctcatctccacgtcagcggcggcgtttggtgctgtgttttcggtcaccatcctgccttccttgtatcacacttaaccctatgaaaacctagcagaacccaagtgcaaacactagctgccctgacgcatattggctgtgggcttgattacatgcgggcgccatcgggccatgcggcatcacggatggcgccaaacggcgaaggcgtggcggcgaagcatcctgagatgccgtgccgtcacgccttcatcgtgcgcggaccgaccgcgcgggatccacggtcagcgggccgcctgatggtcgagcgcggccttgaccaggccggcgaacagcgggtgcggcttggtcgggcgagacttgaactccgggtgagcctgggtggccacatagaacgggtgcacgtcctgcggcagttccacgaactcggtgagctcgccgtccgggctctggccggagatgcgcaggccgccttcacgcagacgatccttgtaggccacgttgacttcgtaacggtggcggtggcgctcggtgacatgcgtggtgccgtacagttcggcgaccagcgagccttcctccagctcggccgggtaggagccaagacgcatggtgtggcccatgtcgcccttgccggccacaatgtccttctgctcttccatggtggcgatcaccgggttggcgcaatcgggctcgaactcggaagagttcgcgtcttcaatgcccagcacgtggcgggagtattcgatgaccatggactgcagaccaaggcacaggccaagggcgggcagcttggtttcacgggcgaacttcagggcgccgatcttgccgtcgatgccgcgaatgccaaagccgccggggatcacgatgccgtcgacgttgtcgagagcggcggccgcgccttcagtggtttcgcaacggtcggcagcaacccatttgacgttgaccttggcccagttggcaaagccgccggccttgatggcctcggtgacagacaggtaggcgtccggcagatcgatgtacttgccgacgatggcgatgttgacctcgtgcttggggtggtggacgcgctcaagcaggtctgcccattcatcccaatcgacatcgtggaacggcaggccgagctcacgcaccacgtaagcatcaaggccctcttcgaacaggatcttcggtacatcgtagatgctcggcgcatccacgcagttgaccacaccttcggcatcgacgtcgcacatcagggagatcttgtctttgatggactggttgagcgggcggtcggaacgcaacacgagggcgtccggggagatgccgagttgacgcagcatcatcacggagtgctgggtgggcttggtcttgagctcgtgggcggcggaaatgtacggcaccagggaaacgtgcacgaacatgcagttgtccgggccgagatcgcgacgcacttcgcgggcggcctcaaggaagggctgggactcgatgtcgccgacggtaccaccgatttcggtgatgatcacatccacgtcatcggaagcctgggcgcgcatacgagacttgatttcgttggtgatgtgcgggatgacctgcacgcactggccgaggtattcgccggcgcgctccttgcgcagcacttcctgatagatctgaccggtggtgacgttggccttctggctcaggaagacgtcgaggaaacgctcgtagtggccgatgtcgagatcggtttcggcaccgtcttcggtcacgtagacctcaccatgctggaacgggttcatggtgcccgggtcgacgttgatgtacggatcgagcttttgctgcagaacatggataccgcggctgcgcagcaaacgaccgagcgaagatgcggtcaggcccttgccgagagaggagacaacgccgccagtgacgaaaatatgcttggtgacgtgttcttgagaattaccatgtgttcttctaaccatggaatttcactctatcatccgtgtatgacccggcgtgttcatgacgtggccggtgtagtcgtgcgtaggcagcccatctcgttctgccttggccagcatatggtcgaatacacggcgtacttcgggtccataaggcgcgcccggacgaggattcgggtccgattcgtcggaacaggaatcccgggcgcaacgtcgactgctacccgggattggctggagggcttggttctattcgctcagcaagtgcgccacagcatcgagcgcgagcttgtagccgtagaaacccatgccggtgatggtgccggtggccacagggctgattacggaacgcttgcggaactcgtcgcgggcggacgggttggaaatatggacttccataagcggcaggttctcatcaatgaccatgtgcgcggcgtcggcgagagcatacgaatagtgcgtgaaggcggcgggattcatgaccaccggggttttctcgtcggcggcttggtgcatccagtgcaccatttcggcttcgtcgtcggtctggcgcacctcgacttcgaggccgaggtccttgccccattcggcgcagagcttgcgcagggtgtcgaggtcttgacgaccgtagacgtcgggctggcggacgccgagacgtccgaggttagggccattgacaacaatgactttggtcattgggactccttttgtttgtgcttctctccctccgccccttcggggcacctccctcatcagagggaggtagaaggtaaatccgactccggggcacctccgttagaggggagccaagtactttttctgaggggatggcgaacggcacggcctacggccgttcaattactgctggatacgacggaatgcttcttctacggcttcggcgggcgggttgtcgaggtgtacgacgtgaccaatctcgtcgaggaccacgaaacgcagtgcgttgccacgggctttcttgtcgcgatgcatcaatgcgagcacgtcgtcgaacgagctgccattccacgacgtcggcagacccagcgaagcgagcaacgaacggtgatagtcaaccagatcctgatcgatgtaaccgatcagatgggccagctcggcggcatacaccataccgacggccaccgcattgccatgcctccagcggaagtgctcgagcttttcgatggcatggcccatcgtgtgcccgtagttgaggaattcacgcagacccttctccttcaaatcggaggagacgtggtaggccttgacctttaccgtacgctcaatgagctcggcaaccacgtcttcgagcggcgagccgaggaatgtagagccgtcgaaagcgcgcagttcagctgcgtggtcttcgaggatatgcaggatttcggggtcgcggatgaaaccggatttggcgacttcaccgagaccctcaatgaagatgtcattgggcagcgtagccagcgtcttggtgtcggccagcacaccggcaggcgtgtagaacgagccgacgaggttcttgccctgcggggtgttgatgccggttttgccaccggtggaggcatcgaccatggccagcagcgaggtcgggcagtttacatagcgcacgccgcgcatccacgtggcagccacaaaaccggccaaatcggttgcggcaccgccgccaagccccaccacggcatcggatcgggtgaaaccttcgttgccaaggcgttcccaaatgccgttggccacggtaatggtcttgccgggttcggcatccggaatcacgatgtcggaaacctcatagccgccctgacgcaacagggcgcgggcacgatcggagtgtcgctgcaccggctgggtatggataagcgcgattttggcgggcttgggtcccagcacgtcgaccagatgattcatggccccttcgccaatgaccacatcatacggctcaattgccgatccggtaacatgcactgctcgctcagataccatatcaatcactttcttcgctgcgccctgaggcgtaagcccccgggtatggacatgaacgttggcgacctcgcggaataccgggtcacgctgcttgaacagtttcttccaacgggagttggcattgccattgagcatgggccggcctcccccgcggttcgcgcgttccatggcctccgccggatcggcgtcaaggtagaccacacgaccgccatggtcgatgtatgaggcgagggcatgctgggtggatggcgtcatgggagcgccaccgcccagcgaaaagataccgtcgaaatcctcaagcatatcggcgatgagatcggcctcgacctcgcggaatgccggctcaccgtattcatcgaagtaggcgggaatcttcatgcccacttcacgttcgatctccacatcggcatcggcgaacggcagacgcaacatatgcgccacttccttaccgacacgtgttttgccggctcccatcatgccgatgatgacggcgcgggggcgtgcggtcataatctacgaatcctctcgacgattggtgggtacagttgctgatggttccgcggcagtcgtctcggaaccatacgcccttcgttcagcgcatgtgctccggccacgaggcgagatacgactcaaggttgcgccgtgtttcggcaacactgtctccaccgaacttatccagcgcgtacttcgccaaagtcagacgcaccatggcctcggccaccacggatgccgcaggcacggcggtgctgtcggaacgctggttgatggcttgtgcggattcgccggtcagcacgtcgaccgtacgcagggccttggggatggacggaatcggcttcatggcaccgcgtacgcgaatcacctggccattggacataccgccttcaatgccgcctgcgcggttggacagacggtcgatgcggccgtcggcgttgaccacgatctcatcgtgcgcctgcgaaccggggcgggaggcttccaggaagccgtcgccgatctccacacccttgaacgcctgaatgcccataatcgcggaggccagagccgcgtccagacgacggtcggattccacgtaggtgccgatgccggcaggcacgccgtaagccagcacttcaatcacgccgcccaacgtgtcggcggccttcttggcctcgttgatgcgttcgatgatgcgggcctcggcctctttatccaacgtacgcacgggagaggcatccaacgcttccagatcgtcaggtgtgggcaacggcaaatcagggttggtctgcacgccaccgagcgccaccacgtgggctacggtgcgaatgccgaacgcctgatccaggaactgcttggccacctcgcccaaggccacacgggaggcggtctcacgggcgctggagcgctccagtaccgggcgggcgtcgtcaaaaccatacttgcgcatgccggtcagatcggcgtggcccgggcgcgggcggctcagcggcgcattgcggccttcgcgcggcaggtcatggtcgagtgcatcggcgctcatgacctcggtccacttcggccattcggtgttggcgatttcgatggccaccggcgagccgagggtcagaccgtggcgtacaccggtcagcagacggaccttgtcttgctcgaacttcatgcgggcaccgcgaccatatccaagtcgacggcgtgccagtgcggaaacgatatcgtccgtgctaatacgcacgccggccggcaacccttcaatcatggccaccaatgcttctccgtgcgactcccctgccgtctgccaacgcagcataacttccctcgtttcatgtgtgtacgtctatgagtacgtctaactaggggttaatgttaagctatgccatacctgttcacgctacccggtctgctatgtgggcttacactgtccattgaggatgttcgtcatcggcgggtgccgatcgcatgggtggccgtgggcgcgttaatccagttggccgccgatttcgcgtatggagtgggggcgaacgacctgttcgtgctgttgcaggcactgttgttcaccgtgctatgttgcctgatccagttcgcgttggcgttgctggtgccgcggtcattgggattcggcgatgtgaccgccttgatacctatgggattgtctgtcggactgtttggcctgttgcctatggtggtctggtggctggcgatgggcgttgccggcatcacatggattgccttgtggacgcgattcgacccacaacgcacatcaccggcacatgcgggcaaggtgccgtatgtgccggtgatattggcgggcgcgattgtggcggtggttgttggggcttaatcccgtattactcccctcagtccgctttgcggacagctcccctcggcgaggggagccaatgaagagactaatgtccgatcagcttccccaagcgaaggaagctaacgggatgactactggttttcggcttgccacttgcgtagttcggccacgttctggtcatgttcatcggcggttgcggcgaacttggtttcgccggtgtccagattgaccgtgcagaagtacagccaattgccgctttcggggtgcagtgccgcttgaatggcgctatcgccgggattgctgatcggcgtaggcggcaggccggagatcttgtacgtgttatacgggttggactcgtcctgggtcatctcggtggtcacctgcgcgggcttgacgttattgccataggccacggtggaatccatgcccaacgacatgccctgctccaaacggttctcgatgactcgcgtcactttgccgtagtaatcggctttgttgacctcggcctcggcgatagaggcgatgatcatcacccgttcgcggtcactgccggtcggcacgcccaattcatccaacttggcgatacgcttatcgaccatggccttgaggatttccgaagcgctcttcatgctcttgacgttgtaggttcccggctccagccatccctcaaagctaccgcctgcttcattgggcagaatatccttacccttgttcttgataatcgtgtcgaattcgctttgggaaatgccggaaagcttcgcggcgtcggcgaacacatcggtggcacgttcaccgggatgaacctcaaggaagcccgccgcttggttggtgtcggagagaacggcgatcacatcggatgcggccatatgcttcttcaatgtgaacgttccaggatagagtgtcgagctattggcgttgaccacgctggtgaacgcggcagtggacttgatgacttcggccttgagcagattatcggcgatatccgcagcgccttggccctcgctcacggtgaattcgacctcgccatagcccggtcccggatagtccgcgatggccgtcgactggttgctccggctgtcgcgccatgcgatgagcttggttacgccgaaatagccgccgccgataagcagggcgacgatggcgatagcgatgataatgccactgacgcgcttgcgcttgcgctgtgcacgtcgcttgcgcatctccttgcgggatttcggcggttctggcggctcggccccgcgcattggttctgacccctgttcgacccaatgcgtgttgtcatcaaagaactcgttaaaatcatcggtcataaccgatacctcactactcccgggtacggtcgagtgccgtctgcaaaatcaccactgccgactgctggtcaaccaccggcctgtgcttgttcgaagctttatgggcctcgaacagttgacgatgcgcactgactgttgtcaatctctcatctatcaatgacacctgcggaatctgatactccgtagaatcactgtcttcattctctgcttgcagcctcttctccagattggccgcccacctgcgcgcttttttggcgcttttgccttctgtaccgtccatctgcaggggcaatccgacgattacatggtccacatgttcgtcttcgatgacgttcaggacctcgtcaatagcaaagaaatagtcgccggcaacatgaatgttgccagcagggtgtgcaaaggtaagctccgggtcggacagtgccagtccgacccgggcattacccaaatcaacgcctaaccacaccactggcggaatcaggctttctgcgcctcgtgcttgagcgcttcgagggcctcgccgatcttggaggcatcgacaccgccaccctgggcgaagtccggcttgccgccgccaccgccgccgaggaccttggctgcgccacgcaccagatcaccggccttgatgccggccttgcgggcggcctcgttggtggccacggcgaccatcggcttgtcatcctcgttcacgccggcgagggccaccaccacgggagcgtcttcaccgagttgtgcgcgcacgtcgagcacggtcttgcgcagggcgtcgaccgcgccgaagtggcccacgttcttgacggccaccttgaccggggccgcggagttcttggtgtcagcaaccagcgccggaaccgaggcagccagctgggactcgtacatggaggccaagcgacgatcggattccttgagcttagcgagcagggcgttcacacgctcggcgagctcgtccgggcgagcgttgagcttgtcggacagctgggagaccagcgcgtgctcacgagcgttgaagtcataggcaccctggcccacaacggcgtcgacacgacgcacgccggagccgatggaggcttcggacaggatgttgaccatgccgatcttgccaacgtggtccacgtgggtaccaccacacagctcgcggctccagccgtcttcgccgatggagaccacgcgtacgatgtcgccgtacttctcgccgaacaggtgcatggcaccgagtgcgatggcgtcgtcgaacttcatttccttggtggtcacggcgaggttgtcgcgcagcttgtcgttgacgcgctcctcgactgcggagatcacggacttggccggagccttggaccactggaagtcgaagcgcagacggttcggggcgtcttcggagccgcgctgagtggcctgcgggccaagctcctcgcgcagcgccttgtgcaccatgtgcgtggcggtgtgcgagcgggcgatggcgccacggcgggccaggtcgatgttggcgttgacttcggcgccgacgaccagcgtgccttcggtcagacggcactggtggacgatgaggtccttgatgggcttctgcacatcgtcgacttcgagcacggcgccgtcgtcagacaggatctcgccctgatcggcaagctgaccgccggcttccgcatagaacggggtacggtcgaggatgacctcgacgttggccgggccggtcacggcgggcacggagcccttgccttcctgcatgatgccgatcaccttggcacgggcggacatgtccgtgtagccgaggaagtcgatc

SEQ ID NO: 3823 - DNA, 26169 bp, Unknown
  R35_2m  MAG No. k141_8233
acgggagtggtggtcgtgcttgtgctccttgaggtgctcggtcaggtcggcgatacgcttggacagcagagccacctggacctcgggggaaccggtgtcaccttcgtgcgtcgcgtactcgttgataatctgggtcttctcgtcagccgtcagtgccacggcgtcctccttattgtgtcgttgcgcggtgtttcgtgcaggttcgctcgaaacgctctctatccgcgggcgaaattacgccaaatgaaaactatacggcaggggccggactggggcacacgcgctcacacagtggtgagcaatccgccaaacaacaccacgagcagggcgatggtttcaatcacgaagtacagaatgaagctcgcccagcttttggtcagtacgttcagtggtgaggtcttccggataatcaccagcagacccacgaacatcagggcatatacggcgatgccgatcgccgcacccataatgcccagattcgcggcattcgccaggccggcctgcttaccgtagaccacgtacgtggaataccagaaattgagattgagcatgctgagtcccgcgatgaactgctcgccggccaacccgatcacgaacacgatcagccacggccaggacggcgagacgaccaccgccatcgccaatccgacgtacgcaatcaccacggtcacccaaccgaccagtgcgatgccttgcggagacactcccccgagcacggccacaatggagtcagtattatttaccgccaacgaacggccgaaccagtacggcgcaacgatggcgcacagtacggcaagaataatcagcgcccaacgcaacggatgcgaacgacggcgctcgatatccgccagagacaaatcggtctcgggtatggaagcctcggggtgcttggaaacctcgacggtctctactttgccgcctacgatttccgtcgcctcgttaggttcttgctcgttggattcctgctccatgcaccgcctcgccgattacctgctcattgccgattattgcgatgcccatcttagcgtgtgtgttaggcaagtctccaatacgatcgattactcgccatggccctcaccatgatcctcgctacgattctccttatccgaatccgcgggagcaacgtcattattgcccgcagacaagccccgctcgcccgattcgcgtttcagaagcaagaaagatgatgccctgctcccccgtcgcccgctatgcagcaaagcctcaagcatatcgacctgccgctccagctcatcgatacgacgtacttgctgtgcgatcaacaggtcacgtaaatcgttgttctgctctttgcgggagatggggaagatgatggcgcggcgttcgggggatacgtagaaatcggattcgctgccggctttcgccgcaatcgcggcactctccgcctcgcgccactcgttcgaagtatctgacgttccagcggttcccgatcgataaagccccgaatgagataccccccccccaaggctgggcgggttccgacgcttcggcacccaggatctcatcctgtgcctcgcgccagcgggcaagacaacgttcgatgcgcttgtacccgatcagggcgggatcgagcccggcctcacggaacaatcgcaccggcgaggcacctttgttataacgggtcaagaaataccgtttgaagtcgtcagtgtaggtaatgcgtttcgaagtggcttccgccaccgccggcaatgacttcaggtacttgatctcttcggggctaaagctccctccaccgacagtcattttcatctcctgcactctctggaaggttcgttcgcatcccccttgaatatgggggcatgtcatagtttgggatgatagtacttgttatacgggcttttctaacccctagtagggtaggtttcatccccgataaactgctccttgcctcattgccggcactcccccctattatcacccttgcgggaaggtgcaacatatgccgcttttcttacgtgaaccggtggccggtagatgacggtggctccgaaatttcggatggaacaagtttttgcgtcaataacacaagtttcccctcaaacacggcatttctagtacccattgacacaagtttctgcgtcaataacacaagttttaggtactatgacatagatttctgtgtcatatgacacgagtttcgtcccgatagcatgcttttcacgtaaaataacgtacgcttcaagccgataacacaaattctggtttttcactgtttgtgttggaggactgtggtgcgaggcgatggctacggagtgaattgggaatcagggcctttcgcctgtccgtcacagttccatggccgcaatctccgtaagttacctttctcaatgaacaacgaataactcaaatttctgatactacgacatcgctttcgtcgaggaataatacaaaagattgaatagtatctcacgtgtttcggattactattctacaaagaatcaaccacttatatgcagtaaaaaaaaactcttataatggaaagagtgcctctaactgcctatgaacccctgttccgaaagagttatgaaagggctattccagatttgaagctctttattgaacggtgattttcagcctcatcaagccttaatctaatcaagatcgactcgatcaaatagtaggtgactgtcagccccaaggagtgacggtcacctttttaagatatcacgatatcgatttaaacgattattcgtcactcgaatgaatcaattcactggcaaccataaaatctgttcgagatcgattatgcaaagttagcacatcctgaaggccaatagttgcattgtcatcccccagcagactttctactaaatccgcatagggataccctgccaacatatgaggacaaagtcgatgattcggtctcataagacagtcgagatacaggtatccataataattcatgtacgggaatatcctcgtagctgcaggaatagtcgagggacaattattaccgatatctgccactcttttcttatagtcattgaggatcttatcacgcttcgatgtgttacgacccgttactaatgcatttttatattcatcccatgcatcagccgtcaatttttccaagagcacattgaaatcatcaactgtttttttataagattttttcttcggcaggcttccgaagaaaatcccaaattgtttcgacttaagaaatgctaataacgcatcagcagccgtacgttccgcaatcttcttacagccatcagtctttcctgaagcgaaatccatcacacctttgaagaacaggtaggggatttgcccccattgcgaggcatatccaagatgattgccttccatctcatagccaatcgtcttatatttgcctctgcgagcaacattctcccaaaaagcgtcataatctgcaatctgctcgccacaagctacagggccgatatgcacattgaatgaaccgcccggcatagtattttgctgttgcatcatttcaataacttctggctgagtgggaagttgatcaattcttgcatgcaccacaaaatcattgacaacctgattaagctttttgtacactggagatgtatttatttccggtagaaattctccgttctcttttttcctgaatcaagtgaatataccgaatctgcaacaataacatcacacaaatgggtacgttcaggatctcccgcacatacaccacacatggtcaacatcgaagggtgataagtatcattgatatgattaattaccggcgcaactgaacttccctcattggcagctgaagctaacataattttcagcaaatgtgatgaatccgtttttaaaacaccaatacgaacaacgccaatttggctatcacaattggtttcccaatttatatcataaaaatcttgtcctattttctcgacggcaaccccctcctcagctagggctgtaataatcacaatatctatatcatccattgccatattgcacctttgattctggttatgtcgaatttgaaagtctaagaaaaaaggaggcgagcgaagttggcacttcactcgcttccaattggggtcaattcactgatgaattagaccacgcgttcattgctctcgattcacgcgttgagggcgcgcttggtggagcgggacttggcgaacacggtcgcggcaacaccggcgaggagcacggcgaccacggtgaacagcatggtaccggcggcaccggtgagcggcagctgggtgatggacttgacgttcaagaccgtcttgtcggtcgtgttgacctgatggagattgtcaacggtcagagtgccctcgccgccgttctcgccgatggtcacggtgaaggtgaccttgaagttctcggcgtaaccggtcggggccttggtctcctgaacggtgtagacgccttcggcgaggccgcggacagcgaccttgccaagggtcttctgtgctcccttgccgtcggctgaggtcagggtctcgctaccgttggtggcgtccgggtagtagacgccgttggcgtcctgggagaacttgatgaaggtcttgcctttatcggcggaaaccttgaactcggcaccggccaggcccgtggcgtcgttgccgacaccgatcttggtgaagtcgaacttgccgagcttcttgacgacagtcgtgccttcgccggtctggtcgttattgttcttcacggtggccgtgttggtcacctggtcgacggcgtcagaggtcacgacgcccttgtaggtcacctggatggtcttgccggcgtagtccttcacgttcgggaacgcgatggtcgtcacggtgccgttctcgtcggaggcggaaccgttctgggtcagcgtgtagtcggtgtccttggccagggtcttgtcggtgccgtcggcgttgcctttcttgacgacgaccgtgaagttggcgttgtcctcggccacgttgaggcccttggatgcggcatcggtgatggtgtacttgtaggtgtcgtagccggctgctgcgggcgggacgacggcggtgatcgtgtagttcacggtgtcgcccacgttcacggtgcccttgccgtcagccgtcttggtcggcggcgtcgggacgttctcgtccttggcgttgaaccggcccagcgtgtcgatgttgtgctggccgtcctcggtgttcagcgtgatcttcgtgtaggtctcgccaccgctggtgatctgggtggcgaccaaagcggacttgccggccttctcctctgtcgtgctggtcacgaggaaccagccctcggtggcggtgatcacgccgttcacggcggcagtgccctgctcgcccgcggggatgcgcttcgtcagctcgtcggtgaacctacgggcggtggcggcatcgaacgtggccacgtacgcggccgggttctcggcgtactcggcgggaaccgcagcatcgccgttggccgcgtcggccgcgttgtacacggcgtccttccacgcggcgacggtgttcacctcgacggacgtggcattcggggccgtgccctggacgttatcgaacgtggcgaacttgtaacccttgtacgtgtaacccgcctgggcgttgttcaccgtaatcgtggcctggtcagtatctgccgcgttggcggtggcggcaccgaacgccatgccacccaacagggtcgccgcagcagcgacgcccgcgaaaagcttcctcaacttcatgagaaaccctctcttccttaacttgtttactacttgttttctgcaatcacggaggctaagaaccctttttcacaaggggcttcgcaatccgcaaatctttaattgctcttttcggtctgagggaagtctcctgcgcccccagtccggctccgccggccagctcccctcagggaggggagccaggaacgggctagacgagttgacgcttacgccacaccgtgtaacccgcagcagccaacaaggccatcagacccaggccaccgccatacaccagccagtcacgggccgaacgaccaccggttaacggcagggaagaaacagcgatgtacttgttcgtgaacgtcgggttgttgtcgttcacagtcgccgcccactggccgtcatcgttcttggcaatggtcaccgtcaccgtcttcgtgctgccgtcgtaacgccagccagctgggacattggtgcagtcctccgtcacattgaacttgtagacgagctgcgtggcgttaccggtcggaaccctgaacttcagatccccattgccgaagccaaccgtcgcgctcgcgccgctagcagtcaattcgcccttggacacagtcgtagtcagtccattgttgaccaagccggtaacgtcagcacacttaccagcattcgcatccgtgctatccacgcacttcaggttgaagctgaagtccgaattagcagcatgtccctgcacaaccttcgtcaccttgacatccgaagcgggcaaggccacgtaagaaggtgtgttggttaccgtgaaggcaccggattgtgcggtcagaccttgtagcttgaggtcagtcttatcgaccttggagtcatagccttcaaccttgacctcggaaaccgagtatgcgtgtccctcagggccggcagacaccgtaaactcgtgagtccagttgccggcggcattcagcgttgctgaaccattggcataatccctgccgtcctgcttgagctggacctgcacggaatcatccgcgtgattctcgctgccgtcggaccaagtcttcgtcaccgtgatcctggagaccggaagggtgatggtcggcttctgcgggtagagggcggtctgcggatcgctcgtcgtcgtgccgccctgcgaggaggtcaccacggtcctgtagccgacggtggcgctggggttgtcgttcgtgtagaagttgttgtcgccggaggcactggcatcgtccttgtggttcttaacagcctcgtcgaacgcagcctgcgtcggcttgacattgaagctcaccgtgtaggtgacgccgtcctcaagcttgccgccgttggacgtgaccggccaagacacggtgccatcagccgcaaccgtcgcctccggggcgccagcccacgccgtggtctggccgtgctgggtcttcgtgtacgtgaagcccgcgggctttccattcgcggaggcgccgtcggagctcacgacccagctggacagcttgtcgtgaatcgtcacgtcggcgtactctgccgtcttggtgatctcctggcggatggactcgaagatgttgttcagctggtcggcatccgtggcggccttgtagtagctgctgttgtcggcgcgattgccaagcctgttccacgccgtggcattcggatagttactggagacagcgtgcatataggcgttaaagcgattgttccagttggttgacgtgttgttcgggttcgcgtcgccgaacactccgatggagtagacggttgctcccgcatccttaagcgccttcgcgtttctcaccgcatcatttgcaaccgacttctcgaactcattactactcgtcggttgtccgtccgtgaagaagataataacctttttcgcatcggtgcgcgcgttctgcagtgcgactcgagctttctgaaaaccgtagtcagcctgcgtggctcccgcagcgttcagcgagtcgactgtacttgtcagaccattaagattcgacgtcagatttgtcacaatctgggagttgttatagcgctgtccccaacgatgatcccaataagtgtcgttacccacattatcggaagcagtaccggcaaacttcaccaacgcgatgcggttctgctggctctggtcggtaatcttcgcgttctcgtcggccgtcgccttgatgaagttattgaccgcggtcttgagcgagtcaatcttcgtaggctggttccaagcaatcttttcggccatcgagccggacacatccagcaccagcacgatgtcgagcggctggttcgtcacaatctcgcccgtacccgcgctcttcgcaccggtgacgttcaatgccaccttgtatgtgccgtctccattggcggtaacggtcttctcgcgggccggagcagacaacgtcggatcatctggcacaccgtttgttccctcagcggaaagaggaacaggcacgctggcggccgccttctcatcggtggtctgcgattgtgttgtggaggcattcccatcgtccgccatggcggtggcgcttaccccagccacgccggcgacgccgccgagcatcgccacggcggcaacgacggccactaaccgcttgcctctcctgcccgctgcggctcctaccgctgcgaaccattctgcaattctcttcatagccttgtccgtctctcttacaatcgcgtacgccagaacctggcgttacacgtacaaggcgttatgctattaatcaaaaagtgcgaatgcgtccccccggataggggaagattcttatccgatattggtaaagtccttggaattttcggaaagcggcacccccgccccccccccgcgataacgcaccttttcttctcgacggggcgtgtcgttcccaccatccgggaacggaggcggatttgccaccgctacgtggggtacggagttaccaacgaccgtcagtatgccactgctccgtgtgcgtgcagtatcacacaccatcacacaccgctgcgcatacgcggagacacactacatgtaatttttgtgaacgcaaacatacgactcaccgagcggtgtgtgatgctggtgatggctggcgatgatggcgcgagcggcgttgcgagcgacgctttggtcgcgatcctatatatgaggttcgtaaggtacggatctacgttacatcgcgggcggaaaaggccttattccttggtataccgctgttggctaattcgtgctactgccctatatcctgattttcggtgttttcagggtatagaaaaatccccgtagagcatactatgctctgcttttgatgattatcgaaacatagaacatgctttggctcaatcgtcatatgcccgaagtggcaacaattacaagttatcccgcaccatcgcaacgacatcatgattgattttgttgatgccggggtcggcaagcatctcatcaagagtcatccagcggcagtccttggcaccaacatggaactcagtgaaacgccaggcgtcaggcattaccgttacgctagcgcggtatagcgtgtattcgtaataacggaggcttctgctgttttcgtgggttagattgcgggttgtggtaggtgcatgtcgagtccgccgcatcggagcatggtcagggcgatgaggttgtcgacgtggtggaagccgtaggccatgcggatggcggccttgatccggttgtcggatgcttcgagtctggcgttggggtagcccggccggatggtcctgaggatgtcggggcgtcggcgtcggatcttttcggagagttcgacgatctcgggtatgcggctgcgcgaggcccggaacacccagtggtcgagttcgccgcgcgcctggtcgagggggtgtctgagcagggtgcgcaggagttccttgagctgccaggcgcggtagagccggcccttcgggtccgtgttcctgatggcgccgagcgcgtcgttctgccggtcggtcgggtcgtccgggttcttcaggacggcgtgcttgacgccgcgcatgcgcttggtcacctcctcgttgccggcgcgtctcgcctggttccacaggcgtctgcggacctggtcgagcgcgccggtcatccaggagacgatgtggaacccgtcgagcacgcgttcggcgttcgggcagtgcgcggcgacgcatgagtcgatccagcgggccccgtcgccggcgaccacgcggatggacgccttccgctcctcggcgagccgccggaagaacaggtcgaacacgtccccgccgtacccgtcgtgcgcccagaccacgcggtgacgctcgtggccgacgaccaccgtgatgtacgtatggcctttgcggtggctggtcccgtccacgccgatcgccgtcagcccgtcgaacggcgacggcatcgccgtcctgagccgatcagcgaccctgcgggcgatgtcgcccgcggcgcgccacgccacgtgcaggaacccgctgacggtcttccggttcgcgacgcccatcagccacgcgcactccgcctcgaaatccctcgtgaaccggttgcccggttccgcccacggcacccgggcgaccacgacgccgcattccggacaatccacgcgcggcatcgaggcgaccagtccgacccgccagcagccgaaatcctgatgacgccagcgacgcacgccgccgccttggccgtaaccgtggcgtctcctgccacacatctgcgagcgccagggcttttcatatcagaaactagaattcttgtaagaataaacaaaaaacaccccggtcgctcatctgcgagcgccggggcgtttgtgactgtttgccctatcgaatgatttttgcttttgcgttgaagtatggggcagacccgaattcatcgtgcttggttgcggttaattctattgttctaccgttcagggcggcgatggtttcatacgctttcattctggagctgaattctgcgagaatttcgccgtcctgagttttcaaaacgatgctgggcttagttctgtcatcgacggccaatacgctgacttcttccgcatctaggtttccgctgggtatttccagaatctttttgcaagctggttgcgtgattttgaatttcagttggctttgcgttggtgcttgggcgatgctgtcccccagcatgtcgtagaacacgtcttcgctgatgatgttgaggtcttgtccggcgagttggagtttttcggccttgagccatttgctgcttttggagcctttgagggcggcattgtagtcggtgctgccggtgatgaggtagttggtgtctttggtgacggttttaccgttgatgccaccgaggttggtgacggcctgttgtgcgttggcgcgggtcattttcttgagtgcgccggtgaatacgaatgtgaggttttcgaatgcgggatcaggggtgacttcgtcctgtggggctatctgcagcagttgatctccgccacggaatagcgaagataagcctctgcggctgcggccatctccggccgggaagggaataccgttctcattcatgtgccgaatcatccaccgatagcacgcgatggtctgttccacatcggcgagcgctctatgctcttggtcttcggcgatatcgaatctgacgatgaggtcttgcagtcggttgtgacgttcttcggggtagaggtatctggcgagccggagggtgtcgatgaagtcgttgccgacatacttgccacagatatcttcggcgttgtcatagaggaaattgatgtcgaagttgacgttgtggccgagaatcaggccgtcgcccatccagtcaaggaattcggagagcacgtcggcgagcgttggcgcgtttttttaccatgccgtcgtcgattccatggatttcggtaacgatattcgggatatggcgaccagggttgatgagttgtccgtaccggtcgatgggttgcccgtttcggactttgatggcaccgatttcgattatttcgtccaatcgtgggtcatatcccgtggtttcgaggtccaaggctacgtaatcttttctgtcggccagtacgctggcccctttgtgttctctgggtatcatgcctccaacctcgttgttcgttcggccgactcgatgcggcttgattaggttcaagcgccgtatatacggaatcgccccggccgctctttgcgagcgccggggcggtttggcgtcagtatttggtgagtcgacttttggtgtcttctcgttcgggtcgttgtggcggtgtgccgctgtcgaggtatccgttttgcgagagggcttggtatgcgatgtccgggaattcgcatacaagggcgctgatttggcgggtgcggtattcggcccggctctgttcgatggcttgctgccattgcggctgtgcgtcgatgccgaattcgtagattgccatttgtaggacgtcttcgagtccggggcggaatcggtctcctcctaccgggaagtggagggaggagaatgtggggaaggttcctttttcaaggaacgcttttcgtctgttcttgccctggcttttgctgccgcatgcgagcatcgctttcgtggcgctgtcgttgctggcgtgaatgttgatgtgggccgcgggaatggcgctatgggggtcgcgcacgaaatcgtagtggatgatgggtgcggggtcgctttcggctcgcagcgtgatcgcagactcatccacttggaggtatgaattcgagtcgcggcaggagcattggtaacggtacgagaggcggagtatggtgctgccgcccacggtgagagaaatgccttgcggatcccgcgtcttgatcagatagctggcgctgcgttttttgcgtgcgccctgcgggtcggcggtgtattgcccgtccgacggttggccgagaacctcagtgagcatgttctcgagtctctgggcgaaatcgatggcctgttcctcggtctggtcggattccgtgctcatcggccctctaggaagtcgagatcctcgaggtcgtacaatgcgatgcgctcctcgagagtaagtccgatgaggtcgcgcttctgagaaagctgttcacgagtgccgtacttgccttcgaggacattcctgcgctttcggatttcctcgctgtccagcatgaccggcctgccgattttatgggcctttggagccaccgccactgcagtcatgtcagtctcctttcggcttgtcatcacgtctccgtatgctcaatttacacacttttgatgaacttatgcacattttcggccaaaatgtgcataagttcggctcattcaggtcgcccgcgcgtgtcgcaaaatgatacggatgtggcaccatgagtaacgcatgtatgacggtgaactccaccagatggctgccgagctcaacgcccctcgttctctcacccgcctctatgcgacatatttagattctaccgttcgacaggcgagcgctggagacgtttttatttgttctgctccattcgttgtttgagttgttctggggtgaggcttgacagtgacgggtctcgtctgagtctctccgctacgttgtggtctctcttgaatctgattatgtccattgtctcgtatccttcatgtttcaggtattcttcgagcagtgtcatggggtattcgaactgggctccgtccctgatgtaggagtccgcttcttccatgctgtccactccgaaccatttacggagcagttcgtacattttctgcttgtctgcgccaagctcggcgaatgccgcggtggctcgttccatatcacggcgaaattggcgactcgccccttcgttgctcatatcggcgtcatgccgaccggccatttcgcgtgcgaaggccagaccattgtctttgacccatttcacgattttgcccatttttccgttctctcgttccggcatcatgcccccaacctcgttgttctctcggccgtctcgatgcggcttgattagattctaccgccgtatatacggaatcgccccgatcgctctctgcgggcgccggggctttggcttgacggaatcagggtattcaatgcgatgatcagcgcgactattgtgcatgtcaggaaatcggtgctcaatccgccaacgaaaatcagcagggcgaatatccatactccgattgccagaatacggaacatgaccataccgatggttcgcctttgtctgccgatcgatcgggcatgaaaaaaccccgtcgccagtggcaatcggggtgggtacagtggtaaatataccttggtaggcgtatgtcgtcaagtattccagcatgtcaccattctgctggcttacgcgcaaacacgtattttccgtcgaccattccgttgacttcatcgggcagttggtgagctttaaaatcggctggagagagagctttgttccagctgccaattctgttctgcgcattacggaatggtttcagactgcccgcgatcggccctttatggggattcaacactccaacaggtatacgttctcgcgcaatgcgtatgggttccgacagatcggagtcgttagtcagaacgagagctgcatcgattgtgttctcgtacatgtcgcgcaacagtcttgaagccacatttacatcggagcccttctcctcaattcgttgtatatccactccgacatggccattccggagtgagatgggccaattctgtggaccgcgtggcattatcctgctgaactgctgcgccgttacgctcagcagttgaggcactcggctgcgtgataacttatcaaccatgaaggcataattgctgcgaactacgtaatgccccaaaacgatttcatctaccgaaccagacgcacgcaatgctttcagatagaaattctggtcaatcgccgccgactgcgaggaagaggcgttcacacgagcggtgcaatagaccaccgtcagagaggcgttgggatcccaatactgcgcatacggctgtagcattccacgtatgtcaagccatcgccattcaggcgtcgaacgccccatatgcgaacgcattccgtaatacagattaaagccatctatataggctcccacgcgaaattgactcatagttaacaattctactggttattattctaaaattcatctccactttttccggctggcgtccgacgcaaaaacaacggccagacgcttccttgtcgtcttatcattatcctgattttctaccggttttacatgcacttgttacaccatgtgcgagtaatggagaacattcgaataggcacatccagatctttgccgttctgacttgcataacttacttagttgagctataattattatgtaaacaaaaacagaacagtggaaggaggtgagacatggatgaggtctggaaagcgatagaagccatcggctccctgcttgtcggaatcgccgcagtcatcgcggcggtgaaatccaaaggcaacgcgccaccacccgcaccgaagcccaatccgccgcacatacggcgaaggcctcgccggtagtacaagagccgcagattccgaatagtcctagtatccggagctgcggctccctatccccagactaatccatggagcatcatgaacacaacaaacgcatacaggctcgtctcgctgatatgtggcgcgatgtgcctcattctcgccatcggcggtcaggccatcgcggccggaaccttcggcatggccgccggggtgttcggctatctgtcgggaggccggaaatgagcaccgcaagatatctcagcctcaaggaggtcggcgagcgcatcggcacgagcaatccggccgcgagggggtatcatctgccggaaccggacgcactgatcggcacgactcgcggctggcttccggagaccatcgatgcttggaacgccgcccgccccggtcgtggtgcgggcggcggaaggccgcgcaagaatcgcaatcaggccgattcccccaccgcctgacgagccttgtcggcgagcgccgcaaggcttgcggcggaccagtgggtgtatccggccgtcgtgctgatttttgcgtggcccatcatcgcttttctcgcgtcttccggggctccggcttcggcgaggtgcgtggagaagaagtggcgggcgctgcggatggtgacgtagggcagtccggcgtcttcgagggtgcgtttccagcgtcggcgttcgacggtgttggtgagcgggtgtccctcgcgcgtgaatatgagctggccgggttggcgttgcctgcgtccgacgagcgtccagagtccgagccacgtctggttgctgacgggaacgaaccggttgccctgcttgctttttggttcgacgagccagaagcatccctcgtaatggcgggggcggagccagttgggcacttctgcatcggatctgaagcgttggagctcccacatgatctggattccgtgcacgccgtcgacggtggcgagctcttcgggcaggatggcgaatctttcggcctctctcatgccggtcttgaacatgatgttccacatgaggctccacatttcgcggtcgtcgtcggtatctgccaggtggctgtatttgcgacgcttggggtcgagtgcggcctgcgccgcccgggccggctgtccgggttcgaggatctgggtgggctgcaactcatagcgcggcggtgttgcggcgagcgccgggttcgatgggatgaggcgttcgcggaccgctgcgtcgagcacctgcctgagtctgagatagtggttgtggacggttttgcttcggtgttccttggcgagtttggcgcacattccgtcgatggtggcgggggttattctgtcgagtcgcattccgccgatgacgctgcggatggtgttgcagtcggatcggtaggtttcgagggtgcggggtttgacgttgggcgcgatggtgttgagccatcggtctatccacacgtcgagggttgggacgtctgcgaggggcaggtcgccttctcgttgaagtttgtcgagcttggtctggagtttttgtcgggcggcggtcttggtctgcgcctgcgcctcgatccagcggcgtcgtccggttcgtggattgacgccggcgctcttcttcgcgtgccagactccgttgtcgtcgcgccattcgcttccgcttccgttgggtcggcgggtgttcttctgctgtgtcatgggcttcaggcctcttccttttcgtgcggtcgaggtcaaacattaggtcaaacatttcgggcggaaattggtggacttgggcggaaaacttgcatcggcatgttttccgcaccgaaaacaccgaaggccgcaaccccaagcaattccaagggtttgcggcctctttcagtggagcggatgacgggaatcgaacccgcgtaatcagtttggaagactgaggctctaccattgagctacatccgcgttaagcgtcgcttttggcgacttgagttattatacatatttcttcgaggatggcaaacgcgtgtggttgcagcaggaccagccaatctagttgatggattgcggctttgccgaggactcccctcagtcgcctacggcgacagctcccctcagagaggggagctagaaaccgtcgaaatcacaaatgggtgagctgagactcgtatggttggaggtcggcgtccatcgcgtccagaatcacgaaccagcagttttcgggcagcgagtcgagcttgtcgatctggttcttgagcagacgcacgtcgcggctggcgagcgcgctccacaggttgaccatgatggagacgttgtatagcatgtggcactcgggggcctcgggcgtgccgaagtaggcggcgaggtcttcgttggtgccgagcttcgggtccacggtgtcgaagtcctggaccgcatagccaccgtcgttgttcgggtgcggcatgtcaatcaacggcatcaagtgcaggtaagtgagcttctgctccttcaagtacggaatcttgtcggcaagtttcttgaggtcgccggcgaacaggtcggtgtacatggtcatgccgaacatatcgccgcgcttgcaccagtccggatcctgcctgtgccgactggttgctttgagccaccggaaactcctttgtctctatccgttgcccgcatcaatcgtttgacgtattgtattacaatacatcaaaccggttcgataatcacaacccaagactcgccgagccaccggcgctattccacagaaatcgtcaccaccgcggaagcaatcggaccatcgtggctcagagaaatatggatatgcggcatcaaccccgcaccgagagccgagcgctgcgccgaacgcgcattccgccgctcctgcatcactgcataaggcccgttatcggaagcaggggaacaagcagaggaatagcgagcgccggcagccgaattcgcgtaatcagtttggaagactgacgccgcccccttacccagagacacatgcggcacaccacgggaatcatccaagatctcgatttcaggccacgggaaattatcaagcgtgaacggatagggggcattgccaagataatcgcaccacgctttgaggaacgcctccttgcccgcccatttggcggccagatggacggcctcgtcatcgttcttcagccgtgcacgatccgccgcctgacgtacctcacgaacggaaaacagcgagcgcatgcgcgagccggattcagacagctgctcggcgaatgcggcgacgtcaaccacgtcatgacccaaaccaaatgtgcccatagcacccattatcagccattcaacacgtttacaacacatccagaataacgaggttcacacggaacgcggcatccacaaacgaaaaccctcggccaccccgcaagctgaactctgaaagtcaacaccaagtcaaacttttgaccaacggttggcacagcgtaaaatggtgatattccaaccgacactccgatacgtaaatcgattgacgtcaaacgtttgactttttaacgtggttaacataacgatccaatgaaggacaacttcacaacaaccaaccacaaccagccaatgaagccagcaaggaggtagaaccgtggtcacaatgaagcaaatcgccaatcgcgccggcgtttccatctccaccgtctctctggtgctcaacaaccgcgatatcggccgcgtcagccccgatgtcgccgagcgagtccgcgccatcgccgccgaactcggttacctgaccaaccgtctggccagcgggctacgcaccagcagtagccgcaccatcggattcctcagcgacgaagtggccaccacgccgtttgccggccgcatgattgagggcgcgcaagacgccgcccgcacactcggatatctgctgctcaccgtgggcatcaacagcggagccaaaagctccgatcgcgaaattctcacgctgcggcagttcggcgtggacggcttcatctacgcacgcatgtttaatcagaagacgatgctgcctcaatcgttgcagggctgcaaagtggtgctcgccgattcgaccgatgccgccgaagtagcgcccagcatcgtgcccgacgagcacagcattggattcaaggccacaagccatctcatcgacgccggctgcacccgcatcgcctacgtgggcaccatgcacaatatggtcgctcagcccgggcgagtgtccggctacatcgacgccctctccgagcacggcatctcgttcgacccagaactcatgatcaacatggacaccggcagcgacgccgccgcccgcatgcccgcgttcttcgacaaacacccggatgtcgacggcttcttctgcttcaacgacacccgcgcttgggccatctacaccgaggccacccgtcgcgggctgattatcggcaaagatatcgcggtggttggcgtcgacaaccaccaggttgtggccgaagcgctggatccgccgctttccactgtggaactgccgcattacgagatgggctactgggcagtaggtaagctggcctcgctcatcgaaggcgaggcacccgatccctttcctcgtgccggatacccggtcgagaaggttcagccgccgccactgagcgagcagtcaccccagattgaatgccagctgcgcatcaagcaatcctgggtccggccccacccccagcgatagcctgcccaaaaatcacgcatctatcctacttgatccggtttcgactgtatgtcgaaccggttcgaccccattattcaaggaagaaagaaacaagagataaggaggagcatcatgccccataccatccgacgctcagccgtcaaagctctggccgcaacgcttgccatcgcaagccttgtgaccgtgggcggctgcggtgaggcggaacgcgcggcggcgaaagccaacgccaatgaaatcaccatctggacgcacacggcaggcagcgaagccgagcttgccggcgtgcagcagatcatcaatgactacaacgccagcccagacaagaaggccaccgtcaaactacagtccttcccgcaaagctcgtacaacgactcgatcatctccgcctcatccgccaacaacctgccctgtctgatcgacgtggaccagccgaacaccccgtactgggcgtgggccggcatcctcgccccgctcaccgacaaggacctgttgtcccgcgccgacgacctgatggaatcggccaagggcacgtggaacgacgacctgtacaccgtcggctatttcgatgccaccatcgccctgttcgcccgcaagtcggtgctggacaagctcggcgtccgcgtggctacggtcgacgagccgtggaccaaggccgaaatggatgacgcattggccaagctcaaggcaagcggcgaatggacctacccgtttgaaatcggcacggccgataacaaaagcgaatggtatgcctacgcttacgcaccgattttgcagtccttcggcggcgacctggtgaaccgcacggactaccagtcgtcggacggcgtgctcaacggcaaggaaggcaaggaattcgcccactggatgcgcgacctcgtggccaagggctacatctcgtccaagggcggctccgacaccgcgctcgacttcgtgaacaataagtccggactgctgtacggcggcatttggtcgatgagcactttccagaagtacgccaaggattacgacgacatcgtggttatgccgatgaccgacttcggccacggctcggtgaccggcggcggctcgtggacggtcggcatgacccaatcctgccccgcacctgaagccgcgcaggactacatccgattctccctgcaagacaagtacatcgccaacatagccaaggccggtatgaacatcccgaccaccgaaggcgcacagaagctcgtgcccgagttctccgacggcggcgacatgcagatcttcaccgagatttcgaagaagtacgtcaaaatgcgccccgaaaccccggcatacaatttcatctccaccgagttccgcaagaccatcggcgacatcatgaacggtgccgacgtggacacctggctcgacaaagcagtcaaccatatcgacggcaacatccaaggcgccgacggctaccggaagaactgagagggaccaaccatgaccactgcaacatcaaccgcaaccactcgcggtacgtccggtaccggagtcggtgccgacaaaaccggcacccccggaaccagcgccggcaaaaccggcaccgtcgccacgcgccggaagtccaccgccgaacagcgccacgagaacgccgtcggctgggcgatgcttctgcccgcatccatcctactgctgctgttcatcggcattccggtgattctggccttcggactggcattcaccaacgcgcgcacaatcagcccgaaccctacccggttcatcggcatcgacaatttcacccgactgttctccgacccgacgttctggtacgcgctgcgtaacgtggccgtgttcgcggtcgtcgtggtgcccgtccaagccgggctcggcctgctgctcgccgtgctgatcaacaagcaggtgcgctcctccgtgttcttccgcacggtctacttcctgcccgtcgtcacctcgatggtggtcgtctccctgctgtggatgttcatctaccagaacgacggcatgctcaaccaggtcatggccaaactcaccttcgggcactggcaggcagtcgactggctgaacgacccgcgcaccgcaatgggcgcgatcatcgtcatgtccatctggcaagcggtgggccagcacatgctgatctggctgtccggcctgcagaccatccccggcgaactgtacgaggccgccgaactggacggctgcaacgcctgggagcagttcaagaacgtgacctggccgtgcctgcgctccacgcgcaacatgatcctcatcaccatcaccatcgccgcgatgagcctgttcactcagatcaacgtgatgacgcaaggcggcccgcgcgacgccaccaccaccgtggtgttcgaggctgtgcgctccggcttccagcagcaggagatgggctacgcctccgcgatcacactcgtgttcttctgcatcatcatggtgatcaccggcatccagcgttatctgactcgagagaagtaaggaaagggactgacgatgagcaacgcaacaactatggccgcatccccgcaggccgaccaaaccgcgcacgacaagcgcacgtcgaaagaagccaagaaagtcgcctacaagcacaaccggctgtccgtgggcgggtggatcgtacgcatcctgttcgcctgcctgttcgctttcccactgatcttcatggttgtcagctcgttcaaaccggacgatgagattatggcggacctcggctcgttcaaggcgttcctgccggtggggcacatttcgctcgacaactacgcgcaggtattcacccgcgtgccggcctccaccttcctcatgaactcggtgatcatcacgctggtgaccgtggtgcttggcgtaatcgtcaactcgatggccgccttcgccatccaacgtctgcaggtgcgcggcaagaagatcatcttcacgttcattctggccacattgatggtgccgttcgagacctacgcgattccgctgctgtggtgggtcaaccagctgccgcgcccggtggtggaccagttcggcctgtacttcacgcgcggatggatcgacacgctgcccgtgcagatcgtgccgttcatcgccaacgccttctccgtgtacctgtacatgcagtatttcgagacgattcctaaggatctcgacgaggccgcccgcgtggacggtgccggctggttccgcatctactcgcgtatcgtgatgccgctgtcgggcccggccaccgccaccgtggtgattttgagcttcctgcccatgtggaaccagtacgtctggccgctgatggtagtgcagtccgagagcctgaggcccgtgatgatcggcgtgcagtacttccagcagatgaccacgtcgtggggtcagatcatggcatacagttcactgatcaccgtgccgatcatcatcgtgttcgtgatctttcaaaagcaattcgtcagctcaatcgcctcttcgggagtaaagggctgacgcgttaagcaaacagtcctgtggactgtttgtagcgtcagcctgagcgaggcgaaagccaagcgaaggcaacactgagcctcgctgaaagcgaacccacaattgcagggccgaaggcgaatcaatacgtgctgggtgggatttccctttttgcccatccggcgcctttatatccagcaattcccggtatcgaaaactcaaggagtcctcttatgaccatcatcaatgccgatggctacaccgcgttcgaggcgtttgccgaatattccggaggtgccaatgctgccccggcaaccctgcgcttgaccccggcaaatccgaacacaccaccgatcgaagcccacctgactgccgccgaccgtcgcatgcgactcaccctgccaatcaagcccggcgagcaatacgcactacgttgcgaaggcctgacgctgggctttgcgtacctgactggaggcgcgaatctgctggatcgaggcatccgaatcatcaccccggatacgcgcgccaccgcgcaccggccgagcgcacatttcgaaccggcccagcactggatgaacgacccgaatggactgtgccgtttccaagggcgctaccacatgttctatcagttcaacccgtacggctggcagtgggacagtatgcattggggccacgcggtcagccgcgatttggtgcactggacagatctgccgatcacgctgctcccgcaagaagatctgagccgtgacggctcgctgagcggcggggcattctccggttcggccgtaaccgtggacgagaccgggcatatcgtgcccggcgatgaggcgagcgccattcgcatcttcctgacccgtcactgggagtgccgcggcgaccccggctctgtggtggaaacgcagaccacagccatcagcaccgacggcctgtccttcagcccggagaccacggtgattcgccgcccgagcgaagatttcggccttgatttccgcgacccgaaagctgataacacgttgttcgatggtaccgcgcttgcgggcactcccactattgtggtggccacaaatctaccatccggcgagacaccagccgcaggagactccggctccacgccgcggccggaaggcgaatactggtacggcgatggtgcgttcgccgccgccggggagcaagagcctgacccaacccgcacgcctgcattggcattgttccgtgccaccgacaccaatttaggcaaggccgcatgggagtatgccggtccactgctgttcgagacgggactcgccgaaacctatacctacgagtgcccggatgccttctcgctggacggctcggcggtggcggtcggatcgatgatgaaactgcatgattcgaccggtcgtttccagccaattcgctggtacacaggcgttatcgcggattcgctcgacgctccgcgtctggacgtgcagcacaccggttggtgcgatttcggctcatgctattacgcggtgcaatccttcctcgatcgtcatacgtcggtgaacggcaccgacgtggaccgtcgtattgccatcggctggttgtgcgactggttcggcgtacgcatcgaacggcctgactatgccaatggcgtgatgagcctgccacgcgaactgcacgtggtcgatggtcggcttatctctcgcccgatccaagaggtctacgacctgttggtgggcgatgttcttactgcaacgccagcaggcaatagcaatacgttccaagtgcccaatcacgcttattacgcggatatccgccccgaactcggctccgcgttctctgcgacactggtttcgggcacacgcactcagccggatggagccacggccgaggtctcgctgcgattggtcagcgacggcgctgccgtgcacctgacctccaccggcctaccgactgacagattcgactatgtgtccgccaccaagcagatcgaacgggtcgaggtcttctacgatcacggtgtggccgaagtgttcgtcaacaacggcgaagacgcaggcgcgattctcttcgattgcgacactgtcaacgccccggatttcaccaccgagctgaccgtcacggagctcagcgggactatcaccgtccacgagctgcgcagcacccgctaaaacataacccatatctcagtcgaggggcgtgatcagcgccccagacatctatctgcgttcaaagaggtacattcggggtcttgcggaatgctatctgctttcaaaggagtacctagactgcaaaactgcgagtatggtcgttggaatatcaacgctcatactcgcgatgtcagagtttcgatacccctttgaaagcagatagtattccgcaatcaggcaaatgtacctctttgaacgcagaaagcccctcctttgaaggaggggcttccgtatgttctgcatatttctctcactgagtttgtgccagcgagaaagctccaggggaaactcccctcacccgcttcgcgggagctcccctcaaagaggggagccgagatccggtgcgctactggctcccatcaaccgaggggagccagaggaatcaggcctcgtagtagccgtcggcaccgaggcgggcgtccgggttgaggagcatcgccttttcgacctcgtggtggtcgtagccacggtgatcctcgcggaagcgacggttgtcgatcggctcgtagagcgcggcgcgacccatcatgccttcctcgaggtgacgctggccggcggccaggcgggcgttggcacgctcacgccaggcttccagcgcggcctcgccatcggccttggccacggccgcttcgaaggcacccggatgaaccagggccacgaagccggaaacatgtccgaagccgagcgaggtggccagaccggccttgaccgggcgaccagcggtctcgcgaccgaactcgtcctcgccaccgccgatgcgcaggggcttcctaacccagaccatgtggtcgtcgcgctggagcttcggatccacgcaatcgagcgccgcgttcgccggaatcacgccggacttgaacagctgcgtcagaccgttgacctggaagatgcaggcaccacccttggcgtggccggtaagcgtcttctgcgagatcacgaacagcgggttgccgtcggtgcggccgatggc

SEQ ID NO: 3824 - DNA, 22154 bp, Unknown
  R35_2m  MAG No. k141_8685
caacggacgcatccgccgctacctgcccaagaaaaccagtttcgacggcctgacagacgaggacctgcaggccatcgtggacgagatcaacgacacccccatgaaggtcctggaccgggaaacgcccaacgaggtttggtatcgagagctcggcaaggtactctcgaagacaagccacccaaagacgggtgttgcacttacaaattgaatccgggcatcctgtcgtgaactgacatatcccctaatatgggatatgtcagtgcagacttcacccgtagcaaaggttccgatcatggtgactataaacgatgtggctaaagccgcaggggtgtccaaggctacggtgtcgtatgtcctctccggcaatcctaggatttcgaagggcacggttgagaaagtccggaagactatcgatcgtctggggtacaaggttaatcatgccgcgagggccctgtcgacggcaagaaccatgacgttggctgtcagctcatggccgcagcagggaccatatctggcgctttcgtccggccttcacatgttcgctttgtcccattacgctgcgaaatacggctactcgctaatgttcatcaatgattctgatgggctgctcactttacgggatatagccgagtccaagcgtgtggacggcgtggtcatcatggacgtcagagaggacgacaaacgcatcgaagcggcggtcgacgcagggataccggccgtcctgttcggctacaccgattacccacatggtctgacgatgattgactccgactatgaaagcgaggcggctcatatcgtctcccatctggcggagcgtggcataagggaaacgattctcttcctccagtcaaagaaggtgttcaggaacaggctgggtttcgcgatacgattccgtgacgcctttctgctggaagccgccagcgtcggcatgaaagtcgacatcgtcatgcccgatgacgacgattccgactcgtccgcactgatacgggacagcatcctcacccatcctgaagccgggtcgatcgtattccataacgaggcggccaatatcgccgctgcaggaatactgccgtctatgggcctgaaggtccccgatgattattacgtggtgggagtcatcgcaaaatacatttcggatgaattccaccttccgtttgtatcaatcgacacttacgtgaatatgctggccgaaacggtcattcatgccctcgtcaccaagatagagacgcccgagcagcgcctgagcgatcagctgatgacgttccctcttgcggtgccctttgcaggataaccgcctcccgtatccgagtaggacgccattcaagacgtagtggtttgagcgaagtaggtgaaccggtacaacacaccgtattgccaactctcagtgcaattgatatcattttgttgaaccggttaactaacgatacaacggctgtatcggcattcggttcacaattcaacgatgaggttgcaaaggaattgaggaaaccatgaagaggtcatatattcgtactgcatgggctggaatgttggtcgcatcgatggcgttgcttggcgcttgcgggtccacgaacagcggaggtgttaccgacaccaaggccgataaggggcttgccgtggtcggcgacaatgtcacatacgatcccaatcatcttgtgaacgagggcaagcccatcacgctccagtactacacgtggtatccggacaccgacggcgcggtcgccgcctttgaggaatacaagaagatccatccaaatgtcaccatcaaaatcgtaaacgttgcatgggaggactatttcacgaaactcccgatgctgatgaagggcaagaacggaccagccatcttcggtgtgcacaattcctacgatgaagtcctgcgtccgtatttcgaaccatacgacattcccgtcgctgaccttgaaaaggattacgtcggcgtcgaggcccacgtggtagatggcaaggtcggatacatcgacgcggcaatcaataccggaaacatctactacaacaagactctatggaaggaagccggtctcaccgaggatgatattcccaccacatgggatgaattccgcgatgtcgccatcaaactcaccaagaaggacggggacacgataacgcaatgtggcttcaatatgaatggcgacgcattctacagctcggccttcgaaggcatgaattatcaaaagggcgaactcctgttcgctaaggatggcaagagcgccaactacgacaacaagaccaccgaggagaacctccagtggatggtggatctctatcagaaggacaaggtctgctctaccgatttcggtacggatggcgacaagagcttcggcaatggccagacggctatgctgtaccgttggggatacttcgagggcgatttgaagaccaagtacaagaacgtggactatggcatgttcgcgacgccgacatggtcggaggacaccccattcgcctatgaccgatacaacggagaatccaccatcggcatcaacaagaacgccagcgatgatcagaaggcagtcgcgcaggatatcgtcaagttcctgcttgcggacgatacgtatgtaaagaccgtcagcgaaaacatgaactcgttccccgcgaagaacagccttgccgacgacaatgaccttgcgaagatggctatcttcgatttgattaagccccgtgtggaccgtctgatctggcccggcgccatgccggccactgtcgagaacaccgcgaagaaggtgttccagaacgtgttcaacaatggcatgtccgtcaaggacgccgttgcggaaggccagaagaccatgcaaagcgatctggagaagagcagcttcgaatccgcggaatcccaatacaagtactacgacgaactcaagtagtaactccatcggtcgatgattgcggcgttcggacttttatatctgggcgccgcaatcatcttcaccgggcagaaaagagcattcacatgaaagttcgagccgaattacagcgagctctatcgttccgcaatatcgcgatcttcttcttcgtcgccaatttcatggtgttcctcgcctatccgattttcaaagcgtttgccggaagcatgcacgactggaatccgatgacgggagtgtatgagtggaacggattggagaacttcaagacgattttgtcggatccattattctggcagtcgatctggaacaccttctacttctcgttctttgcggtcatcctacgtatcgttctcggattgggcatcgccctgatgctggtatcccaattggccaaggcaaagacattcttccgtgccctgttctacatgccgaccatcactccgctcgtagcggtctcgctggtatgggtctggatgtacgatccgcaatttggtctcatcgacaagttcttcggcatccacgtcaattggctgcaggatccgaaatgggcaatgcccgcgatcatcatcatgaccgcatggaaggatttcggatatgcgacagtgctttacatggcggcactgatcaacattcccaaggacatcttggaagccgcccagatcgacggcgcagatagttggcagaaattctggaacataacgcttccgcttatccgtccgacgaccgtgttcgtgttcatcacatcattgattacgtatttccaggcttacgtgcaaatcctcatgatgacggacggtggtcccggcacgaaaacatacacaatcagctatctaatctatagccgggcattcgtcaactacgacttcggcaccgcaagcgcaatgtccgtcatcttgttcctgataacaggcatactgtccttcctcagcctgcgcgtctcctcggaaaaggattgacgatgaaaaacacagtggcgaaaatcgcattcaacatcatccttatcctgttcgccttggtgacggtcatcccattcgtttggatgttcatttcctcgtttgcgaccaatggcgacatcgtaagtatcagcgacaatctgttcccgaaaccctctacgttggacaactacaggaacatccagaccacgttcaacttcatgaggttcttctcgaactccctgttcatatccgtcgtgaaaacaggcatcgtgctttatacgagcgccgtcggcggatacatcttttccaagctgcgatacagggggcgcaagttcctgttcggcatgattctgagcaccatgatgattccctgggccgtgaccatcatccctcaatacgaaatgatggtgaacttcggcctgctggactcctactgggctcttattctgcccggcttggtaaacggattcggcgtattcatgttgaaacagtccatggacgacattcccgacgaaatcatcgaagccgccaaagttgacggtgctggtgacttccgaatcttccaccagatagtgctcccattgagccggaatgcactatccgcaatcggcatcttcgtattcctgtggaattgggaagactatctgtggccattcctcatgatcaacacccaggagaagcaggtccttgcagtcgggctgaagctcttcaacggacagtacggcaccgactatggcggcctgttcgccgcgacgacagtggcaatcgtgccagtgctcgtggtgtacatcttcttccagaagcgtttcatcgaaggtcttgctgctggcagcggcaaataattcggtttttcaccaaacaaattggagtacaacatgtgcaatgacgctaaatattcaggtttctccatcactgagaacgcaattatgtggaccggcgatggggagtatcttcgcatcgaagcttggggagaaaacagtgtccgagtccggtcatcagtgatgagagagcgattggatgaagattgggtgctgctgcctcctgctgaatcctccaaagcggttatacggaaggatgaggacacggcggagctgaccaatggccagattaccgtgattgcgaaagccttcaatcaaccggaagagggtcggtgcgactgccgccttacctttaagaaccaagaaggcgcaacgctattcgccgaaaccgagcgaggcggatcactgctattgcaatcccgttccttcctcagccggccaggtggatcttatagggtgaaggcttcattcaccgtatccgaaagcgaacatctatatggcatgggcgagtaccagcaggctatcgtggatcttaaaggacatgacttcgaacttgcccaccgcaactcacaagcctctgtaccattcgtcgtatcatccaagggatacggattcctatggaacaatccggcaataggatcggcttccttcgccaaggatacgatgacatggacagcaaacacgaccgatggactggattattgggtcacagcaggcgcggactacaaacagattgaatcccagtatgctatcgcgacggggcatgccccgtccatgcctgaatggggtttgggattctggcaatgcaaactccgttattggaaccagcagcaggtgctggacgtcgcccgaggattcaaggagaggaacatccctctagatctgatcgtcatagatttcttccactggcctcacatgggcgactttcggttcgaaacggaattctggcccgatccgaagtccatgtgcgaggaactccatgacatgggcatcaaggtcatggtgtctgtctggcctcaggtcagtctcaaatccgaaaactacagcgacatgaagcagaggaacctgctggccaaagcgcgccacggagtggacgtgggcatgatgtttgtagagccatgccagttctacgatgccacgaatccacgggcacgtgactacgtgtggaacaaatgcagccagaactatgtagccaacggcattgatgccttctggctcgatgaggcagaacccgaatggtccacgtactcctatgaaaactactcatattatcgaggcgatgtcgaaaaaatcggcaacctataccctagcgaatacaaccgcggcttctatgagggacagcagagaatcggacgcgatggcgacatcgtcaacctcacacgctgcgcatgggccggcacccaacgttatggagcacttgtatggtccggtgatgtcggctccacattccaggacctgcgtgcccagattacctgtgctatcaacatgggtatggctggcataccctggttcacgacggatatgggaggattccacagtggcgtcatcgatagcccagaattccgagacttgcttgcacgttggtgccagttctcatgcttccttccggtcatgcgcaatcatggtgaccgtagcctgcatacgaaaaccggtaaagagcatatttacgcggcggatggctcaccaagacttcaatccggtgcggataatgaaccatggtcatatggcgacgagatcgaacgcatcatgatcaagtacatcaacatccgagagcatatccggccatatgtccgggaactcttcgaacaggcacacgtagatggccagccgctcgtgcgaggactgttcttcgaattccccaaggacgaagccgcgcattcaattaccgatgagtacatgttcggtcctgacctgctgattgcacccgtaacccaacagaacgccgtcagcagagaggtgtatttgcccgatgatggcaacgtcaaatggactgagctgcataccggtaccatctatgacggaggcaggcgtgtacgagtagaagctcctcgtgatgtgcttccggtctttgcgaggaatggtgcagaccatggcctttccggattgatctaaacgtttccttcctcttcctccgaataaacggtggttttgtcccaaacctgatggctcgggacaaaaccaccgttccctatggcatggctaccatatattggtgcattgctccaacgcggattactagctgatggtgagggactcccttccaggacagccccagcactgtatgctctttaaaacgatttgctctcctatcggatgtggaattccaggagtcgcccctcacaaatcgtcatgcattacccagtgttgcatctttgtctcttgtctcggtatagatacgcccggattcaatttgtaagtgcaacgctcgtgcagagcaaggcaacggtcatctgctgttcctgtagtccacccaactgcgcgaagccgcagatactttccgcgcccaaccaagcgaagaacgaccgctgatttcgcgcaccgacgcgcaagccatgctctccgacgcaatccaccgatgccatgaacgcttcattattcatgtcaataagccaggaaatgcatatagcaaatccttcgattacactgaattcatcaaaaccgtgcaggctatcgcgggcaatgccctgcaatccagtgattacgcaagcgcatgcgaaaacttacgattgtgcatacacgaagtccacgcgcttctgctctcgtccgaaaacgatgatgattccgagcctttgctcacgcttatggacggtctggcgatgcgcgtgcgatgctatatggagaatgtggcggaattcgccgactcccctaccgccggcaaagcattgaacaccattgcacaggcagcgaatgacaagaacatgcggcaatgcgaaccattgaacaacatgttgctgatttccagcgcgctcgccttcgcccaatatgacgacaaacgcatgtgggcctatgacgtaatcgagaacgcgataacgcgtaatctggaatactcgttcaacgaagagagcgaagaaagcgacgaggacgacgaggatacgaacgaggtcgatggcgagaccgacttcttttctgcaacgacaaatccgacacccattacgtgggtaagctgcgcaatctgttgcgcatatacggcggtctcagcgcggaagaatggcacgacgtggctattgaactggccaaagattgcgtacgaaacatcatcgaccgcatcaagtatcagccggaaatgaccaccaaaggcggcacacagcgccacaacagctggcgcaatcccgcttacgagaagctcatcgtggatgagcggctttcggacgcggccctgacctattgtcccatcgtagattacccgccgctgccattgctacgcaccatcgccatcgaacaccccgaatcggcaaaatcgataatcctcgaagcgatgccatacggcaccatgggcgcgcccgtgttccggtttacggtggaacgtggcgtcgacaatacattgacggcgcgccgcaccacataccagcagatcgccaaacagctacgtcgtttcgccgcagtgttcggcgatgaggagacccgtgtgctggcacacgagattgttgagcgttatccgaatcgtactgcgttgcgggaagagctggcgtttgcgttgtagggagacggggtatgcgttccggcatacatccggcacagttctcgaccgtatccagcaccccgtccaacagccacgactttttagcggacaattaaacatcccatggacgacaggattccgctcatacttcgtgctatgcggaagcatctcccgaaaagcggtaaatatgatggtctctgatatcaagaacactgcgcttgaactcggactcgcgcaggtccgcagcaactacacgattcctgccggggagacgttctcaatcacggtggaaggggatgtgcccgcgatatccgcgaatgagcatggcttctgcagcattacctacatacccatcgcagctgccgactaccagaaggaaattcaaatcagcgccacacgcgccgcaatagcagccggagccaccgaaatcacctggaccgcgaaggaaagcgtaaccattccaatcggaacctatatcgttcatgcgatgggatgaccacgagccttaccactacgcatccgctgattctcgtcctgtgcgcggtcatcggtagcggcgccgtcacctcgctcgtctcatggttgcttcgccgtatcggccagcgtcggaatcttgaacaggcgatagccgagtccgcggccatccgccgactggaactggagatctaccggcaatccctgttcctgccgaccacgagtcggatgcggcacgaacaccagctcgacgccggcaaggcatacacggagcgtggcggtaacgggcccggccacgtgcgctgccagcagctcgaagacgattaccggcaccggctcgacaccgacgactggaactaccgaccacaccacgcaccgcataactgaagaacaacagaacagactgattagtcagcaaaccaggaagccccatgcaacgccatcgcattggggctttcctcataaagagaggacaaaggcatgtccaagaccagacaccgactactcgccataatggcgctgctgctcgccatgctcaccgtcatgcccagcgcgatggccgacatgcgcggcatcaacgtatccggccgtgcagtctccgagcgtcacgtgcaccgccgactacgacttcgccgtcgtcaaggccacgcagggcaccggcttcaccaacgggtacatgaccagccaggccaactgcgtgcggcagcggggcaagagcctcggcttctaccattaccgggcggcggcaacgcgaccgccgaagccgactacttcgtcaacaccgtccgcccctacatcggcacagcggtcctcgtgctcgattgggagggctatcagaacgccgcatggggcaactccaactgggtgcgcgtcttcgtcaaccgtgtccacgcgaggaccggcgtatggccgctcgtctacacgtccgccgcctacctgtaccagatcccagccgacgtgcgcagccactgcggcctatgggtcgcgcagtacgccaacaacaacgccaccggataccagacgagaccgtggaactacgggcgatacggcgaggccatgcgccagtacaccagcaacggccgcatccccggatacgccggcccattggatctgaactacttccgcggtaccaccgcgcagtggaacaagtacgccaaccccaacggcggatcttccactccaactccaacaccgcaaccgtccgtagcggcgacacgatatccggcatcgccgcccgcacgggactgtggccggtgtccgcgtggagcgtgccttccggcaacgtgaatctgatctatccgggcaacgtcgtcacctaccgaggcgccggctccggcaacggatccaccacggccgtccacatgcatatcgtcaggagcggggagacgctgagcgggatcttcggcgcttccggttggcagcgtgtcgctcagctcaacggtcttaccaacccgaacctgatctatcccggtcagcagctccgctactgaccatcacccaactatggtcccggcatcgtgtcggggcctttcgtcaatccacctatctggaaggaacactcatggatatttccgcagcaaccacccttgccaccggcatcgtcgccctcgtcgcgcctgcgctgattcagacgttcaagaagtacatccccgccgactacgtgggcctgacgtccctcggcgtgagtgtcctgctcggcgtcatcgccatcgccgccaccaacggcttccacggctacggatggggcatcgtcctcaccggtgtcatcggcgtcgcacaggccgtgtacacgctcgtcaaccaagcgttcagcggcaagctcagaaaagacgagactcaggcatgattcgtttgtgccggtgtacaccatcctgaaggatgacgtgcaccggcattttcgtttactgtttcggttgtccgtcatccgagctgtcgcgtattgagtcgatggcctttgccagctcgtccggtggtagaagaccgagttgtctggtggacatctccagtagcacgtcgcggctgacgtcggctatggcgtcggacgtgttgctgtttccgcgttgcatggagtccatgacggcccacatgacgtccgggttctcgcctacggaccgatcgaacagctgcagcaggcggttctcgacgccgaacacccacttcgtgtacgcgtaccggtcatcgttcgccttgctcaacgcatggtcgagcgaaccgtcgtaggtgagttcggcggcccaccacaggcgtgcgatgccgtgccggatcagacggccacggctgggtgtggtcggcaggatccagcgttgcttcgctctgttcttccagttgcgtacgccgtccaggggccagcggtcggtcatgtaccggcggcaggtgttgaacgccatgtaagtccacagtcccggcagtgcggcgttgacgcggtcgatctggccgaccgcctcgaagaggattctcgcgttgtccgagtccgaactttcgacggacagcggctcctcgagatcgatcggatccctgtcgagcaggaggtcggggtcggtcgacaactcgtcgatctgggcgaggaagtcgtccggggtcttggcggagtccagtttggtcaggatcaggctcacgctgtcccgcttgaactgtttcgcgcatgtcaggtcgttcatgcctgcacctcctcgttgtcctgctgggcgtacacgtcggccgcgtatccgtcgatggggttggcgagcagtcgttgggcgatggcgaggggacggtcgtcgtcgttcaggtcgttcgcgtccatgagtcgtttgatggtcctgcaccattggcggtccgtgaggtcctcgccgtcgccttggctttcgttcgcgcggatgaaggcgatggcgtcgaccagcacgggcaggacgagggccgtgagcttgaggttcgcggagtcgatcagctgcatgcggtcgaacagggtcttgggcagggtgatgatgatctgctcgtcctcgatgtagctgaccttgactcccttggccttggcccggtcgtccttgacgatcttgaagatcgagttgaggggcgggttctgcgggtcgtagagcttggccgggtcgaacgtgaagtccgtggggacgctcagcaggtctcccgtgcgtacgtcgaacgtctcatcgccgtagtcctcgtgttgccgagaccaccggaaatccgagatggggcggcccgcgaccgcgaacacgctgaccgtgacgggtccgagcacgtcccgttggtcgagcgaggaacggtaggtggcgccgtccgcgtgcggggtgtccttcaccagatccagatagccggagaagatcgtggacgagcacttccacctggccatgacccgtacggatccttcgtcgaggagccgcttcaggtcggggtcgtcgtggaacacccggaagcggatgacgacgtcctcggtgcccgatgcgaaggtgaagttgccgacccgccattcggaggcgacgtcgcgttcgtcgccctggccattgccgagaacggggatcgggaacgatgccgtggccatgtcacttcacccccaactggagcctgatgccgcccttgatgcgcacccggagacgggtgggatgtttgcctgtgaccttcacgttggatatggctccttccttgacgttgagccggcgcggggcggtgccgctgatgtccgcggcctcctcgacgggcggcgtgtagttgccgaacgcgccgtcgagcgccgccgtgagatgcagggcgcccttttccgtccctccggtcctggaacgcagcacgaggatgtagtcaccgcttctcgcgtcgaaccagtagcgcatggacaggctgccgccgtcgatgacggaatccccgtcgccggaacggcccaacgcggaaatgccggcggcgtgcttgccgcgttttgtctccccgccgcgttgccgtccggtcgacacgctctcgccactgtcgtccgcgaccgcgggtttcgtcagggcgatgctcacggatttgccgccggtgttggagaccggttcgggatcggtctcgcgtccctgcagggaggcggattcgcgttcgcttcccggaccgttggtgggacggaccccgtggcggtcggggttgccgtcaatctgcagttcggccggtagaagggtgttgagccccttgatggtgatttcgtcgccgagctcgcgtcggaccctgctgcgcagttcctcgaggatgaatttcttaatagaacgcagtacggccttgccgttctccttgtcgcgtgccgcctgccagtcgtcgtgccgcaccggttccattcccctgaggatgcggttaccctcgggtgaggagcattccagtacggccgcgtatttggcggcgatggatgtgttggtgtaggtgtgcaccttcatcaggggtttgcgcatgacgaccgtgttcagtttgcgcggcagggcgtcgtcgacgttgatgtacagcttcatctccccgagccgtgaatccttcctgacgatgggcgtctggagaagggcgttgtggaacgcctgcatgacggtcctgcgctccgggtccggtatcgagtcgatggcgtgcttgagattgtccgacgcgaggcgccaccggcctttgtcggtcatgccttcgacgacgagatgaccgcgcatgatggccgccatgaagttgtcgatcatcgcgtccctgacctgttcgagtcccgggtcgtccggcgcggccgagtatccgacgatgtacacgtccgtgcccggttcggttctttgcgtgaaaggtcccaatggctcggggtcgcgtaggtagtggtagtcctgcgtgtcggagatcatcgtatacgttcccataggacccagcagctggcgcggatcgcgggagcccggtgtccggtgggtcgtcagctgcgtgcatccggcgaacacggtctcatcggatcccggcgtgcgtgtggtccagaactcggtgcgcacgagggaggagaggataccgaccgacttgccgatgccgaacgagccaccggcgtcggtcttgccgacgctcacaccggaccctcgggtcagggcggtgagcacggaaccgctgtcggcgatagactcgctgccggcaaggcccttcgtgttgtaatcgctcacgcgcagcacgtcgatggattcgccttcgagcgtggcgacggctttccgcagtctcgggctgtcaggataccgatcgagcgcggccctcacgtacctcctgagattgtccacgtcggggatgtccgccaccttcatgcggcggagctcgaagaccatgatcaccggccaagcgccgtccttggcgatcgcgtctagggagttctgtcccagttcccgggcgagggcctgggccacggtatcgtcgctgaagatctcctcaccggagttcgacggcccctgctcctcgtttccgttcggtttgaataggaagccatatccgatgccgttcatgacagccttacctttccgcccgcgggcctatccttgtcgaaaagatcccgcgccttggccagctcgtcctcgatggggccgaacagcgccgagacctcctcgggcgtgtattcgtagttcttccggttggacaggttccccagaatctggatctccctgatcagccggttcccacggctttcggcaagccgtcgaaagcgttcgctcttcgtttcgaccatgtcttgattctacatttcggatatatatccgtcaattagccaaaatctagcgagtcgatctcgtggatgtacaaaaagggagttttacatatcagaatgatatatacttgtccctatgagtaattcggaaccgcaggaaatcgacgacgccaacgcattgatcgccaagttgcgtgaaagcatgaccagacggcagctggccgaatcattggggctgtccacctcgaccgtggagcggtgggagaccggcaaggtccagcccaagcccgtatccgtgccggcgctgaaggagctgtattacggtaccacgcacgaggacggcacggacttccgcaccatcgacctgttcgccggcatcggcggcatccgccgcggcttcgcgtcggccggcggtcatgccgtgttctccagcgagtggaacgagttctctgcgcgcacctatcgcacgaattacgggttcgcggagaccatggccggcgacatcacacaggtggacgcgaacgacatcccggactgtgacgtggtgctcgccggtttcccgtgccagccgttcagtctggccggcgtgtccaagaagcgcagtctcggccgtgaaaccggattccgcgataagacgcagggcaccctgttctttgacgtggcccgtatcatcgccgccaagcgtcccgccgcgttcctgttggagaacgtgaaaaaccttaccagccacgaccggggccgcacgttcaaggtcatccttgacgcattgcagaacgagcttggctacgaggtgcattggaaggtcgtggacggccagcacttcgtaccgcagcaccgtgagcgcatctacattgtcggcttccgctccaagaccgacttcacttgggatgatctgaaataccccgaccatcagcccgtacttgccgacatcctccacaagaccgacggcaccgagccctacctgccctgggacggtgaaaaatacttcgacttcgagcacaacaaggtacaggacaaatacacgctcaccccacgcctgtggcagtaccttcaggattacaagaagaagcacgaagccttgggacacgggttcggttacgggctcgtcacccccgacatggtgtcacgcactttatccgcccgttatcacaaggacggcagcgaaatcctcgtcgcccaaggcgatgaacggccccgccgtctgacgccgcgtgaatgcgcccggcttatgggctacccggacgagctgcgcatcccggtgtcggacacgcaggcttaccgccagttcggcaacagcgtggtcgtgccggccatcgccgaggtcgcgcgcatcatgcgcccacatatcctcaaggtcatggccgaaggcgatcaagaccttatccttgatgactcggagaagtccgtggacgagatccagaaggcccgcgaaatggccatcgccggagccggcgaagactgatgccgacaatggcccgtgtcgcgccggccaatgtccgttgttcgtgggtatcgtggttgcatgtgcgatacccacgtcaatgaagcccgccagtggtacgacacggccgacatcaaccaagtcaacgaactactcgccaacgctggcgcgagcagcatctgggtcaaacgactcgtcgcgaacaacaactccaagcagcagatatggcttgccaacgatccgtcggacctgtcgttcctgccattgggcgcgccatcatatacgccgacgaaatcgcagaagaggaaagccggcaatccggtcatccagattcccgtgacatggcaatgggtcacaccgaacggccggttcgacgccccggacgcgaaactctgctactacccgcaataccccgaggtacgcttctccgggttcctacacggttgcagggaagcaccttcggaactgttgaacgagacgaagcgcggccacgaagtcaaccgttgtctgttcctcggccccgtaaagaacggttctggcgaggtcatccgcgtggtggcactcgtagtcggcgccgaatccccggcggcacggtacgtgctcagcatggaaaccttcgaggccgggcatttgtgcccgatcgtctaccagtcacaacggcaacgcgatgagttctccgtactcgaacaggccctcgcgaacatcgtcggccgcaagatcaccccttggcggctcaacaacgacggcgccatcgtcaaaccatacatcgcccccaacgcaccaggtctcaccttagaggcggaactgggcgtgggcgagaacgccatccccggaccagacttcgacgtctgggagctcaaggccatcaagcaaaagtccttggaacgccgatacaaccacaaggtcacgcttttcaccccgcaacccgatctccctgaaacgggtcgtctgtccacggtggacttcgtactcaaatacgggcacatacacaccaccgacgagggcggcaacccgaccagctactacttcacctccggcgacatccaacgcgagaacgaagacgacaaaccaagcgcgaaactcgaactggttctggaaggattcaccgacgcgaaacacttcgacccaaacggcatgatcgccctctacgagaagggcacgaggaacctcgccgcaggatggtcatatctgaaactgcttggccactggcagcgcaagcacaaccgcgccgcatacgtgccctacttgcgcgagggcgaggacggcaacacctctgtggagttcggcccgctcatcaccctcggcatctccaccagcttcggcctattcctccaagccttcaaagaaggcaaggccgtctacgaccccggtgacaaagccacactcactaatggcaaatggacgccacatgcccgtagccagttccgcatcaacctcaatgacgtcgctgccatctatggagaagtacgcgaagtcgatatgcgcgatcccgaatcctactgataagagacgagcatggagaaatctttagagagatacaaacaccagctcatcgtacttggcaatggcttcgaccttgcgcaaggcttaagaactgggtatgcggattatttcagggacaagtatggtgacagcccgtccatggattcgatggataacgcttgggacatggtgctgtttgaccgaaagctgcataaccacagcgagtgggcgaacgtggaacatgccatccgggaacaagtcacagagcgcgaggcgttagctcgggtcaggaaggggctggacaaccccaatgttctggataccagcaatctgctgggaacctatatcgccaagcgtatggcttcgatgattgatgaggttcagacggtcggttttctgcaatcttcaatcaatcacaagaacacggtttatttgcggttcatgcgcaaagaattgacattgttcgagcattctctgcactcctatctgaagaaaatagttgagcagtcccagaatgacgatccgtggcagtacacggtttcctccgatggcctgtatgagagcatcgccggaatgccggcattcagtgatgcgagtgtcttggagaagcatcacaacaccattctgaccttcaactacacgtcaccgttccaaaggcgggatgaaggatattttcccggtctcgattccgtccgattcattcacggatcccttgcccagggcgacatcatcatcggcatcgacgcattggagcaaggaccgcggggacagcgtgcactaattgatgacgaggatgtaattcccttcaccaagacattccgcaccttggaatccacgtcccactacgacgcgttcagcgatgtattcaatgacgagccaccggattgcatcaagttctttgggcactctctatccgaagctgactattcgtacttccaatccatattcgaccatgtgggtctatatgggggaacaactgcgctcatgttcctataccgccctgatgcacggtatgacggatccgacttatatctcaaggtcacaaagctgattaacagatatggcgatacgctcgacaacaaggatcacggcaagaatcttctgcataaactcattctggagaaccgcttgtcgattaagcgtgtgtattaagaaaacagccatgtacctcagtcgttccttcccattcggctggggaacatctgcgctggtctggacacaactgggacacaatgaccgacgagaacagtgaaatcatcggcaatcaacgaatattgcggattgtcactaaaatggtatgattgcaacgaaaacacaactaatgaaatatagaatgacggacgaaccaactctctgagagaacaaggggttactcagtcattgcacaacccagattgcgatgtcaactcaaacagattcatttcgacccaagacggctctctgactcaggctactcccaccagtaaccgcccaaatatttccaaacgacaatccatgcaattccttaggaaccagcccggtctcctcactcaccgtggaaaccgatatgcctttctgtctattcgtatcggccacgaagtggaatacctttgaccgttctggacgcaggccacgaggctccccatttttgtagccctgaaccgtcagttccgagcaagcctgccgatattcccattcagacaatcggcccagctcataggcccagcgagccatagccattgcggaaaccttgaaataatgtttcgcagccaaaatctgcgacactgaagcgtgagtcggcaccatgcccagaacacggcgcttcggcatcaaaagatctgcggcaaacgaatgagcttcactttcgatatcgcgcgttccggcagctgctacatcctcagacaccatttcatgcatcatcagatgtccaatttcatgcgcaatatcgaaacggacacgttctgcggtcttgctggtgtctaccgccacatacggcacaccatcgaacataaaactgaaagcatcgacctctcgcccaacagtcggtagactaaacagtcgaatgccatgagcttctgcaagactcgtcatctcaggcaacggattctcgccatatcccaaaatcgcgcgcagcatagtcgctgccaagtccggacgcattccggcgctatcggcaaagggcaaatcgcattcaggcagccggaagtgatcctcaatccatttgaagaacagcaatgcattccgaccatgcccactgccgaacgacgctgccttaccgtcgattttctcaacgacctaaaccatacctgtccttccgataaatcctcgattagcggagcatgagaggacacggaaaagaacgacggcataacctgcaacgcatcagccagtaccgctgcttgagacaccggcgctccaacttcttcataattggcaaccgtccgcgaagtcacaccgagagattcggccaattgcaccttgctcagtcctgccgtttcacgggcacagcggatacgttctggattcagcgaagccttctgctcatcgcgcggaaatggcgacggcaactccatcttcaccccgctcatcgttacgtgcctccacaaactgatcggtcaaattaacttcatccagcacaagtcggttatcccagccaatgatttttccattagaatccacacctgcgggaagcgacacttccaaccgcaccgaatcagtctctcagcagtacaccaccaaccacatctgcggacgcattggcaccatagaggtccaatcatcaaaagacagcccttgctacttcaccggagcctttcctgaagcaccaataacgttatagttcccgggactttcttaagatgcaactctttgctgatgttcccggtagcctcagcaaccgcgacgtgtctaaatcatccacgttgtaatctggtgcggttctctcatatggccaaacctgagcgagccagatatgtaggttcttgaaccgggagaatgacatgagcaacgtcgatgaatcaccgtttaatcttgtgtgcttgatatgcggcaaaatgataactgccgaaatcgtcgatgaaaaccaccaacgcacgatggaacaactcgtcgaaagcgccaacgacagcggattcctgccccttgatgccatcgaaatgacttcctacggtcattacggaaccacctttttcgatccatgcgacgacggtacacaagtcgccgcactcatctgcgacaaatgcatgaaagagcgcagcgaccgtctcatgcacattgacacaaagcgccgtctcacccctttcaatgtgacgatgaaatcactccgcaaatcgagctaactccgatcatgacatgagcgactgggataaccctgtgtcttagcagcgtcgccgacgttggattgacgcttcgtgatagtttgccggttggatattgcatcaaaacgcaatatccaaccggcaaactcattatcgaacaacactattcatcagcagtatcgtcactggcgtcagcaatggtgacggtaaaagtcttgccaagcgccgtgcaataatcagcacttgcgcggctactccgccatggtcagtcaccttcccgctcagtcccacaaatcgtagatattgtcgccaatccaccgccatacgcgacggaactcggcctcagttttcttagttaccgcacatgctgcatctgtcccgaaaacattacggtaaggacggtaatgggaatccgatgaattaggtcgccatttatcggtcagcacgagcacggcagccgcatacttaagatcctctcgccatgcacagtatccaataccgagttcacgtactgtcttcctcgtgctgcctctgtcattatgctccaacgcgtctaggaatgtccaaaaaggcgtggattcgagccaacgcgataactcgtcatcagtgcgttgcttcaaccagcgagagctgtcgtcatatcctgatgggctactcatacagtgtttctccattgcggtcagcaactgggacattcttatgatttccctacttcccagataccagacatccatgtccgtgaatccacgggtttctaattgccgaatacgcaatatttcctttttgattcgctgatactggacagtaatcggcttggcaacggtgtctaccgaatcagtcatgttccatactgttttgcctagtcttcgcaaaacatgctttggccttcgcgcgcacttcttttctgttttgttgatttgatgcataggcggctcctctctgaaaccattttgaattgaacatcaccagcatactcactgttaccgcgcaaatcatctgctccgacatctatgtttctgtctagacataattccgatatgatgccccaacaaattagcggtgcgctcagtctcctcgctatcaggagctttcctgtacattgctgcgcgacctcggtattcgctctcggcgttccgtgaacaatctcaagtcttccggactacagtaagcggcagatgtagccgattgtgccccagtccgaaggaggacattatgggattgtttgattcgctgaagaacatgtttgcgcatcacgaacatcatcatggagccagtatcgggcagttgctcactctcgccgatgccaaagcaatacttgcctttattgtggtgcatcagcagcttgcggacatgcgcaaggtagcggatgcagtcaagcaattgcaggatgagatgcctcagtacatcacattcggcatgtcgcattattacagtgagcccaagcgcgtgcgcttccagtccgaaggtggcaagttcatcgatgcggacgccatcgccaccgca

SEQ ID NO: 3825 - DNA, 3814 bp, Unknown
  R35_2m  MAG No. k141_8800
cgacgccaaggtcccgctgtccgagatgttcggctacatcggcgacctgcgttccaagacccagggccgcgccatgttcaccatggagatggactcctacgacgaggtgccgaagagcgtctccgaggagatcatcaaggcccagcgcggcgagtgacacgcgccacatcatgaagtggccggtgtctccagtcagcggtagtatcgtataccgctgactgggttctggctcttcaaagtggcacataacccagaaacccagtagaataagcgagtccctgtgcgaaagggcgcaggaaactcacgagacgtccaggaggacaaaagtaatggcaaaggaaaagtacgagcgtactaagccgcacgttaacatcggtaccatcggccacgtcgaccacggtaagactaccctgactgccgccatctccaaggtgctgcacgaggagttcccggatgtcaacccggagtacgacttcaaccagatcgactccgctccggaagaggccgcccgcggtatcaccatcaacatcgcccacatcgagtaccagaccgagaagcgtcactacgctcacgtcgactgcccgggccacgccgacttcgtgaagaacatgatcaccggtgccgcccagatggatggcgccatcctcgttgtggccgccaccgacggcccgatggcccagacccgcgagcacgtgctgctcgcccgtcaggtcggcgtcccgaagatcctcgtcgccctcaacaagtgcgacatggtcgacgatgaagagctcatcgagctcgtcgaagaagaggtccgtgacctcctcgacgagaacggcttcgatcgcgactgcccggtcatccacacctccgcctacggcgccctgcacgacgacgctccggaccacgagaagtgggtccagtccgtcaaggacctcatggccgccgtcgatgactacatcccgaccccggttcacgacctggacaagccgttcctgatgccgatcgaggacgtcttcaccatctctggccgtggtaccgtcgtcaccggtcgtgtcgagcgtggccagctggccgtcaacaccccggtcgagatcgttggtatccgtccgacccagcagaccaccgtcacctccatcgagaccttccacaagaccatggacgcctgcgaggctggcgacaacaccggtctgctgctgcgtggcctcggccgtgaggatgtcgagcgtggccaggtcgtggccaagccgggctccgtcaccccgcacaccaagttcgagggcgaagtctacgtgctgaccaaggacgaaggcggccgtcactcgccgttcttctccaactaccgtccgcagttctacttccgcaccaccgacgtcaccggcgtcatcgagctgccggaaggcgtcgagatggttcagcccggcgaccacgccaccttcaccgttgagctgattcagcccatcgccatggaggagggcctgaccttcgctgtgcgtgaaggcggccacaccgttggctccggtcgtgtgaccaagatcctcgcctgattttcatcagacaagaatcttcgcttgaactagcgacttaagaaatccccttcgaggaaactcggaggggatttcctataaccgcagcaggatatggatatgtaccacgacttccggcctggatgcgctagtgttgctttccaatagataaacggactgctgcactgcgagggtatgacactgatggcaggccgggaaagaaggtcgatgatgactggttcgcaagccgcacactgtggttccgtatccgcgctttcactgggactgcccgtctccacggcgattcccgaagccaaaggcacactgccgaaagccttgttcgtgggcaaggcaccgatttcaggcaaactcaagcagcgattggtgaacgaaatcgaatccattaccatgctggcgttggtccggtcgattaacactgggcttgcggacggcaaactggttccggaagtgctggtcatcggactgaagcttacggccaaagccactggcataccgaacgaagtcatcgatttgattgccgggcagcgtaaatcgggcatcgtgttcgtgtgtgtacgcgacgtgccgttcgagggcagcacacgtgaggaatgtgcgttcgccgtgcgtcgggcgataccggggcgtgccggccacacgccgatctatcgggtatatgccggcgattggcagccggcgggggaggcccagctggagctggccggctctactattgatgagctgtgggcctcgctgtgctcacagaccattctgggcacgccggagatcgaaaatctggatgcgcgcatcattcgccatactgaaattgctcggctcgaatccgaagtggacaagctcacccgcgaccatcagcgcgtcaagaatcctgttcagcgcaatgaaatctatgccaagctccacaagaccaaaacacagctcgcaaaactgcgcgaagcatagtgatatgaaaaccattggggtcccgctggcgggagctggctcgcaaagcgagactgagggtggtccaggtccgtggcctagggctacgcccaagctaattgaaatattcgtgcatcatacagcgtacagttaaaccatgttccctctgctcgaaaccctggtcgccgtatacgaggtgggccagttcacgctggctgccgacgaactgaaggtgtcgcagtcgacggtgtcgtcgcgtatcgcccaattggagcagatggtcggcgcgccgctgttcgtgcgcaatgcgaaaagcgacgtgacgcccacacaggccgggcggatgctgtaccagaccgccatcggcatcgacggattatggcgggatacgcgtgagcagatcgcccgcgtgcaggaggcgcgtgagccgctggccgtttcgttctcgcacacgaccgcggcgattctgctgccgaaggcgttgccggtgatggctcggaacatggacagtttcgacttcgccgtacacgtgatgaactcggatgcgattctcgaacgggtcagcatgaaggccgtgcagctcggcgtggtggaaaagccgatcgtgaacgattcggtggaccgcgtcaccctgtgcgaggaccggctggtgttggcgggggagcccgacggcgtgtggatggtgcgcgagcacggttccggcgtgcggtattacacggatttgtatttcaagaccgctcaggttgtgcctgcacgcacgatggaagtgtccagtaatgcggcgattgtggcggcgctgtccgccgggttcgggcagtcgttgatttcggaagccgccgtgccggccgccgtgccggtgcagcgggagcttggcgatgagtttgtgcggcggttctatgcgctggtgccgagatccggtctgacgcacgatcagcgggagttggcggagatgattattgctgcgctgcgcgggtagtcagatagtcgactgaggggaggtcgcgaacgttgtttctctctctccgtccgcctgcggcggccacctccctcatcagagggagatcaattaggtatcgacaaaatcgatgatatgtattggttgcaatgatttgaccgatgtaaatgcttgagcttcaatagacaccgtgagagagttctgtacaaaatggtggaagcgcattaccaccgttgacatgttgttcattggcgttctgactctgctggcctcgctgttcgcctcctggctcaagcagttccccggattcagcctgttcggcgcgcttatcatcgcgctgctcatcggtatgatcatccagttcccgatccgcagtgcctacgtcggttccaatgatggccgcaaggcaggc

SEQ ID NO: 3826 - DNA, 11952 bp, Unknown
  R35_2m  MAG No. k141_8980
ctcaacgtcaaccttgccgagctccttgagctgagcgtcgtacgggccgacctggctcagggccttctggaagatggacgggttggtggtaacgccgaccacgttcttgttggcgatgaggtcctgcagggagccggactcaatgcgggagcgggacaggtcgtccagccagatggaaacgccgttgtcggacgtacgctgagttgcttcagtcatttattttctccttggattcaagccctaggctcccctctcctgggagaggggagctgtccgcaacgcggactgaggggagtgggctcaagcattgctcccctcagtcaagctttcgcctgacagctcccctcagggaggggagccaacaattattgaattattgcttagttgctcacttggcggcttcgacttcggcgatggaggccttggcggcttccaccacgtgctcggcggtgatgccgaggtcgatcatgttctgagcgccgtcaccctgcaggccgaactgctcgatggagacaggcttgccgtaggaaccgaggtacttgtaccacggcatggcaacgccggcctcgacggagacacgagccttgacagcggccggaagcacagcctccttgtactcggcgtcctgctcctcgaaccattccatggacggcacggacacgacgcgagccttgacgccctcgccggccagggtcttggcggcagccacagcccactggacctcggaaccggaagccatgaggatgacgtccggagtaccctcggtgtcgaccaggatgtaagcgcccttcatgacaccgtccttggccttggcagcggtctcggcaagaaccgggacaccctgacgggtcagaaccatggcgccaggcagggtgttcttcttctcgaagaagtaacggtaagcctcggcggtctcgaaggcgtcggccgggcgaatgacctcaagctgaggaatcgcgcggaaggaagcaaggtgctcaaccggctggtgggtcgggccgtcctcgccgacggcgacggagtcgtgggaccagatgtacaggttcgggatctgcatgagggcggccagacgaacggcggaacgctcgtagtcggagaacatgaagaaggtgccgccgaacggacgggtgtgggaacccagcaggatgccgttggtgatgcagcccatggtgaactcgcgcacgccgaagtgcagctggcgaccgaactcgttgcagttcggccactgcttggtggcgcactcggccggggcgaaggtggcagcgcccttgaggtcggtcttgttggagccaccgaggtcggcggagccgccccagagttccggcatgacggcggcgatggcgttgagcacggagccggaggcgccacgagtggcgacacccttgccgacttcgaaggtggcctcaaggtcgtcaagggccttgtcgaagccttccggcagttcgccggccttcagacggtcgtacagggcggccttgtccgggttggccttgcgccaggcgtcgaacttctcgtcccaggccttgtgggcctccaggccgcgatcggcgaccttgcgggcgtgggccagggcttcttcgtcgacgtggaaggactcctccggatcgtagccgaggagtttcttgaggccggcgacggcctcggcgcccagcttggagccgtgggaggacgggtcgttggtcttgcccggggtcggccaggcgatcagggagtggaccttgatgagcttcggctggtccggggcggcggcttcggccttggcgatgacgtcggccagaccctcgatgtcctccttgtaggagccgtcgggctggatgaagctgaactcgtcggtgtaccagccgtaggcctggaagcgcttgagcacgtcctcggccagcaccaggttggtgtcgccttcgatctggatgcggttggcgtcgaagatcacggtcaggttgccgagcttctggttggcggccagggaagcggcctcgccggagatgccctcctcgatgtcgccttcaccacagatggcccaaatcttgtggtagaacggggaatcttccttcggggtctccgggtcaagcagaccgcgctggaaacgctcgccgtaggcaaagccgatggcggaggcgaagccctggcccagagggccggtggtcatttcgatgcccggggtcaggccgtactccgggtggcccggggtgcgggtggcagcgccgccacggaagttcttaaggtcgtccagggtcacgccgtagccggagaagtacagctggacgtactgggtgagggaggcatggccaccggaaaggatgaagcgatcgcggccttcccagttgggatcattcggatcgtgcttgatgaagtgctggtacagcgtgtaggcgacgggcgccagggagacgggggagccggggtggccggagcctgccttctcaaccgcgtcagccgaaaggaccttcgccatcttgatggcgcgctcgtcgagctcggtctccttgaattcggtcatggattactttccttccaattggtcgggccgcgtatccggcttgtgccgggcgcttgacgccctcacattgcgattaccatgctagcgtcggtttgcgacgttgcggtgcaattttggcgtgttttggtagtttgtgttctgttagcgttcacagtgaacattgctacgctgcaaacgaacgcattagcactcaagcctaaggagtgctaatacaatgttctaaggtgaagtgcgccacctgcacgtggcggagccaagaaagaggcaatatttctgggttcccgcgtgtcgcggcgtggcgaatcgaccgtcggggtacgccctgagtgaaccgtgactgatatgaatatgtatgcatatataaggaggcgcgcatgacgcaatcaagacgcatgctggtgctgcgcgccgtggtggaggattacatccgttctcaggagcccgtgggctccacttcgctgacgcgcgaccatgatctcggcgtcagttcggccaccatccgtaacgacatgtccgctctggaggatgaaggatatctgattcagccgcacacttcggccggtcgtgtgcccaccgaaaagggctatcgatactttgtggaccgacttgctaccgtggtgccgctcagcgaggcgcagcgccgcggcatcaacagcttcctgtccggatcggtgagtctcaaggacgcgctgcagcgttcggcacgactgttgtccgaaatcaccggtcaagtggccatagtcacctcgccatcgctggccaaggccacattgcggcacgtggagatggtgcccgttgccatgaccacgttgctcgcggtggtgattaccgacaccggccgcgtggcccagcacggcctgaccatcgcatccatgcccgccgtggacgagatcaaccggctctccaacaccgtcaacgaacaatgtgtcggactgtccctatcgaaatccgcggagaccgtgcgatccatcgccgccagcgccggctacgagtcggtgcgcggcgtggccgacgcgctggccgacgccttcgaatcgatggcattggacgaacgcgcggacgaactgtacatgtccggcacctcgcacctggcccactcccggtccctggccgatctggccccgctcttcgacgcgctggaagaacaggtcgtgctgatgaagctcatgagcaacctgggcgaggagacgaatgcatccggcgtgggcgtggccatcggctccgaaatgcacacccccggcctactgcatgcctccgtggtcagcagtggctatgggcgcagcggtgcggcgggcgaaccggcggggaacgatcccgtaggcgaacccgaaaccgaatccgagacggagagccagacgaacgacacggaacccatcgccttcgtcggctccatagggccgacccacatggactatgcggccactatggccgccgtcagggccgtagccagatatttgaccgccttcctctccgagggccggacccaagactgaccgccgtctgtggcacaatgacccgcagaccaaacgaacacaaaggatcaatcaagtggcagattattacgagacgctgggtgtggaacgcggcgccagtgacgacgagatcaagaaggcataccgcaagctcagccgtaagtaccaccccgacatcgcgggccctgaattcgaggacaagttcaaggaagtgaacaacgcctacgatgtgctgtccaatccggacaagcgccgtatgtatgattcgggcgtcgacccgaacgatccgaacgccggtgccggcggcttctccggggcgggcttcggcgatatgagcgacgtgttctccacgttcttcggttccgcgttcggtggtggctcacagggcccggtgccgcgtacccagcccggccgcgacgccctggcctccgcgtccatcgacctgaagaccgccgtgttcggcggcaccgcgcacgtcaagatcagcacgttctccctgtgccaggagtgcggcggctccggcgcccagggcggcgcacagccggtcacctgccccgactgccacggccagggattcatgcagaaggtcgtgcgcaccatgctcggccagatgatgacctccgccccctgcgaacgttgcgagggccacggtaccatcatcaagaacccgtgccccagctgcatgggccacggccgtgtgcgtaccacacgtaccgtgggcgtcaccgtgcccgccggcatcaacgacaacgcgcgtctacgtttggccaaccagggcgaagtgggtgagggcggcggcgctgccggcgacctgtacatcgacattcgcatcaaggcggataagcaattcacccgcgatggcgacgacctgcactgctggattcaggtgccgatgagctgggccgtgctcggccacgatctgtccattgacacgttcgatggtgagaagaccgtgtccatcccggccggctgccagcctgaggacactgtgacgcttaagggactgggcgtcacgaacatccgcaacaaggacgagcgcggcaacctcatcgcccacgtcaatgtgctgattcccaccaagctcaacgaaaccgagcgcggcctcatcgaacagttcgccgcctcgcatgattcaggcgccacgcacgtctcccaggcatcccgtccacaggctggccaaaagaaaggcttcttcagcaagttgaaggacgcgctgagctgagagtggatgcgttcttggctcccctcagagaggggagccaagtctgttacttcagcagggagcggcacatggagcggtattcgttgacgtagccgccgccgaagaagacacagtggccggcgatggggtagagctgccagagcgtgatacgctcctgccatccggccttcaacggatgcacggactggtagccctcggtgatttcgctcagatagctcatgccgaacaggtgcagcatagccagatcctcctcgcgatgaccgccatgtgccgccgggtcgatgagcacagcctcgggctgcccggaatcggcggtccacatcacattgccgctccacagatcaccgtggatgcgcgccggcttgtcggacgcggctcggcccatcagatccggcaacgcttcaatcacgcgctcggtcagttcgacatcgcgcttatccagctcgccacgcctcacaccaaggttgaccatcgggcgcagacgtccatcagcgaaatagctgatcgggtcggtccactcgccggtatccattttcactgggtcctgcaatggcccgaaatagcatgtgccgttatatccgtcaggcgcagacccgaaatattcggcacccacatcatgcatatgggccagagccgcaccaaaagctcgtgccgcctgaggcgtgggggacgcgctgcccacacgttcgatatccagataatccttgccccagccgtatacctgcaccacgcgcgggccgccctgcgcatgagccgcccccaaccattcgagtcctcgaccctcgcattcgaagaatccttccggtgcgaatgccctgcttttgcgatacgtggccataatgctcccttcgtcgcttacgtactatatccactttcattgtagaagccgtggatgttaccgattcttagtgttgttctacacccccttgggtagggtgttcatcgtcataacacatcaaatacttagaaatcacgaggggttatgaattttttccaagcgatcattctcggcatcgttcaggcgctgaccgagtatctcccggtatcctccagcgcgcatatccgtattttcggcgatttgatgctgggctctgatcccggtgcggcgtttaccgccatcatccaaatcggcaccgaacttgcggtgattctgtatttccgtcacgacatcatcaatatccttactcactggttcagctgcctgttcggcaagaacggcaaggattggaaggcccgcatgggccgcggcgacaattacgccacactcggctggaacatcatcgtcggctcgattccgattatcatcctcggcttcactctgcagaacgtcatcgagacctcgttgcgcaacctgtggattacggtaaccgtgctgttggtattcggcattctgctgtggatggtggatgccaaggctcgccagaacaaaaccatgaatgatatgacgtatcgtgatgcgttcctcttcggtttgggccagtccatggcgctgattcctggtgtgtcccgctccggcggcaccatcaccgtcggtcgcgcactgggctacacgcgtgaggccgctgtacgtctgagcttcctgatggccatccccgcggtgttcggctcaggtttgctcgaagccatcaaggccgtgaagaactacaaaaccgatgcgatgttccccggctgggggccgaccctcgtagccatggtcatcagcttcgtactcggctacatcgtgatcatcggattcctgaagttcgtatcgaacttctcctataaggccttcgccatctaccgcatcggtttggctgtggtcgtcgccttgctgctgattgtgggcgtgctgccggccatcgatccctccgtggcggctgcggcataagacgggtcgatagacgactccaatataatggtgctcccgctggcgggagccgtcagcgaagctgactgggggtggtcactggaatatgccagcagaaccaccctcagtctcgctacgcgagccagctcccgacattttgtgcgacgtgcacatggtgcactgctatgaacagccctgtgggctgttcatccagcgggagcacaccatatatgggctaattgcccatctggcgcagaaacgcttctgcttctttgactagttgttcggcctggggcgctcccaaggaagcctccgcctcggctttctgctgcaagtcgtagtcgtgctccaaatgctccacgtaatcgtgaagctggtcattacaacgaaccagtatcgaggcttgcgccttccactgttcggctttctgcttcagatctgccgtatcgaaggtgaagccgatatgcttgtccaacgcatccagcaatcgcatagtgccggcagaacattcgtcgctgcccaaatattgggggatggacacccacatcgaggaatgagcaaaaccttgctgcgcggcggccacatccaaaacggtaggaatgcctaccgggccgttatacgaccggtctccttcgcattgacagtctccgtcgctgacggcgatgggcaacggacgggtatgcgggcaatcggagaacatcgaacctaacgtaatgatccgattgacatccagctcatcggcaatggccagactctggctacagtattccttccaccgatagttcggttcgggggcgatctgcgcatagatatgcttgcctgcgtccaacgtgatgtcgtagaacgtggtctgcggccagataagattggtgcgtcccgcaacatggcacagcataggacgggcaacctgatagtcatagaaatcatcacatctaatatgacgaatctcgcgggactcatatcgcttgaccagatggcgcaccgcgttcgtcgccgcctgacaggcatcattccatccctcgaatgcggcgatcaatactgcgccggtgtccttcgctgcttcactcatacctctagagtaactggaattcattgcccgaagcgcacgctttagccataagcgagagtatgcaattacaggcgacacgccgcagctggacgaactagacgcatgtgagtatagtaaacactcgtgcttcggcagggagacctcgccaaggaaacacacgcggacatagcttagttggtaaagcgcaaccttgccaaggttgagaccgcgggttcgagtcccgttgtccgctctaggtccgtgagttgacagaccttacggtgggttagccaagcggttaggcagcggcctgcaaagccgtatagacgagttcgactctcgtacccacctctcagaccagcgaagcaattcaatgggatgaaatattacccgggcggttggcgcagtggtagcgcacttccctgacacggaaggggtcacaagttcgaatcttgtatcgcccacgaaagtcgaagcaattcgactggatataactgaagaaccgagtattcgggcgattggcgcagcggctagcgcacttcgttcacaccgaaggggtcgtaggttcgattcctacatcgcccactggattccgcttctcacggcggattcctttgcggacatagcttagttggtaaagcgcaaccttgccaaggttgagaccgcgggttcgagtcccgttgtccgctccacaacgaaacctcgcttcggcgaggtttttttcgtattggttcagatgctggtggtatttgtcgcacgcccaacctatcgtgtcctacgttgattaaccagtccaggcctgcacattagtaccgtgggccccgatagcaaaggacaaatcatggcgcaagctaccatctccataaccgtcaacggcgaagcgaaggaggtggaagcaaccaccaccggcgtagaactgttcgcggaagacaagaacatcatcgcggtcaagatcaacggcgagaaccgtgacctgtacacgccgctgaacgatggcgataccgtcgaccccatcgccctcgactccgaagacggcctcgcaatcatgcgtcactcggccacccacgtcatggcccaggccgtgcaggaagtctacccgaacgccaagctcggcgtcggccccgtcatcaaggacggcttctactacgacttccaggtcgaccagcccttcaccccggacgacctcaaggacatcgagaagcgcatgcagcgcatcatcaagtcctcccagtccttccgccgccgttccgtgactgaggaagaggctctgaaggaagaggccgaccagccctttaagatcgaactgatcgaagacaaggaagcacacctcgacccggccgccgccaccgagatctccgaaaaggagctcagcttctacgacaacgtagaccgtgatggcaatgtggtttggaaggacctgtgccgcggtccgcacctgccgaacacccgctacatcaaggccttcaagatcgagcgttccgccgccgcctactggcgtggttccgagaagaacccgaccatgcagcgcatctacggcaccgcgtgggccaccaaggaagacctcaaggcctaccagacccgtctcgaggaggccgccaagcgcgatcaccgcaagctcggcgccgagatggacctgttctccttcccggatgaaattggccccggcctggccgtgttccacccgaagggcgccgccgtgatcaacgcgatggaggactactcccgtgagatgcaccgcaagcaccactacagcttcgtgcagaccccgcacatcaccaagggcggcctgtacgagacctccggccacctgcactggtacaaggacggcatgtacccgcccatgcacctcgacgaggagaaggacgcggacggcaacatcaccaagccgggcgccgactactacctgaagccgatgaactgcccgatgcacaacctgatcttcaagtcccgtcagcgctcctaccgcgagctgccgctgcgcctcttcgagttcggcaccgtgtaccgttacgagaagtccggcgaggtccacggcctgacccgcgtgcgcggcctcacccaggacgactcccacatctactgcacccgcgagcagatgaaagacgagctcaccagcctgctgaccttcgtgctgaacctgctcaaggactttggcctgaccgacttctacctcgagctgtccaccaaggacccgaacaagtacgtcggctccgacgagatctgggaggaggccaccaacacgctcgccgaggtcgccaaggaatccaacctcgagctcgtcgacgatccgtgcggcgccgccttctacggcccgaagatctccgtgcaggcccgcgacgccatcggccgcacctggcaggtctcgaccatccagctcgacttcaacctgcccgagcgtttccagctcgagtacatcgcgcaggacggtacccaccagcgtccggtgatgattcaccgcgccctgttcggctccatcgaacgcttcttcgccgtgctgctcgagcactacgcaggcgccttcccggcgtggctggcccccgtgcaggtgctcggcgtgccggttgccgacgagttcgccccgcatctggccggtttcgtcaagtcccttgaggacgagatggtccgttgcgagatcgactactccgacgatcgcttcggcaagaagattcgcaacgcctccaagtccaaggtgccgttcatcctcatcgtcggtgaggaagacatgaacaacaacgcggtcagcttccgcttccgtgacggcagccagctcaacggcgttccggtggacaaggcccgcgagcagatcctcaccgtcatcaagaagcgcgtccaggtgaactccgccgacgacttcaacgccgctgtggctgagtgatgtgaatggtactggctcccctctctgaggggagctggctccgtaggcgactgaggggagtcctgcatggctcgcactcccctcagtccgtttcacggacagctcccctcagagaggggagccaagaaagggtgcgaaaatgactgacgtgcgtgtcgataatccggcggactttccgcctcaggaggacacggtcgaacgactgtggactccgcagcgcatgacctatgtgctgcgcaacagcgaggatcgcccaaccaagcccaagacgaaggaatgcccgttctgcgccggacccaagaaatccgacgaagacggcctcatcgcctggcgtggcacgcacgtgttcgccatcatgaacctctacccatacaatgtcgggcatctcatgatctgcccgtaccgtcacgtcggattcatcaccgaactcgacgatgccgaactgttcgaattcgagaaggccaccaccctcgccatgaaggtgatggaaaccgtctcccgtccgcacggttacaatatcggcattaatcagggcgaagtagcaggcgcaggagtcgccgctcacctccatcagcatgtagtgcctcgctggaatggtgacgcgaacttcatgcccatcgtcgcccagacacgcaccatgcctattctgctgtccgaccagcgagaagcctatgcccaggcattcgaacagctggctccgcagtatcatctgccgcttgcctaacacaggtgcggcaccccgcgtgaccggtcttatcggtacgcataacaagacaatcatcggaaacatcacgggtatgtctgattaacggcctacaatcgtttcgtttgacatcatccgtttcaataattgctaggagcattatgtcaggtcattccaagtgggcgaccaccaagcacaagaaggccgccatcgacgccaagcgcggcaagctcttcgccaagctcatcaagaacatcgaaatcgccgcccgcctcggcggtggcgaccc

SEQ ID NO: 3827 - DNA, 16740 bp, Unknown
  R35_2m  MAG No. k141_9045
gaaggcgctcggcgccgtggaaaaccgttaatcaacaacgaattaaggaaaacaagtaatggcagaaggtaacgagcgttccggcaagtcctacggcggcggccataaggggtatggcgatcgccgaccgggcaaccgcggcggcaagggtttcaagccgcgcggcaagggcggtttcaagccgcgtcatgacggtgaaggtttcaagccgcgccgtcgtgaggatggtgagggttacgcgccgcgccgtgatggtgacggtgagggccacggcggctaccgcaagtcgtacggcaagggtggcgacttccacaagggcggccgctctggtttcggtggcaagggcggctatcgcggcaacggtccgcgccgcgatggcgacggcttccgtccgcgccgcgaccgcgatggcgagggcttcaagccgcgccgccgtgaggatggtgagggttacgcgccgcgccgtgatggtgatggcgagggccacggcggctaccgtaagtcgtacggcaagtccggtggcttccacaagggtggttaccgcggcagtggtccgcgccgtgacggtgaaggtttcaagccgcgccgcgaaggcggctaccgttcccacgaaggcgagaacggcgagaacccgcgctaccagcaccgtgacaacgatcgtcgtgatttccgtcgcgatgatcgccgtgacttccaccgcgatggtgagcgtcgtgacttccaccgcgatggtgagcgtcgtgacttccgtcgtgacaatgatcgtcgtgacttccgccgcgatgaccgaagggataacgatcgccgtgatttccatcgtgatggtgaacgtcgcaacttccgccgcgacgacgatcgccgtgatggcgatcgccgcaacttccgcagggacgaccgccgcgacaacaaccgtcgtgacggcgaattccgcgagttttcgcaggaagagaagcgccagtaccgtgaggagaagcgctctgaatacatgaggcgtccgcgccgtaactccgacggcacgatgagcttcccctcgcagaacccgtacaccgaccgtcgtcccgacgagcccaagatgcccaagggcatggaatggtcgatgctgtccaaggatgagcgcgaacgtctgcgcggcctgtccaaggagcatgcggagaacattggtctgcacatcctcgccgctttcgcgctggaggagagcgatcccgaacttgccttggagcacgccaagtgggtggcccgtcaggcctcccgcatcgactttgcccgcgagacgctcgcgttcgtggcctaccgtcagggcgactacaagctgtccctgcgtgagttccgtaccgcctaccgtatgaacggcttcctcgactacctgccgttcatcgctgactgcgagcgtggtgtcggtgaaccgaagaaggccgtggaactggcgctgtccgatgagggcaagcagctgcatggcgctcccaaggtcgagatgttcctggtgtatgccggtgcccttggcgatttggagatgtgggacaaggccattgaagtggttcataccgtcggccgctctcagggtcttccgggtgagtaccgtatgcgtgccgtgcaggccgagcagtacttccttgaagaggccggccgcagcaaggaagccgagcagcttaatgacctgctggaccgtcttgaggatcagtatgccgacgaggagattgacgaaaacagcgacgacgtggtgattgaccacgatctcgaagacatcaccgacgactccgacgtgctcgagaagctcggcatcgatccggacgaagcgcagtacgccccggatccggagcaggaatacggcgatgaggacgacgaggctgaagacggcgatgccgagtctgatgaggccgatgtcgaaaatgctgagtccgaggatgcatcggaagaatctgaggaatctgaagccgaggagtcttccgagtccgctgacgatgccgttgaaccggctgagtccgacgagaccgagaccgaaaccgaggagtgagcggcgtaatgacccgtttcctcaaaggcaccgatcgcccgctcgccgaggcctatcagcttgcgctgctggacctcgacggcgtggtgtatcgcggcaagaatccggtcgaatacgcagccgattccattcgtgcggccgaagccgccggcatgaccatcgaatacaccacgaacaactcctcgcgcttccagcacgtggtggccgaccagctcaagggcttcggcttggacgtggagccgtggcaggtcatcacctcttcggtggtggccgcccgtgtggtggccaaggcgttgcccgccggcgcgcgcgtacaggtactgggcgccgagcatttgcgcgatgaggtcacccgcaacggcctgaccatcgtggacggtcctcaggaccgcccacaggccgtcattcagggctggtatccggatatgacctggcagatgatggccgacgccgcgttcgcggtcgaggccggagccacgtatttcgtgaccaaccgcgacctgacgattcctcgtgaactgggcatcgcccccggttgcggatcgatgattcgcgccgtgatcacggccaccggcgtcgaaccggtcgcctccgctggcaagccggaagcgtacatgtacgatgaggcccgcgaactgaacgccgccgaaggccacgatctggtgcccaaggaggcgtccatcgccattggcgaccgactcgacaccgatatcgaggcaggtaaccgcggtgactatgattcgctggcggtgctgaccggtgtcaccaacccgaccgaactgatgctggctccggcacacctgaggcccacattcatcgcccttgatctgcgtgaactcggcgaagcccaaccggagccggtccgcgacgagagcggtacttgggaatgccgcaaggctagcgcttggtttgaaaacggccaggtacacgtcagcgaccccaccagtatggacggcctgcgtgccgccgtatgcgccgcatgggaagccgccgaccaaggcgcacagctcagcgaggccacggtaccggtgttcgccatcgaggcatagtcctatgcctacggatagcgaacacgcgccggtcaccgagcgataccccgaacttgcggatattgatgaacaagacaacgaccgcaagcttgagacctatcgcaacgtgctggaatcgttacaacacgagcttgataacagccgcagctagcagaggagattcattctcccgccagcggaagatgacgtgaagtgctggatggtgggtccatgccgagccaccccgttggtggatggtgggtcgaaaggaaggtatatgaccgagcaacatatcgatcccgcgaccccacttgatcgcctcgacatgatgctcgtggcttcgggactggtcgaatcgcgggccaaagcgcagcgactcatcaaagccgggcatgtgcgcgtggacggcgagaccatcaccaagccatcgttcatggtcaaagccgggcacagcgaactcgccgtggataagggcgacgactacgtctcccgaggcgcttacaaactcttgggcgcgttcgagacctttgccggcaatggccttaccgggccggaaagcttggaatgtctggatatcggtgcctccaccggtggcttcaccgatgtactgttgcgcgggggagcggccaaagtcgtggcgctcgacgtcggccacggccagctcgacccgcgcatcgccaatgacgagcacgtcatcgaaatgagcggcgtcaacattcgcgaagtagaggccgacgacctgccttaccggccggcgatgatcgtctccgacgtctcctttatttccctgacctatgtgattccggtaatcgcgcgcatcgcggctcccggtgcgcagattgtgttactggtcaaaccgcagttcgaggtcgggcgggcaggactcggcaaaaacggcatcgtggaagatccggcattgcgggagcgggcattgcacgacgtggtcgcctgtgctgaacagcacggacttgacgtggtggccactgccgatagtcccatcatcggcacccacggtaatgaggaatacctgctttacgctgtcttgagatgaatgcgttggcagtctccgttcaccagcagcacgctggaggtacggtcgatgcctattgcggtggcacacgtggcgctttccaccgcactgccgttgcgtagcatggcggagtccgccgtcaaagtccggcattgcagatggttggcttcaaccgtgacggctgtgatatggcgaaccatgctgccatcctcatacccatccatatcaaaacgagaaaacatcgtactgcgcagtggatgaacttccagagccctgctgttgacgtcatgacccttcaacacgccgttcaagcggactgtctgaccgctaatatgacgggtgcctagggagccattgacggacagatttccggaacaaacgatatcgctgttgcatcgcagtttgccggtaaaggttatttcatcgcaaataatgtcgccgccgacttcgatgtcgccgctgccgctgatgctggatacgcgaatatcaccatcacaccgcacaatgccactcttgatgaccagtttgtccccttctataactgaggcctcgagggtgctggtcacaatcatggtgtgaaaatgcgcgccatcggcaagacgggaacgttggtccactcctatggtgccgtagactcctttgcctatcaacgtgcaattctgcgtatgcttgcccatgatgataaagccccctcaatatggacgtacagctttatggcttattgccccaataatgagcgcatccatgttgaggggggttatatcggtcacgatgtgagcagatagggggtatagcgagcgcagttagggggggttagccttggatgaagtggtcgatctgatcctgcttgcccatgaggatgagttcgtcgttgcgatgcatgaccagttccttggagccgtactggaactccttgcctggggccttgaggcccaccacggtcacgccgtatttgtcgtgcacctgcacgtcctcgatgctgcgacccaccgcgtataggggcgtgtggatcttgacgacggtgtacgggccgtcgatttcgatgtaatccagataattgccggccaccagatgacccacgcgcttgccggcatcggtctccgcattgatgatgtgacgggcgccgatgcgctgcagaatgcgcgcatgctcctgggacacggacttggcccacagatcggaaacgccggcatccagcaggttgccggtgatgatcaccgaagcctcgatgctgtcgccgatggccacgacggccgtgtcgaactgggaggcgtcgatctgctcgatggccagcacatcggtcatgtcggcctgaatggtgggcagatgcgcggaccaacgggccacaagctccgggttcttatccacggcgagcacatcctgacccatctggtcgagggtggcggccacggacccgccgaaacggcccaggccgatgaccagcacgcttttgttgccgctcggttttgctgccatgatgatggtcctctctatgccggatttctgtgtgccgattgaatggccgatcagccaacgataatgttttcctgcggataacgaataggttcgggagccatcggtctgctgatggagtaggcgatggtcaacgggccaagtcgtccgacaatcatctcggcggacagaataaacaggctggccggattgccggcgcttgccacgcccaccgaataaccgcccaacgagaaggccgagcaggcctcgaacacggcgtccacgaacgcgcagccggtggtgagcatcagcatcatcgcaccgaccataaccagcgcaaagcaggccgtggtcacggacacggcggtcatctggatgcggcgggggatacggcggcggaacacggtgacatcgcgatggccggtgaatgcggcgcggcaaatcaagagaatcaccgcgaacgtggtgacacggatgccgccggcggtggatgaggagcctgcgccgatgaacatgagtatgctcatgaacaccttggtctcattcgtgacttcgggcacccaggaaatatcgaaaccggcggagcggggcatgacggcggcgctcatcgcacggcgcatcttcatgccgggaccgtctgcggggaacaggccggtattgccccactcgaccagcaggaaccaagccagtgaggtggccaccagcacagcggtggtcaccaaagtgagtttggtgtgcaacgtccaacgtttcgggctgagatgtcggcgtgcgcactgcaccagattcagcaccacggggaagccgagcgttcctatgaatgcgctgatgagaatcggcagtcccacgccccaacggttcacatgcaggccggtggcgtcaggcgtgaaaccggtgttgttgtaggccgataccgcgtagaacagcgcctgccacaatgtacgtcccatattgccgtggttcacgcggaacaggtcgggcagcagcagcacgaaggtaagcacctcggcgatgatggaggtgcccaataccacggtgagtacgcctttgacctcggaaagcttcgtggtgcccagttcgttcgcggtaagcatgcgctgggagaccttgagtctgcgggaagcgccaagagccaccatcgaggcgaaggtcatgacgcccaggccgccgaactggatggagaataggatgacaacttggccgaacgtcgaccagtattcgccggtgttcaccaccggaatgccgcaggtggacagggccgagacggcggtgaagaacgcgaccgggaagttggtgaagatgatgtccgatgtggagatcggcagcagcagcaagccggtgacgatgatgatcagtgcgccgaaatacaccatggacagacggcccgggtgcctgagcagacggtcggtgatgctgatgcggcgaatgcgcttggcggttttatcgcttttgtctcggctcagtacatcggccgaataccaccatgacaggcccttcgaggcctcctcattggcggaggattcgtcgaagtcattggccatgggtcctcaagctcctcaactgatactgctgtatggtcatacggcatgccatcgcgctgcgcacggcacgcgtacggtgatcgcgcggctgtatgccattgtatgccgaagccttacgttaatcgactctgcggaacgttgtcggcgacgcgccacgaagcggcatttttcgaacacctgtacgagtgatgacggtgtctgcggctagaataatgagcagtgcgaccgaatcgacaggaggatgccatggccaagcgcaacgcggtggtggtgacgcataccaggctcaggcagaccggaaccgtagtggccgaggcggtgagccagctgcgagtggccggtttcgaagtcaccatcatcgacaacaccgaggcccccgatttcggtgtgcagccgccgtgcgtgtcggacgacaccgaaatcgtcgtggtcctgggcggcgacggcacgatactgcgcgccgccgaactcgtccactgcacccaggtgccgattctcggcgtgaacatggggcatgtcggcttcctggccgaattcgaaagcttccagatcgacgaggcgatccgccgggtcgccacccacgactattcgatcgacgaacgcatgatcgcccatgtggatgtctggctgcctggcaccaccaagcccattgaggattgggcgctgaacgacatcacgctggaacgcgccgaccggggcaagatggtcgaactgtccatccgcgtggacgatgtggagatgaactcgttcggcgcggacggcgtcatcgtctccacgcccaccggttccaccgcctacgccttctccgcgggcggtccggtcatgtggccgaacgtcaaggccctgcagttgattccgttggccgcgcatgccctgttcgccaggccgctgatcatcggctccggttcgacctttaccatcgatattctggacgattccatgtccgaaggctggatttgctgcgatggacgccgtcagcgcgccctgccgcagggtacgcgcgtcatggtgcgcgaatcgcgcgataccttgcgcctcgctcgactctccggcatgccgttcaccaaccgtctggtctccaagttcgatctgcccgtggtcggttggcgcgagcacgcgcgcaacgaggcctcgagccagccgctgcatcacgggcacacgttcccggcggccgtgtatgcggctggcgttgccggtgacgctggtgtcgctggtaccgagcccgacaagccgggcgaacgcgacggcaaggcaggagcctgatgctcgaagaactcgatatccgcaatctggggccgattcgagaagccgccattgcgccggccgcaggcatgaccgccatcaccggtgagaccggcgccggcaaatccatgctgctctccgcgatccgactggtctccggtggggccgccgaatcctcacgcgtctcggccggggcggacgaggcttgggcccaggcgattttcgcgctctcggatgatgccgtcgcatctgaacattccggcgacaccaacgatgccggtgacgatgccggttctgacgattctgacagcgggctcaccggtgctgccgcggccgtggccaaagcccacgacgcgggcgtcgaccccgaagacggcgaactgttcctttcccgcaccgtacgcgcttccggacgttcgcgggccgtgctcggcggcaagtcagtaccgcgttcggtgctgggggccatcgccggcgaactggttaccattcatggccagaccgatcagctgaaaatcgcggccgccgcacggcaacgcgagtttctggacctggtggccggagacgaagccgaactggccgcctaccgcaaggcgtgggatgcgctggccgccatggatgagcggctggaacgcctgcgctcgcaggaatcctctgcccgccaacaggccgactacctgcgcgaatccatcgaccgcatcaaccgaaccgacccgcagccgggggaggacgaggagctgaaggcgtgccgcgaacgcatcgaaaacgcggccgacatcgcccaaggcgtgggttcggcgctgggcgcgctggatgcctcgcaggtggatgtggatgccgccgacggcgcttcggccgtggaactcatcaatcatgcggtgacctcgttgcgcgcgattcgcgtcggcggcacgttcgccgagcaggccgatcggcttgaatccatcaatgccgatttgggcgacgtggtgttcgccctgagccaggagctgggtgacgaaggcagcgtggaggatctggaccagatcaacggccgtatccacgagcttggcgacctcacccgtcggtggggccccaccttggccgacgtgctcgcttggcgggacaaggcggcgttcgatttggaggatctggacgcctcgccggaaaaggtcgccgaactcgaatccgaacggcagacgctgtacgatgcggccctcgccgccgccgacgtgctgagcgccgcgcgcgtggctgccgctgccgacttgggcgcgcgcgtcactgaagaactcggctcgctcgccatgctgggcgcctccttggaagtgcgtgtcacgccgcgagacaaggccgatgatccgctcggtccgtatggtcgcgacgatatcgcgttcctgtttacgccgttcgaggggtcgccgcagttaccgatgggcaaaagcgcttcgggcggtgaactgagccgactgatgttggccttggagctggtggccgccgacacgcgcggcggtgccgaccagaccttcatcttcgacgaggttgacgccggcgtgggtggcaaggccgcggtcgaactgggcaaacgtctggcacggctggcccgcagcgcgcaggtcatcgtcgtcacccacttggcgcaggtcgcttcgtgggcggacgcgcagttcgtggtcaccaaggagccgccggatgccgatgacgacgatttgggcgtggtcaccaccatcgccgaagtcaacggcgaaacccgcgtccacgaaatcgcccgcatgctctccggcagcgaatccgaagcctccctagaccacgcccgagaactgttgaaggaaagtgtcctatgaccaaagccgccatattcgacctcgacggcaccctcctagactccatgggagtctgggaccaagtcgacatcgacttcctgaacaagcgcggaatcgaagtgccgcccgactacatgaccaaagtttccgccatgcaattccgccagatcgccgaatacaccatcgcacgcttcggccttacagacacgcccgaagagctcatgcaggaatgggacgacatggccagcgtcgcctattccaccacggtcgaagccaaacccggtgcgctcggctatctgcacgacctgaaggccgccggcgtcaagcttggcgtcgccacctcgctgcccccgcacctgcgtgaaccggcgctgcggcatgtgggcatgttcgggctattcgatgacatcgtctctgttgacgatgtgaacgacgtcggcaaggaccagcccgacgtctatctgcttgccgctaaacgtctgggcgtcaaacctaccgattgcacggtgttcgaggacctgctggtcgccatgaaatcggccaaatcggtcggtatgacggtctgggccatgcacgacgattcctccgcggccgactggcccgaaatctgccggctcgccgacggcgtcctcttcgatttccacaacgccccacgggtgttgtaaaaaactggctcccctccctgaggggagccatatatgaagcccctaccgccgcgcgatcctatccgaccgccgttgcgcctcaaaccgctgccgctccagttcctcgcccttgttccggataatcggtcggttcggtgtggtgtagcgtaacggcgttgttcggcataagtccccctttccgaggccattgtaggcgctggctgtgtttcggtgctgtattgttgcacggaaacgacatacaacaattgaaaaaatgaggagagactctgaaagccaagcaccaagatctttcatcagacccaggaatcgtcgcgcatttgtcattgtgacgtttacatgactacttctcaaacgtcgattaacagaataacttctatacagaagttcaacagattcgctgaatttcacaaagtcaaaggattaaacaatgattcagaatcataatcgtgtcgcgttgcttctatcatgaggcccggactctactactctcttgtatgacctattaaatcaggggaaagaaatatatgccgttactttcaattttggtgaaactgagggatgtaatgagagtcaacatgcgcaaagaatcgttacaaatctccactctgaacgactccatcattatcaatatgatttttccgagcaatttaagcgtttctatgaattgcctcagcctcagttcctccgcaaagcatttgggccatttgtcgttgcccctaataaggaagagcatgttcagccttttggatcggcaattgcgcttatgctaatggcttcatgggcgcttaagcatgatatcgttgatgtttattacgcagttcatagtaacgatgctgtgttccacgataatcatgcatcatattttgaagctcttcatacggttaccgtagaatgtgaaggagatgaatacggggtaacgttccatactccttatcttagtatcaataagtgtgccgtcattcaaaaaggtatgggtcttggcgtgccgttcggcgatacgtggagctgtgccttgggcgggacagttcattgtggagtatgtgacccgtgtcgtgatcgacgaacttcttttgagattcttggaattaaagatcccgtcttatatgagcacgatattttcgccgaatctcgcgaagaagtgaatattttagaatccccaaagcatatttcggtagtggcctgaataaaaggcaatatagttacgttttaaatacatgataaaacaaaaggaggctgttcgagcatggtgaagaatgtcgggagtgtcgtacgctggcaggtagccaaactggcattggtccagggcatgcaagcaatgtcctcggcgttcttcacatgcggtgttgtattcactggagcggcttcatctgacagcttgggcctagccttggtactcatgttcaagacgctgcccaccttggtcatggcttttctgggtggtgttttagcggatcgattgccgcggaaaactcttgcctcaggaatgctgggtggtctagctatttcctatggagtcggaacatgggtcgtgcagttgagtggtcttggatggcccgtgcaagcaatcagtttggccgcaggtatcattggtgcggtcggctcgccagccttgttcgccttattgccttcgattgctccccctgaagatattgtacgtgccaacggcttgatacgtacgtttcgcaatgccggctcggtggtcggtccacttcttggtgcatggcttgctcaactgatatcaccttcttttctatttctggatggtgctgtgtgtctggctgtctccatgccgcttgttctatcgttgaaactcatgcccagctgcgatgacgaggctaataacaacgatgatgatgcttccatgatttctgcattacgttctattcccagtttgttccatacttatatttggttagcagtgggagtgccgttctgggcgttgttccttgccgtacaatccggggcaacagacgtcacaatgcccttgtgggtcgtgcaagagagtggccggggcgcatggtccctgatggcatctatcacctcatctggatacatttgcggcagtctcatcgcgttaaagttggaaaggcctaggcacatgttttctaaatcagtgttatttggcgctttagctattatgccgatttttgttgtaggtactttggacatccaagtactgtggtatgtggcgtcatttgttgctgggcttggactggaattgtctggcgtgttctggggatctactatgcagacatgcgtcgataagcggcacatgggacgagtttcctcaattgattatgcaattagcttcggtctaattcctctcgcctacggtttatacggcttcactggcactattcatgctgccgtcgtacttactgtatcctcctcaataatgattgtcctggtcatcattgttttcccattttgttaccttatagatcaccgttcgaattcctcagggattattaatagtagcgatgtttaatcgccattagctcgatgttcacaacgatatagccgattgcggcccacacggtgcaaggtcgaacatcctgaaaaggtccgtttacgcgaaacgccaaggacggtgaagcagtatactacgtcgtttggggaaacaaagatatcgtgaactagctgataactgaccttaccagatgcgctttgcgcgttacgtctcaacagttgccatgttcgggcattaatgtcatcgctcacataggtgtgccgtcgtcttttgaccaataaacgttcttggaggcggctagaacatgccgtttcgtattgcttcgcataggggtttcccgtgacgaacatcgtttttcgatgaacggagatggagtttatggggtatttagtactccctgacagtgaacgattcaaggtgttatccggctggatgtgttgatatgtttgttgtggttgggtatccattcggtgctgtgaatctgcttgtttagtcgaacattcggaaaacaggaagccctttttctggtgatggtagaatatgataaatattagtgtcttggataccctctgctgctatgctaaaaatcggttatgaagcgcggagttgggctagggttctctccattaatgtcttcgcaaaatacatgacttttatatgattgtagaacgtgcgcatatagaggtaagtcgctaaataccttcaatacatatgacatcctctcaggtaattatgatgtaattctgacgattacacgattccatacgactcggtcattgtacctatataataggtttcaattaaaccagttgttattgttctaggagtattaatgagcttcgttatatctgtaatcactatttttgcgctttgtgctccttccgtgccatctgttccctttggcattcaacagagcgcgtctttccccttttcctcggtgaatatttctcgtgttcgttgtcctccatggattccgtggctgctttgtccggtgaaaccatagttaaaggtatacgcgcataaacaatccatgtgtcgccatccacttcgtgatcaatttcaccaccgattaggttaagcttgcgcctgcgtgactctagcccgcggcctgacctttcttcgtccggtattgtggacatgctattggacatgactatttctgtttgtgatttctgcagggctatgctggactggaattcgctatactttggcgcgtgtttaataatgttggagcatagttctctcagtacttcatgcagaatatcgatattctttacggtcacctgttgctgtaccgtaaacccaccattaatgatttcagtagtgccagtaaacccatgttggtggagtatatagtcgcattcgtcggttaaccgttttaccgctaaccaccattcggacgactctatgggtattccattttcattattatcttgaatcattgtatcgataatatctctggttgcttctaatccttttcgtgcaattttatctatcttctcccaggcatcattctggggatcatttgattgccgttgcgcaatcaatcgtatactcgtcaaacactgggcaacggagtcatgaagcatgatagcgttgtcgctattttgcagagaaaaagaatgttgcagttcgtactctttgctttgataattttgaaggtgttgttcatttgtcgtcttccaccaatgaaaaccatatccgacaatcacggtggctgctgcatacatcagaaacactgttatgctgattatgtctatctcgccattattccatcgcgctatctgatagcattgaattcctaagaatacaaatatacctaaaactgtcgtgatagagatacccgtttcatatgcagtgagtccgatagtgcaatagatgccccagaaacggcttggcccatttaggacaggtaagctacacgcaactgattccataaaaattaatcctacgaaactaatgcgtgggaaccatagggcgattaacagcaatccgatgtggatgaagccaaataatatttcatacgcagatgtggtgggtctctctgtccaatcaattatcgaaaaaaataaggagagtaacactataattaatctgaatggatgttttttgatgttactgttcataatcacctgtccagatagctactgcttggcgcactgtttccgctttgagcttacgacgagctctattaagatatgttgctgcactagcctgtccaatttgcatgcgattcgcggcttctgatatggatagtcctttgctgagaagaatcatgatttcttcttctctgtcggataacagcatgcggatgtcatttgtctcgtgtttcagtcgcatatgcgcattacgggccgtttcgaacccatttccgtagccccccttatttaatacccaacgcgtaacttcagcgatttgtctttcttcgtcttttgcaactagtccttgtgccccagcctgaatcagccgagaaatgtaccgttctagggggaaagccgtgatgccaagtagcagcacggatgcgcttcttttgcgaatctgacggcatacgtctataccagacattccgtcaagagacatatcgaacagcagcaaatgcggtgtatctacggcacttgagcatctttgtacagcctctctcccgctccgagtggtccacgtaatgcttcctaagtgattgtattcgataatctgttgtaatccttttaacacaattgcgtcattatccagcagtgcaatatgggtggcggctgatgcaaccgccgtgctatggtagcattccacggaagagtcctcttctctcggctcattattcatcttgtcgataatatatagttatggtatgtctctttttatgaataggttgcaacgacctattcgttggataggcacagatagccgctggtcatattttgatttgttctttacgcttgacgtttttctcctgcggttgctcttcgatgctttgctcctctcgatttttcacctgatggaaagtcgctgagaaccccgagagaaaaaaccaagtggacattcggctgtccgtgatcaacgctccacgaaatggagcgggggacgaaccagccgaattccatcgtctgttctaacggttcatgttgaaggaatgtgaggccgcccgtctgatctcatcggaattggacaacgcacaaatagcgttcgtggcgtgtctgttcaatggaaagcggccgttgtcaaaggatttgcctgctcattgcttgttgctcactgttcgactgttatgtaacacaccttgacagttaagcagaacagttatactgtgttgtataacagctaaacagctggggtgctagtcaaccacaatcgaaaggggcatagatgaaactgatcatctcatccgtgtccggtgaacccatctacgagcaaatcaaaacccaaatccgttcggcggtgctcagcggcgagttgaaggcgggcgaggccctgccttccttgaggaaactcgccaaggagctgcgca

SEQ ID NO: 3828 - DNA, 14271 bp, Unknown
  R35_2m  MAG No. k141_9064
gaacatcgtcggcatcaaggacacggtcgacacaatcagccacacccgcaaggtgattcgcgcggtcaaggccgtgaatccacggtttgcggtgttctccggtttcgacgagtactatctcgtcaaccgcgtctccggcggtgatggcgtgatctgcggcatgaccaatgtggagccggagaccttcgttacgctgcaccgtgcatatgaggccggcgactatggcaccgcaattgaggccgccgaacgcatcagccacctgatggcgctgtacgatcagaccgacctgttcatctccgccatcaagggtgcggtcaaggccaagggactgaacatttccaccctgatccgtgagccagcggtgcaactcactgctcagcagtatgaggcgattaaggcgattctcaagtagtgtatatctcaggcttccgcggaatcctacggtggatttcgcggaagtttttttacggtgattacagttgccggctcagctcagcagcgccgcgatgatcgcgataaacaccgggctggtcatggtgctcatcagaatgccgtcgcgcgcgaaggtgaggcccacgttgtagcgggccgcgtagttgtacacgttctggccggtgggcagagcggcgagtaccacgcaggcgtacagctcggagccgcggaagcccatcacgaaataggcgagcaggaacgcgatgattggcatgatgatgttcttgaggaccgcgaccgtgaagatggccgggcgatcgcccttctgctgcagcggcttggtgccgtgtagggacatgccgaacgccatcaggatcattggcaccgctgaatcgccgatcatgtcgatcgggtcgaaaatgaatttcggcactgggaaccagccgcttttagcggaaatcgcagagaccacaatgcccagcagcgaaccgataagcagcggttgatgcagtggctgcttggcgatttccttgatggagaccttgcccttggtggtcacgtccagcactgtcaggcccaccggtgtgaagatggcctgctgcatgaccagaatcggtgccaccagagccggattgcccagaatgtaggtggcgattggcaggccgatgttattggaattgaggtacagcgaattcagggcgccgatggtggcgtccggggcgttcaggtggaagaacatgcggttgagcaccaggaacaccacgcctaccagcacggcggagaagaacgccacgataatcgagggatggaagatgtcgaagatcggttccttggagaggatggcgaacatcaggcacgggctcgatacgaagaaggagaaccggttgagcaccatctgagcggacggcccgccgattcgcattcgtgcggcgacatatcccaccgcaatcacgatgccgataacgcagaagccttgcatggcgctgattagacctgacataatcctccctttcgccaccccagtgtggcacataaaaatgtattcggccgcaaaatctcatgtagtgggtgtgctgggcccgccgcccacgcggtacgctgttcacatgacgcttgaattgaaccgcaccgcatccactgccgagcagctgaacagcctgctcacccagatcatggagaacttctccgtgtccgaccacgagggccccctcaccgacgaggtcgaggccttccttaacgagcaagagcacctgaccgtccgccgtcacggcgacacagtggtggccagcaccgacttcggcgagccgaaccgtgtgatcttggccgggcacctcgatactgtgccggtcatcgacaatttcccaccgaagtggctggagcccggcgattcgctgattcgcgaagaaatcgcccacgctcatcccgaagaccgcgtgctgtggggccgcggtgccaccgatatgaaggcctccgacgcggtgatgctctacctcgccgccacgctcgacggccgcacgccggaaaccaccccgaaagtcgacctcacctacgtcttctacgaccatgaggaagtcgtcgccgaaaagaacggccttcgcaaagtcgtcgaggcccatcccgattggatcaccggcgatttcgccatcatcggcgagcccaccaacagcggcatcgagggcggttgcaacggtacgattcgcttcgacgtcgtgacccacggcgtggcagcgcactccgcccgcgcgtggatgggggagaacgccatccacaaggcggccgacatcctgagccgactcaacgcttacgagccggccaccgtgaacgtggacgggctcgactatcgcgagggcctcaacgccacgctgatttccggcggcaaaggcacgaacgtcattccggatgaatgccgcgtacacgtcaactaccgcttcgccccggacaagtcgctggccgaggccaaggctctgatgatgggcgcggatgccggtgccgaactcggcaatggcgagcatgtggccactggcggcgtgttcgagggctacggcatcgaaatgaaggacgaaagcccctccgcgcgcccgggcctgaacgccccgctcgcccaagatctggtccgactggtcaaggagtgcaccggccgcgacccgttggccaagctcggctggaccgacgtggcacgcttctcccagctcggcatcccggccgtcaacctcggtgccggcgacccgctgctggcgcacaagcacgacgagcaggtgcccgaatccgacctggccgccatgaccgcaattcttaccgactggctggtctgacacctctcgagctcccctctctgaggggagctgtcaccgcagggaggggagccgagagaacgtcagcctcgccgggccacgcccgtacaaaatatgtggcatactaaaggatggtggttctgcataaccatcagcgtgcgagatggcgtcgatccccttgcggctctcgagaatgagacaacgcaagcgccggtgtccgccactcgcaggacagacttgagacgaagttgcctttacgcggcgcgttttcgcgcggccacggtgagagcgtggtgtgagtcaagcgtataggcctggaaataggcgtcgtgatgcagcgcgccgcgaggagcattgtgcccactgacaaccgtgaaggtttcgtcaacgacggaaccgataattcaaccgtatccaatgccgattcggctgcagccgtgaacgctgcgcctgccgccgcctcccagcccgtcgaacctgttcgccgtcgtcgtggcggccgccgcgtggtccgcggcaccggtgctgccggcgcctccctggaactgcaagtgcaggaacgcaccccgctgttcgaagcccccgcgcttcccaatgccagcaccgcggccgattccaagtcatccgattccggcgattccgatgaatccagcgattccaaggattccgccgaacgtccaacccgccgccgtacgcgccgcgtttccacggccgacgatgccgccgaaacgccgcgtcgcacccgtcgtacgtccgccgcatcttccagcgataccgatgatgacgacgagactccgcgccgttcgcgccgcgccgcttccgcagtggccgacttggatagcgaggctgatcgtccgcgccgttcgcgccgcacggtcagtgccgatgatttcgatgacgatgacgccccgcgttcccgccgccgttcagtcgtggacgatgacgattacgacgaggaccgttcggttcgccgccgctctcgctcccgccagtccgacgatgatgactacgaggatcgcccggttcgctcccgcctccgccgtgcgcctatggatatggatgatgatgacgaagaccgtacggttcgccgtcgttctcgccgtgcagttgcggatacgcacgaggacaccccggatgagcgcctgttcgacgcggtcgaatccctgccctctggccacgagaccgtgcgccgtggcaagccgatgacgtccctgctgttccaggaaccggtgctgcccgccgccgtggatgcgcacgataccgctgacactcgtgatgacgatgttgacgccgacgaacgcccgtctcgtcgctcccgccgctcgcgcagccacgacgatgacgatgcccagtctcgcagccgtcgccgcgacgatcgcgacgaccgcggccgcgcctccgccgaccgtgacgcttcccgtgacgccgcgtccggcgataccaacgccgatcacgacgatttcgacgccgacgacacctcggactcccgccgttcgcgccgctcccgccgtctgaacgcccaggagcgccgtgcagccgccgaagtcgagcagattgaggaagacctcgagctggacgatatcgcctactcgccgattgccgaggaggagggcgacgaggaatccgacgtcacccgcacccgttcgcgccgtcgccgccgtcgtggctcacgcggcgaaaccggtgccaacggcgagcacgataccgccgagaacgatgccgaggatacgcgttcccgccgtcgtgacgatcgcgatgatcatgaccgtgatcgcgatgaggacgatgaggagcagaccgtcactcgccgtcgccgccgccgtcgtggcggcaagaacggcgagggcaccgacgaccagagtcagaacagcgaacagccgctggtccgccgctcccgcaagcagcagtacatcgacgaaatcaccgatgtggaaggctccactcgtctcgaggccaagaagcagcgccgccgtgacaaccgccgtgagcgcagccgccagagccagcttatggaacaggacttccttgcacgccgcgagaacgtggaccgcctgatggtggtgcgcgagaaggaacaccacacccagatttccgtggtggaagacaatgttctggtcgagcattacgtctccgacattcaggaagtacagaccgtcggcaacatctatcttggccgcgtgcagaacgtgctgcccagcatggaggccgcattcgtggatatcggccagtcccgcaacggtgtgctctacgccggcgaggtcaactgggatgccgctcgtctcgaaggtcagccgcgccgcatcgagctggcgttcaagtccggcgacccggtgctcgtgcaggtcactaaggacccgatcggccacaagggtgcccgcctgacctctcaggtcacgcttgccggccgcttcctggtgctcgtgccctccggtggcatgaccggcgtgagccgcaagctttcggagcgcgaacgcagccgtctgaagaacatcgtctccaagatcgccccgaaagacatgggcgtgattatccgcaccgcggccgaaggcgcatccgaagacgccatcgtcaaggatctcgaatcactggtccgccagtgggagcgcatcaacgccaagcgcgaggaattctggcacggcaagcgcccgaaactcctgcagggcgagcccgacgtggccatccgcgtggtgcgcgacatcttcaacgacgacttcagcaagctcatcgtggaaggtgacaaggtctacgaccgtatcgaggaataccttgacaccatggcccccgacctgaaggacaagctggagaagtgggacccggccgagcacgaaggcaaggacgtgttcgacaaatggtccatcgactcccagctgcgtaagggcatggaacgtcaggtctacctgccgtccggcggctcgattgtcatcgatcgcaccgaggccatgaccaccatcgacgtgaacaccggccgctttatcggcaagggcaagtccttggaagaaacggtgacgcgctgcaacttggaggcgtctgaagagatcgcccgccagctgcgcctgcgcgatatcggcggcatggtgatgatcgactatgtggatatggtcatgcccgccaaccgcgatctggtgctgcgccgcttggtcgaatgcctggcacgcgaccgcaccaagcatcaggtggccgaagtcacctcgctcggtttggtgcagatgacccgcaagcgcatcggccagggtctggtcgaggcgttctccgaggaatgcccgacctgcaagggccgtggtttcatcctgcatgatcagccgaccgtttcggccgactacgacgatccctacgcgcttcgcggtggtgacccgttcgtcaaaaccaacaagcacggtcgcggcaccgctcccgctcccgaaccggctggttccagcgccgacgtcaaagccaaactggctcagattgccgccgctgccgtcgccgccaacaatacggcggaagagtaacaggtgtgtcgtgcttgacacgcgggcaaaaatcatttgatttagtccgcatggtggtgtagatttgaaactcggtgtctgaccgcaggctcggtgcgtgttaggcaaggtagctttccaaaacataaaaggaacgataatgtacgcgattgtgaaggccggtggccatcaggaaaaggtcgaggttggcgacgtcatcctcgtgaaccgtctcgacgccaagaagggcgataccgtggaattcccggtctccctcgttgtcgatggtgacaaggtcaccctcgccgccgccgatctggccaaggtgtccgtcaaggctgaggttgtgaacgatgaagccaagggcccgaagattgacatccagaagtacaagaacaagactggtgttgctcgccgtaagggtcatcgccagaagctgactatcgtcaagatcacggcgattgcctgagttatagaaaggaccatgaatcatggcacataagaagggtgcgtccagctctcgcaacggtcgcgattctaacccgcaatacctcggcgtgaagaagttcggcggcgaagccgtcgtggccggcaacatcatcgttcgccagcgtggcaccaacttccacccgggccacaacgtcggcatgggcaaggaccacacgctgttcgccctcaccgatggctccgtgaagttcggtgtgcgtcgcgaccgcaaggttgtcgacgtcatcgcctgagcgatatagcgtcaagctttttcaagccgcgcccgtaaggacgcggcttttttgtaaggtaatcaatatgagtgattttgtggatcgagtaaccgtccatgtcaagggcggcgatgggggcaacggttcggccggcatccgtcgtgagaaatacaagccgttggccggtccgaacggcggcaatggcggcgacggtggttccgtggtgttcgtggccgaccgtaacgccaccagcctgctcgactatcgtttcatgccgcatcgtgtcgccggcagcggcaccatgggtttgggcgacaataaggacggctccaagggcgaggacctgattctgcccgtgccctgcggcaccgtcgtctttgaggcgcgcggcgaacagggcaaatccaagcatcccggcgcacagctcgccgacttgcgtcacgagggcgaccgctgcgtcgtcgcccagggcggtgccggcggcctcggcaacatcgccctggccaacaagacccgacgcgcccccggcttcgccctgctcggcgaactcggcgaggaacgcgacgtgattctggaactgaagtccatcgccgacgtggcgttggtcggtttcccctcggccggaaagtcgtccctgattgcggcgatgagttccgccaagccgaagatcgccgactacccattcaccacgctggtgccgaatctcggcgtcgtcatcgccggcgactctcgatacaccatcgccgacgtgccgggcctgattcctggcgcctctgaaggcaagggcctgggactggagttcctgcgccacatcgaacgtaccgaaatcatcgcccacgtgattgattgcgccacgcttgaaccggaccgcgacccgatgtccgactaccacgcgctggaaaacgagttggcactctacgccgacaagctcgaactgccattgggcgccatcccgattcccgaacgcccgcgcatcgtgatcctgaacaagatcgatgtgcccgaggccaaggaattggccgagttcgtgcgtccggagttcgagaaactcgggctgaaggtctttgagatctccaccgcctctcatgaggggctgaaggagctcaacttcgcgttgtctgcgctggtgcatgagatgcgtgaggaagtggccaaccgcgagcaggccgaagaggagacgcgcgtggttatcaagccattggagaccaagggccgccgtccgcgtcgcgctgatgagggcggcagtgcgcttgagttcacggtcgagcgccgcgaactcggcaatggcgaagtgttcttcgaggtgcgtggcgtcaagccggagcgctgggtcatgcagaccaacttcgacaacgacgaggccgtgggctatctggccgaccgcttggccaagctgggcgtggaggacgagctgcgccgcaagggtgcccaccctggtgacgaggtgcgcatcggtcgtggtgcccgtatggtcgaattcgattgggatccgaccatctccgccggtgctgaaatgctcgatggctccaacctcggtgcccgaggcaaggatctgcgtctcgaagagcaggacccgcgcacgcaccgccgctccaacgccgaacgtcgtgcccaataccacgagatgatggacgcccgtgccgccgtgcgcgacgcgatgatggccgaacgcaaggccggccactgggccgacccgaccgttgacgacgatcgccatgatgagaacagcctcttcggccacggtgagtccagcgaagatggtgaaaccgaggaataaatgagcactccgagtcaggccgaggtgcggcgcatggtcgcagcagccggaaccattgtcgtgaaagtcggctccagctcgctgacccagccgagcggtcacctcgacccggacaagctcgacgctctggccgccgcccttgcccaaatacgactgatgggcgggcgtgtggtactggtttcctctggtgctattgcggccggcttcggcccgctgggctttgacgaacgcccggccgacgtggctactcagcaggccaccgcagcggtcggtcaaggtttgctcatggctcgctacgagactgcttttggccgtttcggtattcgcgtaggccagattctgatcactgccgaagacacgattcgtgccacccagtaccgcaatgtggaacgcacgctggaccgtctgctcgacctcggcgtggtgccgattatcaacgaaaacgattcgttggcctcgaacgagattcgtttcggcgataacgatcgactctccgccttggtagccaatctggtgcgggccgaagccttggtgctactgaccgacgtggacgcgctgtacactgcaccgccctcgcagcccggctcccgccgtgtggaatatgtgccgaacgttatcgatgcacttggcgacatccaggtttccggctccggctccaaggttggcaccggcggcatggtcaccaaactcgaggccgcgcgcgtggcggccgtctccggcatccccacggtgctcacttgcgcctcgaacgcgggccctgcgatgatgggcgatccggtgggcaccgtgttcgcaccggttaaggcccgcggctcatcacgccgtctgtggattggttttgccgccgacccgcgcggcacgattgtggtcgatgcgggtgccggccaggcgattcgcggcgggcgtgcctcgctgctggcggccggcgcgctcgaagtgcatggcgatttttccgccggcgatccggtctggatcgatgccgaaagcggcgaacacctggcccgaggcctcgccggcttcgattccgaagaaattccgcagatgctcgggcgtaacaccgcccaactcaagcgtttcctcggcccccagtacgcccacccactggttcatcgcgacaatcttgtacttgtgtgactgatgggatctgtcacacgacaggtttcatcaccatagtgcggctctggcgatttttcgtgctgtaggtttagcatggaagccatgactatggcgcaatggcagactctttccgaccgtatcaacactgtggcaccgagcgctacgctcgccgtcgattccaaggccaaggccatgaaggccgccggacttgacgttatcggcttcggcgcaggtgaaccgaatttcccgacccccgcaaacgtggtcaaggctgcggcagatgcctgccttgacccgaagaattacaagtacacgcctacgccgggcctgcctgagctgcgcgaagcgattgcggctaaggtgctgcgcgattccggctacgaggtgtccgccgaccaggttgtggtgaccaacggtggcaagcaggccgtgtatgaatccttccagatcttgctcaacgatggcgatgaggtcatcatccccgctccgtactggaccagctatcctgaagccgtcaaattggcgggtggcgtgccggtcgaagtattcgccggtgccgacgtgaacttcgagccctcgcttgaggcgctggaagcggcccgtaccgagcgtacgaaggcaatcatcgtcaactccccgaacaacccgaccggagccgtctggaagccggaaaccgtggaagcgatcggtcgttgggccgtcgagcaccacatctgggttatctccgacgagatctacgagcacctgaactacgacgacgcgcgcaccacctacattggtgccgccgtgccggaatgccgcgggcagctgctggtgctgaacggcgtggccaagacctatgcgatgcctggctggcgcgtgggctggatggtcgcgccgcttgaggtggccaaggccgccaccaagctgcaggggcatatgacctccaatgtggccaacatctcccagcgtgcggctctggccgccgtggctggcccgctggacgaggtgcatgagatgcgcaaggcgttcgatgcacgtcgccgcgcgatcgtggctgctctgaacgatattgagggcgttaactgcccgactccgaccggtgcgttctacgcttttgcggacatcaccgctttgcttggcaagccgctggggcccaacggcactgtgtccgatacgtccgctgattttgccgccgcactgttggatgaggcccacgtggccgccgtccctggtgaggccttcggtgctcccggttacctgcgtttctcctacgcactggccgacgaagacctagccgaaggcatgcgtcgattcaaggaatgggctaactgagaagagtcgtgtgccgcgcacatgccacgcgcgcgacacgcgatttgcgataatccaccggagccgttactataacaacttggcggtttcgccgtggcgaagcgttctctacggaatgcacgccgaggtggattttcacctagggaagtggcgcaattggtagcgcaacggtctccaaaaccgtaggttgtgggttcgagtcccgccttccctgccaagttttcaataatcaagcagctgacgcgaggtacagaatggctaagacgaacaacagcgaaaaggtagtcaagccgaatgtcttcatgcgtatcggtctgtttatcaagcagatcatcgacgagcttcgcaaggtcgtaacccctactgccaaggaactgttcttctggtctctggctgtgtttatcttcgtgctgctgctgatggccctcgtcacgggcatggacttcggtctgggcaagctcgtgctgtgggtgttcggctgatccgcacaacctaaggtgaataacaacgcatgagtgatgaactgaatctcgagaatctcgacgccgtgccggctgaggagcctgttgtcgaggcttccgaagctgctgccgatgaggcagctgccccggctgaaccggttgctgacctttccgcagaatctgacgcatccgtcgacaatgcagatgttgagtccgccgctccggtcgcgactgaatccgctcccgttgcttccactcagactgaggccgtttctctggatgaggacgaggaagaagtcaacgaatccgagcaggccgaggaaaccgatgccggtcagcaggccgttgacgaattctccaagtccctgcgttcccttgatggcaagtggtatgtgctgcacacctactctggctatgagaagcgcgtgaagaccaacatcgagtcccgcgtcgcctccttcggcatggaagaccagatcttccaggtcgaggtgccgatggaagaagtcgagaagcacaccgaaaagggcaagaaagtcatcacccgcgtgcgtgttccaggctacgtgctgattcgtatgtggccggatgagaatgcccgccgtatcgttcgcgaaaccgaaggcgtgaccggcttcgttggcccgaccaaggatccggcgccgctctcccgcaaggaagtcgtggcgatgatggctccgatgatcgcctccgaggcactcaaggccgccggcgacaagcccgccgccgccaagaagcgcaaggtcgaagtctcctacgccgttggcgatcaggtcaccgtcaccgatgggcctttcgccaccatggccgccgttgtttccgacgtggagcccaccactcagaagctcaccgtgctcgtgtccatcttcggccgtgatacgccggtggagcttggcttccaccaggttcagaagctggattaaccccaaactttgcagagcccgaccatcgtggtcgggctttttgtgttgtccgggtggatttgcataataggaaagcttgtgtctggagggaagacccgctagcacagcacagcaatataagttgcgggaggagaccgaccacaggccgattgcctacagcatgcacggataaataacgagtcaagaccgagcatgatggcagacagccgaacctgaggacggcgaccattcgaaccgcgttatagaaagaagaaccataatatggctcccaagaagaaagtctcggcgctgatcaagctccagatccaggctggcaaggccaacccggccccgccgctgggcccggctctgggttcgcatggcgtgaacatcatggacttctgcaaggcatacaatgcccagacgcaggacaagatgggtcaggtcatccctgtcgagatcaccgtttacgaagatcgttccttcaccttcgttctcaagaccccgccggctgcagctctgctgaagaaggctgctggcattgagaagggtaccgagaacccgctgacccacaaggtcggctctgtcaccaaggcgcaggttcgcgaaatcgccgagaccaagatggaagatctgtctgctcgcgatatcgaggccggcatgaagatcatcgagggcaccgctcgctcgatgggcatcacggttacggactgataaggagaaggacagatggtaaagcgttccaagaagtaccgcgaagccgctgagcgcgtcgatcgcaacaacctctacaccgccaacgaggccatcgctctgctcaagagcatgcctgcctacaacttcgaccagaccgtcgaggccgtgttccgtctgagcgtcgacccgcgtaaggccgaccagctcgtgcgcggtaccgtcaacctgcctcacggcactggtaagaccgccaaggtcctcgtgttcgcccgtggcccgaaggccaccgaggccaccgaggctggcgccgacatcgtcggtgatgacgacctgatcgcaaaggttcagggcggcttcctcgacttcgacgccgtggttgctactccggacatgatgggcaaggtcggccgtctgggccgtgtgctcggtccgcgtggcctgatgccgaaccccaagaccggcaccgtgaccatggatgtcaccaaggctgtcaaggacatcaagggcggcaagatcgagttccgtgtcgacaagaacggcaacctgagcttcctcatcggtaagatgagcttcgatgagtccgctctggacgagaacttcaaggctgtggccgacgaagtcaagcgtctgaagccgtccaccgtgaagggccgttacctgaccaaggcgaccatcacctccacgatgaacccgggcgttccggttgacccgaacaccctggcctgaggctagcgagcttcaatagctactgaaagggacttcccgtaaaggggagtccctttttgcatatgcgatgaccggttgcgagaaggtgaacctggatggtcacgcaatcgaattcttgcaacacgccggtgaacgcatgaatttgttacgcatcggcaatgcaaaacggattattctggtatcagaacagcgcaaataggctgtttgcgacacgccgaaggaaccgcgctgttatgccgattccttgggttcttgtgcgctttgatttgcgttgtggcgtggttgcgtgtaagttattcacctgttgccgctcagcgcggcgggttccttcttctggttggtttcc

SEQ ID NO: 3829 - DNA, 5457 bp, Unknown
  R35_2m  MAG No. k141_9697
aactgcgcgaacggctcggcatggccgcctacttcaccgccccgtacccgtcgtgccggcgcggcggcaacgagaaccgcaacggcgcgatccgccgctacctgcccaagcgcacgcgcgtcgacccgtccatggccgacggagatacaggccatcgtggacgggatcaacgaccgtcccatgcgcgtgctcggctaccgcaccccagccgaggcattcgccgacgaactgccatcattaaccgaacaacaaggatgttgcacttctaaatagacaacgggcttttgtgctgatatagggatttgtgctagtcgaatccgcgaaatgttcagtaaatgttcacgtagcgaaatcggcatagaatgcgagcaaacgcataacggcacggtgctgttcctgcgtacgccaacgccaggcgaaccgccggaaagaaggggtctccatgattgagacagcggacgatatcaagacgattgcgaacgtcggcacgggaacaatgggccatgcgatcacgttgcaattcgcgctggccggatatccggtgcatctggtcggccgcagcgaggcctcgctggagaaggcgatgaaggcgatccgttctgatgccgaggacttcgccgaagccggactgctcaaggccggcgacaccgtggacacggtgctggcccgcatcaccggttacgccgactatgcgagcggcgtggcggacgtggacttcgtcatcgaatccgtggccgagaaccttgacatcaagaagtccgtctgggccgaagtggagcacgccgcccccaaggacgcgattctgtccacgaacacctccggcctgagccccaccgcgctgcagtcggtgatggggcaccccgagcgcttcgtggtggcgcacttctggaaccccgcgcagttgatgccgctggtcgaagtggtgccgggtgaaaagaccgatccgaaggtggtggacatcaccttcgacctcatggccaagatcggcaagaagccggcaaagatcaagaaggaatcgctgggctttgtgggcaaccgcctgcagctggccgtgttgcgcgaggcgttctacatcgtccagcagggcatagcggacgcggccaccgtggacgacgtgatgaagtacagcctcggccgccgctggaacctggtcggcccgatcgccagcatcgacctcggtggactcgacgtgttctacaacatcagcacctacctgttcgacgacatggacaacggcaccggcccgagcccgctgctcgccgaaaaggtcaaggaaggcaacctcggtgccaagaccggtcagggcttcttctcttggcagggcgaggacggcaagcgcatcatcgaaacccgcaacaaggccctgctgcgtgcgctgaaggacgatgccgcggaagcgtaaagcgcgagcgacgaattctcgcgtaacgtgtgctacgatggaaggctcccttcggggagccttcgttgtgcttgcgttgttcttcggtccaacttttcgacatgcgtatacgttgttgatagcgacaattgcggaaaacgcttacagtatgatgtgcacacggacaacaagccgatgattgcaaggagcggtgacgacgatgacatccacagaacacaatacgcgagccgacatgttggcccacatgggcagccttcagcaggccgcctacgtgcgcccgatcgagtaccaggagggccgtgcccacggcctcaaggccatcgaggtgaagaacggcccgctacgcttcgtatccatggccgaccgcgccctcgacgtctgccagttcgaataccgcggcgagaacctcaccttcctgtccaagccgggcctgaacggccgcaaccagttcgacaccaacgggctggaggcgcagcgctccatcatgggcggcctgttcttcacctgcggcttcgagaacatctgcgcgccgtacgtcacgcctgagggcggcaagtacccggccggcagcttcccgatgcacggccgcatccgcaccacgccggccgagcatgtgggctccgacgcccactggaccgccgaaggcgactacgtgctcgaggtctccggcgaaatgcgcgaggccgaactgttcggcgagaatctggtgatgcgccgcaagatcaccagcgtgtacggccagccgtcgatcacggtcgaggatgaggtgaccaacgaatccttccgcgacgagccgctgatgtggatgtaccactgcaacttcggctggccgttgctcgccgaaggcgccgaagtcgtgatccccagccgcaaggccaccccgcgtgacgagaccaccgcagccgacaccacgccgtggaacgaaatccaagcacccgaggcgaaccgccccgaaagcgtgtacctgcacgagctcgccgccgacaagaacggccgcagcttcgccgccgtggtcaaccgcaagctcggacttggagtcgtcatcgacttcgacgccagcctcttcccatacttcatggaatggaagtcgatgggtgcgggcgactacgtggtcggcctcgaaccctcgaactccagcgtccacggccgcggctggcacgagcagcgcggcgacctgcacaccatcgccccgcagaccagcgaacgtaagtccctgaccttcaccgtcatcgaaggcgaggccgcgattgacgggctcatcgcccgccgcgacgccctgcttggctgaattgtgagataatatcggccgatatgtgaacggctgattagcgtggggagcatggttacccgggattcggaacagtatctgcgattcaaacgggagcacacgctgccctcgcatgaggcgattatggactggtatcgcggcaccggcatgcgtccgtatctgcaggcgcttgacgacgccggccgcaagaagttcgaggccgaagtgttctcccaagtccgcgaggaataccccacacagtcggacggcagcatcatcttccccttcccgcgtttcttcttcctcgcgactcggtagaagctcgccggattcgtgtactgggcggcgcgacctgtttcccgcgccgccagctgtgggttgacctcgctactgggcttgcggtgatgccgctggctgctgcgctgcttccgattgcgatggcatttgcatatgcggtgcgatgctggggagtgtgccgtcatgcatgcactgcttcaatatgaggtctcgctgggcgatgaggtcgtcttcgatctggtcacgcacgtcgcgcacggacgagaaatacaggtagaacgtggcgtgattgtagccggcgagttcggtgatctgacgcaccgagatcttctcgatcggcttggtttcatacagcttccagaacgcctccttaaggcgattgaccgtctgctgcgtaagttgcgggttcttcttgattgcgattcgcggtatggtgatttcgcataagacgcacaaccccatcgattcgtcggtcaaattcgtgaccttctcgatgcgatgctgtcgctggtggtcacgcaggacgtgctgttggaatcccagggaaccgcgcacgcggcgcaatccttgggactgttcggcatcgggctcggcgtggtggccgtgatcatcggcctgtggatgttgctgagacgtaagtggacggcaacggaataggaatagtgacagcggaatagcgcgcgtgatattggtacgcgacgtatcgtaaaagcggctacaatacttacggcaaaagtctttgcaacgagaaggaagacatgactgagcggcgtcgagcacggatgaggattcgtcgtcaacgaatttacgttgtacggcgcattgtggttgcggtatgcgcattgttgtgctgcgttcttgccgtcttctcgacgattgacgcccaacgggtgtggccccgcggtgagtcggtcgcacaggggcaggcagaggttcaggggcaggcgcagaaggtgagtcaatccgcgcaacagtcggcatcgcgagtgtctgcatcggcctcatccttggaccgccagcaggtaccggtctttaaccaggcgattcaggagcagcgtgacaaggaagcgcaacgtgcgcgatggacgaatcccaccggcaagcagcctgatttgtcgcaatactccgatctcagcgtgaaagtcagtatcgccaagcaggaagtgtatgtgcaatccggcggtgagaccatctacacgatgatcgccagcaccgggctcaacgatacgaccccgcgcggcaactatgttatcgggatgagaggcgatcacttctacaatcccgcagaaggcatgggtgctgattattgggtgcgattcaacggcccgttcctcttccactcggtgccgaccggggcgaactccggcgagtatatggaagaggaaggcaacaagctcggtcagccggcctcacatggttgcgtgcgactcactgtggccgatgccgaatggttctacaaccaaattccggaaggcacgccggtcaccatcgcctgaggcttggcctgagatcgatactgaggctatcgtgctttaggcgtctgatattggtcgtcggtagtgaagcaggtgcgatagaccatggccatgatcagaccgtcggccagcaaggtcagcgcggcgatggcaccgaagaccacgaactggtatttggcggcgttcagcggatctccgccggctatcacctggcccgccatcatgcccgggatggtcacaatgccgctggaggccagcgaagcggtggtgggcaacagtcccagccgaatcgacgagatgacggatggacgggcggactcccatgccgtcgcccccaaggccagcatcatatccacctcgtcgcggcgttcctccatgctttcatagaatcggctcagcccgacagcaagcgcggaaacggtgttgcccagcagcatgccggtcagcggcaccaccagctggggcgcgtaccacgggtgcgggcgcacgatgagctcggtgaccagcgccagcatcagcagcatggtgatgaccaggctcaggaagatcggcccggcaaggcccttggggatgccgtgcgcgcgggacatcacgatctgcaccgccgcgatcagcatgaccgccatcagggcgaacaccatccacacgctgttcgaacgaatcacatagctgatgatgaatcccatggcgcacagctgcacgagggcgcggcatgccgaccacatcagggttctgccgatgcccatatgcatgagttcgctgatgatggccgccgcggccaccatgcccaacgccagaacaagaccccaggtgtcgatgtcgtaggtgccgttcatgggcgcacctccttgtcccgcgtcagatcggtgagccgtcccgcatcgagcatcagcgtgcgggtggcgcgtccgtccggcggacggtgtcggatgcggatgatcgccatgccgtgtgcggccgcgtccgccatgatcgcggccactttggatgcgttgtcgtcgtcgagtccggcgtcc

SEQ ID NO: 3830 - DNA, 8391 bp, Unknown
  R35_2m  MAG No. k141_9800
gacattaccactgattttcgtaagttcctgcaaaaatacaggatcaaccatgagcacgccgtccagctgagtattgctcccccacggcgtgcgctgccaaatcgcgcgcataccttcggcactgcgtgaagtatcagggtatacggccaaatctcgtatatcgaacgacatgttcaatggtccccactgccggaagatgcgctgctcgtctcccgtaggatcaccagcaccatatggaatatattcaccattcgaacggaaatcgccaatattgattttgccgttgtcagtagttaccacacctacggaaccgatcagaccgccggacgaacgttcctccgaagtggtcatagccatcaacgcatacgtgcgcggctgatcggaaccgaggaagtccggcagaatctggaacgtgccggatagctgattgaccttgtccgccatcttggtcagctgcgtattgccggcggcataggcgttcttcaccatgccgatatgggccttcggcagctgctgatacttctgcacctgctgctgcagtgactggttcgcggtggcaatattcttctgggcttccagaatcggctgcagattcagctgaccgtcgcctgagctgagctgtgcgctcttcagcgtggaaagcacgtccatgaactgcggcaccgaatcactgaccagcgaatcccccaccgaagtcataccctgcactgtggtgatgtcaccgccgtacaccggcgccttcgaggcgatgttccacagcgtgccgtgcgcaatctcgttcgcagccgcggtctcggtctttgcctggctgatctgctggctcaccgtatcgaggttgtcgaggttactgaggtcggttacaccgcccagcagctgcatcgcctgttcctcatgcgcctttacctgcttggcttcggaatacagcttcaaaccgaagaatccgctcacgcctagcagcaccacaagtagcgccagaatcaacaccactcacggccagatgcggtgccttctgcgtggaatacttgttgcgtgacttgccctatgaacgctcatactaacttccaaactggtcttattgacttgtaacctcttgcaataaccaaccgcctattatgccccggtcttgtgcacaaagcgtgttcgtcccccgcttctgcacatattccgaaccgactggaccacccctgggtatagcgtattggggtgctttgagaggctgctcggccaagcacgcgaagacgacggtcgccgaatacatcgaatacgcattgatatgcgaggcgcatatatcactgaacagatacgccaccgacaccgccaaggcaacaggccgagcaacagaagtgggggagtgcgtgaacggagctcagggaatcaagaatcgtcgcggcgaactgcagcgggtgctgagccgcgaggaatcatatgtagacggcaaactcagccgggcggcgttcatctccatcgcgatattgacctttattaccttcgtgggcaacttcacgcagttgcagctgagttccgcgctgccgattatcgtttccgaattccacatctccgtaaccaccgggcagtggctcacctccgtgttccagctggtcatgggcgtcatggtgccgctgaccgcgttcctgacccgtcgtttctccacccgccagattgtaatctgctcgatggcggtgttcacggtcggctccctgctggcatggttggggccaaacttcgtatgggtgctggtcgggcgcgtgctcgaagctgccggcacgggcgtgatgtggccggtgctgcagatcacggtgttctcgatctacccgctgtcccgacgcggctttgccatgggcacggtgggcatggccatgagcgtggctccggcaatcggccccaccttgggcggctggcagaccgatgccaacggctggcgttcaatcttcctgaccatgaccgtgattggcgtggtctcgctggtggcggccatgttcggactgcataatttcggctcgcatgacccgtctgcccgcgcggactttttctcggtgagcctgtcggtgattggctttggcgggttgatgttcggcttcaccaattcggaggcctacgggttcgccgcaccggtaacgtgggggcccatggcagtgggcctgattggcattgtctggttcgtgctgcgtaacctgcgcgccggcaagcggtatcgcgaggccgtagccgaggacaagtcggcactcccccagccgccgctgctggacttggaagtgctgaagaaccgttcgttcaccatcggcaccattaccgcgtcgctggcatttttcgcgttcagttcgattctggtcatcatgccgctttatatccagaccgaccgtgggtattctgccacgatgagtggtctgatcatgctgccgggcgctatcggccagtgcatctcccagttcttcggcggccgtgcgatggatcgattcggcgcacgacccgtggctttgttcggttcgattgtgttgacccttggcaccttgggcatgtcgctggtggcgatggatacgtggatctggtgggtatcgatctgccagttcatccgtcagatcggcatgggtttcctgctgatgccgattaccacgtggtccctgaattgcctgaacgggccgagcgaagtgtccgccggatcatcggtgacgaataccgcgcgtcagattgcgggcgctgtgggcgcacccgtgttggtgattctgatggaaacgtttgccgctttgcataagcagggcggcgcctccgccgtcgccgcttcgatttttggcattcaatgggcgctgcgcatctccgcaatgatctgtctggcaatggtgttgatggtgttcttcggcgtcaagggcgacggtgccggtcgtacgcgagacattatttccttgcgcgcgctgcgcgaacggcgtgcgcggcgtatggctgcgaactgacggcagattcaaccattcttaacataataagaagccccggtttccaacaccggggcttctgttgtgctatcgcaggatttcagctggagtctattacgccctgcccattagcgtcaggacaatcagcagcacgttcaacgccacaatcagcgccacgacgatcatgaagatcacgtgcttgacggttccatcagcccacttgcccatgagttccttgttatgcgtgtatcgcatcagcggaatcacggcgaacgggatgccgatggaaagcaccacctggccgatgaccagcgcctgagtcgggtccttggcgaaccacagcacaatcagtgccggcaccagcgtgaccacgcggcaggcccacatcggggcgttgacgtgcagcagaccgtgcatgatttccgagccggcgtacgtgccgaccgatgtggagctcagcgacgaagccagcaggccgatggaaaagatcgtgccgatcaccgggccgagcacctgcgtgatcgcccgctgtgcgccgtcgatggagtccgtgccagacatgccatgcagcgagttggcggcgagcaccagcatcgccagattcacggtgccggccagcaacagcgcccaggccacatcgattttcgagcctctcagctgcgttttgatcgacggcttttcgccgcctgcgtaatggtcgttcaccagcgtggagtgcaggtagatggcgtgcggcatcacggtggcgcccagaatcgaggcggccatcaacaccgagtcggcgccttggaagcgtggaatcatgcctttgaccacttcgccggggttcggcggggctacgaacagacccgcgatgaagccgaatgtgataatcagcagcatcacgatgatgatgcgctcgaatgtggtctgtgtcttgccgccttggaaccacagcatcaccgtggagattacgccaatcgccaaaccgccgatgaacagtggaaatccgaacagcaggttcagggcgatggcgccgccgatcacctcggccagatcggtggcgatggcgatgacctcggcctgcatgaagaacatgaagcggccggcatcgctcatacgctcgcccagcagttccggcagggatttgttggtcacgatgccgagtttggcggactgatactggatgagcacgctcatggcgttggcgagcaccagcacccacaccaacaggtagccgtatcgtgcgccggaggtgatgttggccgccacattaccaggatcgacgtaggccacggccgccacgaacgcggggccaaggatgctggccagcgcatggtcatgcggcttcttattgttattcgtccctgctccggccccggttccgactccggcaagctggcgttccttcccgatttccggtgtttcctgttcgatgtctgccacagcgttcgtcatagcggttgccgcagtggcatctgcttcggtgtgtgttactgccatatcgtttgtacctgttcccttcataccgcgcacagttatagcgcaggcatgtttcccgagtcaacagacggacaatctgcggacgattgatggatgaccggcggactggcagctggcatttcccgccatctcgttcatgaaatgtgaaaaaccgccgaaaactcgctcatgaaatgtgccagacggtagaaaactcgctcatgaaagtgtaaaatcattgatatagcagtaattcggaaaggggctcctcatgtatctcaaacgcaaagccgatgcctatctcaatgcatggaaatccgacccgaatcgctccccgctaatcatcaagggccctcgtcaagtaggcaagacagagactatcgattactttgccgcacacaactaccgttcggtagtggaaatcaacttcgttgaggaaccgaaatatcgtgcaatcactgcggacggttatggcgcgaataccatcgtccgcaatatttccctgatcgacccagccaaaaagttcattccgggcgatacgctcatctttttcgacgaaatccaggcccatcctgatatcgccactgcactgaagttctttaaaatcgacggcaaatatgatgtgatttgcagcggttcaatgttgggcatcagctataagcaaatcgaaagcaatagcgtgggatataagaccgactacgaaatgcgatcgttggacttcgaagaatttctgtgggctcgcggatacgatgaggccgtcatcgaaagcatgttcacccacctgtgtgatgctacgccattctctgaagtggaaatgaacgtcttctccacggcatttatggattactgcgtgcttggcggcatgcctgcggttgtcgcctcccatatacgcactggcacgttcgagggaacactgcaattgcagcgccagcttattttggactaccaggaggatatccgcaaatacgcgcaaggactcgatcaggcacgaattctcaacgtgttcagccatattctcgcgcaactcgccaaggaaaacaagaagttccaaatcagcaaggttgccagcggagcgcgtttcaaagactatcgaggatgcgtggaatggcttgaaacctcgggaatggtgaatatctgccgatgtatgtcctatcctgaactgccgttgaaaggcaattatgacgaaaacaagttcaagatatatttcggcgataccggtctgttcgtagcgatgcttgacgacgaggccagtgatgatctgcgggccaatcgtaatcttggtgtctataagggtgctatgtacgagagcatcgtctctgaagcgctacggaaatccggctatgacctgtactactacaaaaaagaggattccacactggaacaggatttcttcgtccgcacgcgcgaatggctggtgccggtggaggtgaaatcgaaaaaaggcaccgccaaatccatgcggacgctaatcgcttcggattcttatccggaaattcagttcggcgtgaaactatccgccggcaatatcggtagcagcgaacacgtgttcaccgcaccatacttcaccacatttttgctccgacggctcctgcgcgcttatgacgaggggcaggcacctatgctcaacaatcctgagcggtagcccctattcgtctgcgggcacggcctggcccgggcaggtatggaggacggcgagcatggcgtccttttcttgggaggtgacggtgagctggtacttgtctttgacgccaatctggcgggccacgtagtcgcaacggtagtcggcgttggtgggtagccagtaggcggcggaagccgaacccttctcctgattggccggaccgtcgacggccagcaggttataggggtcattgccgaattcatggcgtttggcagtggaccagtcgtgcgcaccggattgccaagcgttttcaagggccaccacatggtcgatctgcactttggcgctggtggcgcggccacgtacgaaatggatggtctgggcggtgtacggatcggccagtgtgccggactcgaccacacaggaaccggcgtatttgtaggtgatgtccgtgagatcgcgggcgagcacgtcgtcgcgtacgtcgcagccattgccgtcgacgtcggtggtgcggaaaccgaaggaatcgcggtcgtagccggaggagctttggttgtcgtctacggcgagcgcgttcaaagtgtcggcggctgaaccggtggcagtgtagccaccggtgattttggccacgtcggagctgacctgcggcagtaacaggccgatggtcacgccgattgctacggcgagaacgatgggaatcagcacgcgctccagcggtccagaggcgttgaaacgacggcggaagtgggcgttacgacgtgccatcaatcacgcataggtgaaggtgagggggtcgtggccggcgcgggtggggccgtcgagggcgtcgatggcagcgtgttcatcggcggtcagggcgaagccgaacaggtcgagattctccctctgacggtcggcatgcacggacttggggatgatgatcgtgccgttttcgatgtgccagcgcagaatcacctgggccgggctgacctcatgggcggcggcgatcttctcgatggtgccgtcgccggcgttgaggtcggcgccacgcgccatcggcgagtaggcctccacggcgatgccgtgcttcttgcagaacgccaccacttcgcgctgctgccacgtggggtgcagctcaatctgattgacggccggccatgcgccggtctccccgtgcagacgcttcagatcggcgggcatgaagttgcatacgccgagcgtgcgtgccatgccttcgtcgcgcagcttgacgaacgccttccaggtgtcggtgctgcgccagtcgaacggcgtgggccaatggatcatgtacatgtccacgtaatcgagctggaggagtttcagggagttgtcgaatgccttgagcgcggagtcgtagccctgctcggagtcgcgcagcttggtggtgacccacagggtctcgcgcttggcgccggtgttgtatccggaagcggcgagcgcacgacccacgccggcctcgttgttgtatccggcggcgccatcgatgtggcggtatccggcttccagcgcagattcgacgacaggggccacgccctcgtcatcgatacgtagcatgccaaggccgacctgcggaatggaatggccgtctttcaaggcgatgtccggcacgttggcgggattgatgtgtccgttggtcatggcttgtgatgctccttcatgtactgcaactacacgccactgtacacggttatgcaggcgatgtgcgggtgatgcaaccaaacggcatgattgcgcccggccttccgtgtgggagagccgggcgcaatcatgacaacatcacgctctactcctgcgaccggccctcgccctattgttcccgggcgcgaatttgccccggtacaggcgtcaatcgattgacgtttgcaccggggcagaaatcgttgtcccggtacgcaatttcgggccattttcgagaaccaggacaagacaatccccaaagtccacataccccgacaaacagaatcggcggaatacagccaatcccgaaatcaacatactgtcccggttctcacgtagaacgattgacgtgtaaaccggggcaacgggaattgtcccggtacgcgaaaaacacccgttttcgcaaaccaggacagtgatttctgtcctggtacccacatcaaacgattgatgcacgaaccgggacagaatcgcatcgctgcgccgagacagacgcatctgacagccgacaaccgataaacgacagccgacagatggcatctggcagccggttgccggctgccggcaaccgcatcataatgccgcatcagtctctatcaggagcgcttacgacgcaaagcaagcgagaccccgccggccacgccgagaacgacaaccgcaagacccacggcagtcaccgcgctaccggtattgctcagcacacca

SEQ ID NO: 3831 - DNA, 12249 bp, Unknown
  R35_2m  MAG No. k141_9813
cgtggcggatagtggattcgaaccactgaagcacgaagcggctgatttacagtcagctccctttgaccgcttgggaaatccgccagtctgtttcccgccgcggtgtttgacctcaacaggcaacttggctatataaccacatattttccaagtacgcaaatcgacctctacgcgaaccttgttttaccgcggaattctgcggttttatcggcgtgtctcacagcgtggtttcagggtccgcttcggccctgcaaacagccccgaccaaggccgcaccccgcacttctaccaatcatttttcttatatggtgttccagaaccttgcaatggcgcggttttcgagtggcgccgcctgcttgcggcggcacagcgcatgccggcatgctgggcgcatggcttctgatcttgtacatcacggacaatcattcgacgaccagccgctcggattcggcacgctggccattcacctcggcaacggggtcgacgccgaaaccggcgcgatccgtcgccccatcacgctggcgaacacctacgcgctgtcctacgacgcctcggccttggcgattgccaagcatctcgaatcgctggatgtggtgcgtttcgtggcgcaccccggtctggaatcgcacctgcaccacgaggtggcggccagccagctggcccgcccggactccgggttcggcggcgtgctgtcgttcggcctcgacaccgaccacgacgggcacaaccgattcgtttccaagctcaatgtgattacgtctgccgtctcgctcggccatgactaatcgctgatcgtgttcctcggtgaggatgacgagcgccagtacctgtacccgcctgagttccaccgcggcttcttccgtctggccgtgggtctggaggatacggacgatttgattcgcgacatcgatcacgcgctggtggaggccggattcgaggtgtgagaccgcaccgcgcgcatgatttcggcctcttccgccctgctgccgccgtcagtgagtcacaagatggctcggtgacgacgatggcagggctttttacgtcggcacagggacaatacctggcggtctgccgacgatgacggcacttatcgtcggcagaccgccagtttttggaccgtcgccgacacaaaacgccgatttgccgtcggcaatggtccaaaaactggccctataacgacgccaacgcggctcagcatcggcacatcgccatttcgtggcccactgccgacgctggcctcatgccacggcactcagcatcggtagagagacaaccattggcacagcgacgacaccacgaacctgcgacacggaaaaaaaacaacataccgtcgacctactgccgtcttgtgcaaaatgtcttaagccgctcggccaagtcgccgactgagcctcttccatagggaccccaatccgttacccagtgtagatgcggtgcaacgccgaactcaactacgctgcgcgcatgcacctttatgcatagcaggcatggctgggcgtttggcgggagcggttttcggctcccctctctgaggggagcccctttccgcctgacaagagaaaaccccgactgttcgtgggaacagtcggggttgttgaagttcgctaggcgactaatcagccgaggatggcgagaatgtcgcgcgcgccgacgatgaggtagtcctcaccctcgtagtggacttcggtgccgccgtacttggagtacagcaccttgtcgccgaccttgacatccatcgggatgcgctcgcccttgtcgtcacgacggcccgggccaacggccaggacttcaccctgctgcggcttctccttggcgttgtccggaatatacagaccggaagcggtctgggtctgggcctcggcctgcttgacgatgatcttgtcttccaacggtgtgagcttaatcgacactgtgggtcacctcgtatctacttgtagttcgataatgccgcgccagaacgcctcaagaggctgacgatcacttgcgttgtccctttgcgctaggacacatcgtagcgcgattattagcactctgccaactcgagtgctaacgctgtgagagaaaatcggcgaatcgcaacgctcagttgccgcggcgggcaagaatggagtccaagcctgcgcccaacgaatcggtggtcgccgctggcgcttcgacgtcggcacgctcctcggattcgtggaatgcggctcgctgggcggcgtttgcagcctcgtcatcggcgtccgtagcggcgttcgtatcggcatcatcgcgctgctccgactcagtgtctacagcgtttccggcactgacagccttgcccgcatcggcggccttggcatcgtccgcggccttgacggctcgggcctcgtcaatcaacttttccgccactgcgggttcgacaggttccgccttggacacctgacgggtcgacttgatctccaagctttccggagcgttgtcggcgttatgttccccgcccaaagtgaaggagatgagatcctgcgaggtggccatatcgaagacatccagtgctcgggcagggcgtacgctgaccagttccgacgtagcgtcggcagcggcatcgtcgcgctcatcacgctcgtcacgcaccgtaagcgatggttcaactcgaggggcgacggacttatccgacttagtcgacttatccgtgcgagcggaggcatcgggcgcggcggaagattcactggtttcggcagcggacttacggtcagcggattcatcgaccatagcagacggttcggcggcaggcttattggcggcggactgtgcagtatcagacttctcagactgtttggcgtgctccgccgcggcctgatatgcggcggcggactgacgcaacgacttggccttggcctgctcaatctcggcatcgcgtaacgcgcggcgaatctgccgctgttccatgacctcggtggcagcatcctcaacatgctcggaaagctccttggcaggcgcagttacggccgcaaccggttcggtcttgttcacacgcttgctgtccttggactcggcagacggtttcttggaccagcccgtaccgctatgagtccgctcgtagcggaccaccttgcgctcccattgccgggcctggcgtgaggcattggctcccagcaccagcaccagcagtaacagcacgaacggaataagagcaagcagcgggctgaaatgcagggggaacgatacggcaaacaccaacacggttatggcaagcaggcatacggcgagaatctgccggcggcggatggccgcgcggcgcagttcccgcacatgggcgatgtgctcaggtgtcagcctcgctgacggtgttgatgctggcattgctgcccctttcgccttatgcggcttgatgtctccgaatcgtctgccgttctctgcatcaacgatatgcagggaaggcgaataacgatcctgccggtgctcgtccacacgtttcatgccgttggccgtacgtacgggcagccatacaacgataataatcgccacaatcaccagcacgacgacagtgctcagtgactcataacccatagagtcaaggataggagacgtaccgacgaactggggctttccgtccgggcgtgtcggagcggaattcttccggtcgacgcttatctggaaccggtggcggcgagtctggcagagaacccttgccccatatcttcagccaacagcgcaaatgttacgtggtcgcgccactggccattgacatacatataccgctcgcgcagtccctcatgatgggctccgaccttacgcactacagccaaagagcgcgcgttatccggaagaatggcgatttccagccgatgcaacgcgggcccgaatgggtctccgagtgcccaatcggcaagcatggccagtgccatcggcgcaaatccgtggccggcgtaccgttggtcaacccaatatccgaccacaccggtgcgcatggcaccatacgcgatggctcccaacgaaatctggccgacgatacgcatctggtattcgatggcgaaaatcacgccgacgccatgctgctcattacggcgctgtcgctgcacccattgattgaaggtgatggagccgccatgcatcgggtcgccggattcccaaggcgccagccagtcgttgttgcgccagcgcacttcgttccagccgtcctcatcgtccatggtcagggggcgcaggattatcgggaaaccgggatgggtgaggcgcggcggacggatctggtggtccagcttgaacgcctctttaatcgactggaaaactgacacggcctttattgtagccatatgaagggcttgcgccttcgcctcggccactttcgttttacggtggaaacactagattgtgcggtatgagcgaagcggacaatggcatgaatatcggcagcgaccacagcggcacggagaaaacagaaaagatggataaagcgacgctgcgccaccatatactgtctcggcgcaagcgcattccagcggaagaacgtggagcggccggtgaattgctggtgcgacggttcccggcacacatgattcaggatggttccacagtggcggcatatgtgtcgatgggttcggaaatcgaaacccggccactgttgcgatggctgttggctcatggctgccacgtgttggtgccacgattgggatctgggttggaaattggctggagtgtgctggattcattggaatccttgcgctcgatggatgcagtgggtggcgcgaacaatgccggtagctgcagctctcccagcaccgtccatcacagacccgatgagccaactggcgcagttctaccgcccgaagcgttggagaaggccgatctggtcatcgccccggctttggcagtggacccgcaaggcaatcgtctggggcgtggagccggctggtatgaccgggccttggctcgacgcaagcccgcgtgccccctgattgcggtgtgctggccgtgggaggtgttggacaccgatttgccggccgaaccacatgatgtgccggccgacggagtgctgacgccggggggataccggcggcttggcgaatcgggccggctgagttgaccggccggccaagatactcggcgcaagccagactgaccaaccagccacgcacactggccgatggaaccagagtggcaaaagcaggctggctagtaagaccgtaacgccaatgtgtcagggcggcgactaggatatgaacggttgcacggcatggtgttgcacgccatgcgcgagaaatatgactttgttggaggaatccgttgcctacctatcattaccgttgcaagaactgcggctatgacttcaccgaacagcagtcgttcaatgacgccccgattaccgtgtgccccaagtgctcgcaggagcaggtgcgcaaggtgtattccgccgtgccgattgagttcaagggtcacggattctaccgcaccgacaaatccggcaagtaaggtcggctccccgtttttcctctgtaaacgacggtgtcgacggcggtatgccgcggatattggcactacgggcactgtctgttgcacgggtttgaagcgttgtggataacttggcaagctagaaccacataggtcgattcagcttgcgcttacgaaaaacttcaggtcaccatggttgcatggtgaccttttcgtttattaagccgcctgcgcgcggctcattgcggcgacggcgcatggcggatgccttgcgccgactcactgctgcgttgtgcgtgggactcgcagtgttgtttgggcttgaagccgtattggccgtggtggagaccgagccgatggtggtggccgctcgcttgattcgacggggtgacattattctggccgccgacgttcagttggctgatatgccggtatctgcgataggcccatcttgggcgtgcaatattgaggatgtggtgggcaaggtggcgcaaatcgatatcgaagcagccgatcccatttccacgcatatggccagagatgcgcccgtagcaccgaccggcactacggtgattgaagtccgcttggccagtagcgtcgacgatgtattggccggcgatcaggtgagactggtttccgccgtcggttgcgaaggtgccgattgcacgctggccgagaacgccacggtgatgaatgtcgacaaaccggatacgactggcgcattgggaagcaacgaccgactggtgtcgttcgcaatgccgccggaggccgcggccaaggttatggagctgcaacaggccggagcgattatggccgttgtgcggtaggaaagcggaatcggccttcggccgatgttgtgttttccgcagccatacggctgcggaaaacacaacatcagagcgcacagagtgcgcctcaactcctactcgcgctcgttgaaaacagcccagtgtggaggcagttcgccgaggatgcgtttgtcgtcgtcggattgccgttgttggtcggtctgcatgtctccgggctcgagtttgacgccgtcagcgtcaaactgctcagtgcctttcatcaccacgcgcttgtgcttgcgcggtgtgcgccgtgtagccgagtattccgccatgattattcaacctcgcggtagatctcgccgatacggctgacgatacggtcgacttccttatcggggttcacgaaggcggcgacactccagacggtcatcacattccagcccaaggaaatgagatcctgtgccgacaaacgatgacgcctgcgcgtggattgcacggacataaagttcgcgtcatcggtctgcacggccaaggcaaacggcttgtccttcaatcccaccacgagcggaatcttcacgcccttgtcgaatccataatcaacagcagcgttcagtcctcgcgcgcgcaacctgtcggcgatatcgtcgaacagcacgttgccgcctgccgcaccacgcaacggaagcaccggacggtcgtcaagctgttcggcccacgtcaacatggtcttcaggaaccgaggaccggactggtgcagtcgttcttcatccaaatcttcggaaccaaaggccgacacaatatccaagctgtggtccgccaatgccagggcatccagcaacagtccgcgaccgcctgtgctttcgagcggaccgaactgctgaagcagacgtccgtgcgtggttttcgcatagcacatcgacagaatcacgtcagtggcacgacctccggccacgtcacgcaaggaaaccagccgcacatggcgcaggaatcggcccatcgccttggatttgcctgccaacgacttcaattcggcacccaagcgtgtgcggaatgcgtcggtcaacatcacgaccacaagtcgatagctggaaggaaccacagcaaaaccggcggcacgttgtgtaatcagacgcaccacttcatcaatctccgactggctggattccaccagaccagaagacataaccggcacaccgctcgcttccacacggtggaaccgcacctcaccggcagccggctcggtggccacatcatagcgaacaggaccatatccctcggattcaaggaatgcggacaggcgcggcgcacggcgagacggggcagcatccacctcgatatgaggcaacgtgtcgatcagctgcttgacgctttcgctggttaccgtcgcgcagtgggcgatcaccaccacctgctgcacgcggccgatgatggacagcaactcgatagcgggaatgtgcgcgcacgcatcgagaatcgccacatcagccagcacacccggctcggtgagtgcggcgagcgtacccggcgaggccaccagaatcggcttggccgcggccagaatctccggatgatcacggcgaatcctgctcagcgacacactggcgcgccctgccagcacggtgtgcatctggttggcttcctgagtgcgggagaacagcatgtcgcacaggcggcgcatggattcctgcgacaccatcggtccgatggagcgcacgtgctccacatcgacctgtgcgaagcggtcggatgcggtctgcagcgcagcaccatcctggttggagatgatggcggaagaacgcacaatgtcctcgaacacggtggtccaccatgccagctgcacttcgccacgcacctgctccacgcccacccggcgagcgttgagatcggcgaccaactcgttcagaccggcagaagcgaattcctgctccagcaggcaacgctccggcaaggtgtccagtgccttgcgatcatccagcagtgctttcaggcgtgcttccaccttctcgaaatcggcggtttccagattgccaccagcgggtgtggtggaaagcacggtatccagcgcggtcatattgctgaccagcgcctcttgggtggagatgatctcgtcgagcttgctgggcagcaccggccaaccgccgtgaggcacgaactgatgccactgctccccttgcttggcgactaccttcaacgcttcgtgcaagtcctcgacctgcgcgccgacgcgcagcagatccttggcttccttgacgtggcggcggcgctcccagaatcccatcgacgtgccctcggccttgcgctggctcttcggcttggtggcctcgatcatggagctgatgtctcgctcgaaaatctctggctggaacacgtcaagcactcgtcgcagattcttcaaaaccgtaacctgacgctcccactcgcgagtggtgggaggaaccgggaatccgcaggtctgcacggtgcgtgccacctgctcacgggtggcgggcaggaagcgacgcagcaaatcgtccacgcgctggtaagcggttaccgcttgttcttcagtggtgatggacgccttgtaccatgcggtgtcttccgggccgatggtgtattcgccgagctcgccggcacgttccatcttgctgatccatgtgtcaatatcgttggcgatgctcagggcacttgactcgtcaagtcgaacgtgggtggcggggtgtgtcgggagcacggagatacgggccaagttctgaatggtctcgtatgcggacacattccacttatcgttgcccccgtgcaggtcgcccagatagcgggtcaagcgcgagcgcacgcccacgagttcgtcggccagctggtcgaatcgctgggtggcgactccgggctggaatccgactgcggcaatcagctgcttatcaagcgcggcgttggcgtgttcatcggatacatccagtacctgcgccttcatctcattggcggaggccgtctggatgaacagacgcttctgctcggccacgccgggcacgtacagcacggaacgaccattcatcaggcagcgcgatgcgatggccacagcctgctccgcggtgcccttcgggaaggtgccgtcgaccacgatgctatggccattggcagcaagtgacgcggcatatcgcaccgtattgtccacatcgccgacttcgtactcagcatgcgggtctacgtcgaaaggactgtattgcggaatattggcatctttgagcgcggtgcgggcggatttgtcgccggcaagcgcgtccaacagcacattaccggtggggccattctccagctggtcgatgaactgtcggctttcgctgatcatctgcgacgaggggtccatgaagcatccgagcacaatctggcgctcgatggcgaagccggagatacgctccgatgcttcggacgaaatacgggcgaacatcgcggaagtttcgggagtgccactgtcatagctggcaccgtcaaacagggaatcctcatccaggaacaccccctgctcacgcaatgcattgacgaacgcggcgttcagggtcacgcgaccggtgaatcgaatggtggtcgacaagccatcatcctcgatcgtgacgctcaccgggtacaacagcaccggcagcgcgttgcccctccacgtggccacaccaaccacgagcgacaactccgccacgccggaaatcctgcgcttggcggcctggtcatccagtacgcgcccgatatggcgttcggcggccttaagcacacccgtgtcacggaacaacgaatccaaccgaacatggccggaagcgaacagctgggcgatgccggagggatgggcatgggtcatctccagcttcgcggccagttgattcacatcctcgagcggcgatggcggctgcatactgcggtattggtcacgccagcgacggatgcgattcagaccttccgtgagattctggttctgagtctggctctgggtcatctctcgactcactttccaaccgcttcgcggtattcctgatagcccttgttgtgagacagggcttcgtcaatatcggcctcgccacgggcggcgagccaagaatacatgtcgtcgtacaggtacggattcatggcgaggaacgccagtaattcgggatgacgggcgacttcgaactgaacgttgaaatcttgcgtggtttttgcctcgtcagaggtcaggccatcgacttcgactgccggctcctgtgctttcagctcgcccttggccacacgctcgaacaccgagccgggctcgaagaccggagtgtgtacgcccgtggagtagatatcagacgcttcatacgcttcggagaccgactgctgggcggtttcggtttcggtcgccagctgctgatcctcgggtgcgtcggttgccggttgagcggtttcaggctgggcggttgtcggctgggcggtctcagactgagtgttttcagactgggcggcttcggactgagtgccttcagaatgctgtgcaacagcgtccaccggctgagaatcgtcggtattcggagcggactgaacgttttcggctgacttgcttgcgccagccaccacatcggattcaacaaccgccgccgacgccgctgccggctcgcttgtgctgggagcgtgcttaacaacggcatgggcgatggcatctaccgggacaataccggagatcctgctgtgcttggatgcgggcgttacagtcgtcgactcaggttcggtctgctgcttcggcagtaccacggagtccatggcctgctggtttttgcgttcggtctcctgctcggcatgctgggccaacgcatccgcgaacaggtcacggggtatggccggctcatcgtttttcgtcactggctgcgtgatattcagcgagccaagttcaagctcgtcgaccttgcgtcgaacattatccgcgctgaagatggcggtcggctcgccggcccgcaaatcaagaatatcgtcgacagacatatccgccgcatccggctcctgcggtgcttcgtgaaccgcatagccaaacaaatcaggcaccttaaggtcgagtggctttgccactggatcgtcgatacgaatgaagtccgcaggcacatcaccgaactgcatgcgcatgggagacgtcggcaacaggaactcgacattggccggcaagcgcaacaaatcaccattttcccgcaccacatacgatccattggtcgatccaagatcgcggaccgaagccgtaccattgctttttaccgtgaacatggcgtgccgtttggacatcgatttggtctgatcggcgacgtcaaggcgggtgttgccatcatcggcaagggggcgtaacggcttacggccgatttccacgcactcccccggcttgacgctgatccggtcgacaccgttgatcttcaccgtccactcgctcaccgtgaccgccttcctggacacactatttgaccacactacgtgccattgtgtcatcttttaccggcttttggcggattactgggcacagaattgacaactttcgctcattgccagctttgtgattccacgccggatcgcgttctccgcctcgccctcgtcaactagtctactcagtatgcggaaaccccgcagcctgaaacacaggtgcggggttcctcgaaaagctgtgattgcggcttatgccgcacaaatcacttgagctcgacggaggcaccagcctcttccagctgagccttggccttctcggcatcttccttcttggccttctcgaggacggccttcggagcgccgtcgacgagagccttggcctcggccaggccgagggaggtgatggcgcggacagccttgatgacctggatcttcttgtcgccgacggcggagaggatgacgtcgaactcatccttctcttcctcagccggagcagcagcgccagcaacagcggcaacagcggcaaccggagcggcagcctcgacgtcgaacttctcctcgaaggccttcacgaactcggagagctcgaccagggtcatctcgccgaaggcttccagcagctcatcgttggtgtacttagccattatggcttcctttcaatcttggc

SEQ ID NO: 3832 - DNA, 14150 bp, Unknown
  R35_2m  MAG No. k141_9866
cccccatccgttgcccaggtagcgggtgatgaaattgatgaaggtgtgctggctggggtcgcggtacatcatctcgccgatggcgcgcatcaggaagaacatgatgacgccgaccaggatatacacgaagacgatcgagggaccggtcagcgccagcgacttgccggaccccaggaacaagccggtgccgatggtgccgccgatggcgatgaactgcacgtggcggttgttcaggccgcgctccatctcgttggtccggtccaggctttcgacagacttgagtttgcccgtagcctgccgtgtaccaccattcacattcgtatcggccatactgatttcatttctcttctccgccgcccgattgttacgtaccggacgcgatactcgttcaaaacaagttcagactgtatcaccgaaatatgtcgcgaaaaccgctcagctcaagaatacatgcgatgatgctgtaaatattccgccaaaaagttcaatttaccaacaccaaattgaacttcgtgcgaattacctccctctgatgagggaggcggcacgcgaagcgtgacggagggagagactaattattgcccagataccggaggcgaaagcactctgatgcttcatctttgcgaccccacaccactgaccatctcctgcaacttttaagcgaatcgcaacggagccgccttcgggctaagctgccgatcaagtacagaaactgcagctccaagcgctgcaacatcatcacctacagcagtgggagataccttaaactcatggacccgccgcatcactgtcttagtctctaacataggcggaatttcggcgagcaacggctcttcgagttgtttccaattcggcccgccgaggactatatggtctatatcgaataaatcagagagaataacagccgcacgaccaatttttcgactagtctcacggagcacatctctgcacacggaatccccacactgagcttttaagcaaatatcgttaaaacggtcattaataacgaacatgtcggtcaggtcgaagccatctgcgtcatcatagacgccacgctgcatggcatctagcacgatggccgttggatcgcaggaatttgacacgcatccgcgttgtccgcaccaacactcccgcccacctgtgtccacgacaatgtgcccaatttcaccctcattaccggtatatccgcggtatacatttccttgcccagacacaccgaacgctatgccaaatcccagataaaagaataaaaaactacgatcggcggcacctcctccgacccatgattctccatgacatgcagcagtaacatccttttctagcattactggcataccagtaagttttgccagttcattagtgacaggaaccttatgccagccatttaaattcggaggatcaagtaccatattagtccgcaaatccaacggtccgggcatagcaatgcctataccgacgataagatcgcgatccaccttgctgaggtcaattaactgttcgcaagaatgcgcaagatcacatagcgcatcagtagcatttgcagatacaacaggatacgaacgagcaatgacctcacccgcaagattgaccaatacgatagtcgtgataatcggatcaatatgaattcctatggcatagcgaccattttcattcagacaaagtaaagtacgaggctttccccgctgcccggctgcagtaccggtctccgatataagctgctcttccaataatcgtcgaacaatattcgaaacagtctgcgcagttagaccagtgtgttttgcaatatcactacggctcagcccttcatgcttgcgcactgtctcaagcacaacacggctgttgtagcctgcgacagccggcatatttgttcctttacggaacgacggacgcacactatgcatgaggaggaccaccttccttgtaaaaattcttgcaacactgcagttcattgattatacggccacattaccaatagtcacagcacccgacgtttgtcgtaatgtttgagcgcgaaatcttggtttgttggggatgcggacgttttcttggatggtcatgcgaccagtccaaggcttttgcggtattgcacggggctttgccagcccagtgatctcttgatgcgcgtctcatcgtagcgggccaggtaggcggcgagccgttcgcggaattcccggtaccccacgcccctccagtcgcggcagcggaagaactcgttcttcaatcgtccgaagaatccctcggcggccgcgttgtccggactgcagcccttggcgcccatggaccgggtcagaccgtgctcctcgcagatgcggatccacccgggccaccggcagcggcacccgcggccggaacggaccgtgggacgctccccgtcgcgaagcgcggcggccgcgtcgagcggcatgccctcgctcatggccgcgtcggggcttcgcgacagccgccaggccacgaccatgccgtcgaagcagtcgaccaccggtgacggccggcacttgcagccgtccatggtgaaccgggcgacgtccgtgagccacggcgtgttcggccgctcggcgtggaagccgcgctccacgagcgctggccggcgcctcggacggctcgcccccgtaggagctccaccgccttgggtttccgcaggtgcacgggacgaagcccctcctcgcccatgatacggcgcacgaccttctccgaaacggccaacggctcggcgtcatccatgcgcagcagccggtggatggtacgcatggccccgcacgcggccgccttgctcgaacagaccgcgtatccgttcgcgcagaacggcgtgctcgtccccggcccgcatggccgcgcactggtagtagcaggtgccgcgaccgagcgtcacggcatcgagcacggcctcgaggccgaacccgcccccgatccgttccacgacccgcgtcttctcccggttcgccggcccgcacgggtcgaggctcgggccgccggcttttacaaccgcgaccgcccccgtcaccgcgttctccagaggcagcgcggcgatctgccgttccagccccatcggatcgtcgcgcccgtcgtgtattgattcaataggattttgaggttttagtcacgaagttttttcgggtttaggcgtggagcatgccgaccacccgcgtgccttatcttgatggtgcttagtcatgtatcaaggagggccggaaaggcaaatgatcagcatgcccgaagttcagtctattcgtcagttgcgaaggaacggggattccatcgcctcgatcgccaggaaggtcggggtgagcgagcccacggtccgcaagtacctgaaaatggaggacctgtcgccaaggacgccggtgaggaggcgccgcccgtcggtgatcgacgagtgggttcccctgatcgagcagtggctcgccgaggaccggggtcgtggcgcaagcagcgtcacacggccactcggatatgggagcgtctgcgcgacgagcatggcgcggaggtctccctgtcgacggtgaccaggacggtggccaggctgcgcgacgagcatggcgcggaggaacgctcctcggggttcatggacctcgtgtggcatccgggcgaggcgcaggccgatttcggcgaggtcgacgttcaatggcggggcgcgctggcgcgcatgcaccacttcgtgctggatttcccgcattcgaacgtcgcgccctcgcagctgatgcccggggagaacgcggagtgcacgtgccaggcgttggagaacctgttcgaatggctcggcggggtgccggagcgcatcgtgttcgacaacgctgccggcgtgggccgcaagcaacggttcgagaaggtgcgtccggcccgcctgttccaggcgttccaggcgcactacggattctccttcgcgttctgcaacccgcattccggccatgagaagggcgcggtcgaggcgaacgtcggcagggtgaggcgcaagctgttcgttcccaggcccagcgtatggaacctggagggattcaacgagaaactgcccgacaggtgcctggggcttggcgacaaggcgcattggaggaagggcgaacgcgaggccgacctgttcgagcgggatcgcggggcgcttctgcccctgccggcgaagccgttcgacgtggtgcgctgggagcggatgaaggccgacaaatacggttgcgtcacgctcgaggggtgccaccgctattccgccgaccccggcagcgcgggccgcgaggtcatcatcggcatacgcgccctggagatcgagatcctcgattcatcgggccggcgccttgcctcgcatccgcgcgcctacggcgatatgccgactgacagctccgacccgtcgcgccaattggagctgctttgcaacaggcccaacgcgtggcccaacagccgcgtgcgcgaagcgctgcccgacccgcttcgcggatggctggacctgcaggaggaaacggtgcggcgcgagggcctgcagaccctcaagaaaaccgacagggacaacgggtgggccaacgccgtcggggcgatgctccaggtgctcgaggccaccggcggcgtcgacagggccagcgtccagctcgccgcggccaggatcgccgacggcggcgccggcgtctcgtacgacgagccggtcgacctgagcgaatacgaccgggcgttcgccgacaccgggaaggagtcgtgatgacggacgacgcgaaacaagccagaagaaccgatcccgccgtcctgcgcgcccacgcgcgcggcctgttcatatccaacgccaccatggacgacttcctctcctgggcaacgccccggcagatcgacgccgccgaccgcctgctcgccacggaactcgccaaccgcgaggacgccaaacgcgccaggctcctgaggcgcgcccggttccccgtgcccaaaagcctggagggctacgacttcgcgaacgtgaaactgcccgacgggtacacgcgcgaggaactcctctcattggacttcgtccccaaggcccaggacctcgtgttccacggcaggaccgggcgcggcaagacccatctggccaccgccctgggcatgaaggccatcgaacgggacatgagcgtcaggttcctgcccaccgccgagctcgtgctccagctcggcaaggccaaacgcgacggcagcctcgacgccatgctccgcgacatcgacaaagccgacctgctcatcctcgacgagttcggctacgtgcccttcgacgtcgacggggccaggctgctctaccggatcatcaccaactcgtacgaaaggaggagcatcatcttcaccacgaacatcgagttcggcaaatggggcacggtcttcgccgacgacaaactcgccgccgcgatcatcgaccgcatcgtccaccacggacggctcatagaattcaccggacagagccaccgcatcagccaggccctcatgttcggcaaaccacaaaaccaataaccaaccaccggccggcacgccccgcgcccaaacccgaaaaaaaaaatacctgactaaaaaagaaacgccgacttgactaaagacaccgtcgtccaccgccggaacccgtatgccgtcgcccatgttcatgagtccgccgattccttcccgtccgtacgcaccggcccgcttccgcacgctcgtcgccgagcggccaacgtccttggcgacgtcgacgcaacactccccggcgatgacgcgtccggcggccctggccctgacgtcaagcgtatacggggggggggaacggcgaccatgccgcggatcccgggccatccagttcgtcaggcacccctcggacgggtaccccagctcggcgatcaccttcttcagcgtcacgcatccccggaagcacacgtcgacggctttccgcctttgcgcctcgccgaacacagcggactccaatccggacactcacgcgtccaacttttcgtccgcatccccaacctcgcaccaaagatgcgccgcccatcacagatagaacggcgcatcactaatctcaggtaaagcagaaatcaatttagggcaaaccgaagagttacaatttggaacggatgtagctccagttctacattggattgaaccctgctttcatccactactgcgggacgaactgcgtcgcatgcacgctccaacaatccagtctccgtcacgctcttccaaccaaatccggtatgcagcacaaccctgctttgagaaccatacgcctcatacagtcggacaattacatcaccggagcggtcctcagccatctttactgcttcgacaagcacgccatctccttccaccgacacaaatggcgctagcgcatgctctccatggactgcgcgcgcagggacattaagacggtacccttgggaaatcgcacgatcaacgctgcttcctatggtgaaagacactgcaaaatcatgacttcccacatcagctcgaggggccgggaagtgcggcgcacgcaacaacgataggcggattctagttccgggacgtccatcactcataatgatttgtcggatatcgttgccgtaattagtcatattagcgatgccaacaccgaatcctccttcgctaacatacacccaccgatgagccaaggtctcgaaccttgcctcgtcccaagtagtgttgcgatgaataggtcgcgtaatatgaccatactgaatctcagacttggcttcagtcgcatataccttaacagggaacgcctgcttaaggagcctatcgctctccttccattcaatatgggtacgaatagtcaaagcatccacatcatcatcgagagcaatggtctggctgtatggggaagaaccaatgacaccattgaccaccatcgttccatctgctccaagatcaaccttggacaccacggtctcgtcaagaagacaacgctcgtaattcttctcaatgtcccaggcgtcccactcggccggagagtccacgaacaattgcaactcattgccaggttgcatcggatcaatcgtctctcgtccagttttgagatcgaccgcagagattatatggcccttgccatcaagaacgaacgagacacgttcattcgccatgcgaatactgccatcatccaacatgcaaacctttgacgcgataggttcaacggcaacatcgatgccgcctgcaggcacaccacattgtataagaggggcagcattagcaaacatcaatttgtcaccgtcaccgctaattgcatgaatggactcactgataaccgattcgagtcgatgctccagctcacggtagttgcgttcaacttcgctatatacccaagcaattgccgatccaggaagaatatcatggaattggtaaagaagaactttctgccatatttccgatatctcttcatatgggtacgccttcctcttcagcacagttgcggcggtcgcccatagctctgcctcgcgcagcaaagattcgcaacgacgattaccgtacttggtatgagactgagatgtgagagttcctcgatgcaattcaagatatagctctccatgccaacgggccggatctcttaattcgcgctctgcctgctcgaagaattccatcggcgtggcaattcgcaccttcggagatccctctagattcttttgcagacgcgccgcctcaagcatctcacgggtaggaccgccaccaccgtctccccacccaaacagcatcaggctcgacgatcctttccctttttcagaatattgaatctccgttttcgccacatccgcagcagacatgttggaattgtaggtatccgatggagggaaatgcgtgaaaatttcagtcccatcgatgccttgccataagaatgtatgatgtgggaatgtattggtgtcattccaagaaatcttttgcgtaaggaagtacttgaaacctgcaagacgcgcaatctgcgggaacgcacccgagtagccaaagctgtcaggtagccatactactggtgaacatccaccaaggttctcctcgaagaatcgaacaccttgcaaaaactggcgggtcagcgattcgccagatggcatattggcatcgcattcaacccacataccacctacgggaatgaacttgccctcggcaaccttcctcttcacctcgacaaatacctcgggataattctccttgagccacttgtactgctgcgcggaagatgcggcgaacaccaaatccttatcttcatcggacaattccacaacgttgctgaatgtacgagccaccttcctttttgtttcacgcaacggccataaccaagcagtgtcaatatgtgcgtgtcccacggcaaatgcagtgtgccctttttctggagctgtggcagaaagcaccttaacaagagcatgccgaaccttaggcgcacttccatgtacgtcgttcggatcaataagatctgcagcttgctcaagagcatgcataatatccgcatgcctagtgcgttttggatccacctctttagccaacccagacagaattcgtagttcttgggtgagatgccacaccccaaggtccaataatgacgcatcaagacgttgcatccggtaaagttccggaccatctttgacaccttcatcgcccaaatcagttggcaaatacgggaaacctggagtaatttgcgggttggcggccgcttcaatatagaagtcaaaattttcaccaggctccgggagcggaacccatgcattatacggttccaaagccttgactacttgtccgtccgaggtacgtactaaagcttccgcttggaaacctgggcccaaaccaatacggccaagatctacaactagttcgggcctagtaccttcaatccccgcccaagactcaggtacattacctgtaacgtggaaccaccaagtgtcccaagccgcaccccaagactcgcccacattaaagttccggtactcagccgttctggcaattgcgaacggcaccggctcacccccaactttccagcaggttatggatacgggaacactatgcaagtacatagcatcagtaaggtgctgactaattgcgcgctctatgcgcatcgtcactttttcatcatatgtcatctttgccatgattttcctttcgagaatatagtcgctatacaaataatgcgaaatcctggaatgccttatcccttaacaccaccagccagagagtatgttcccaagaatctgttagagatgatgtacataacgacaacagggatggagtagataagggaaaatgcagctaattggccataagcgacagtgccatacaatccaaagaacgagtaaatggtgactgcggcaggttgcttactcgaagacatcagcaacatatagggaacgaagaaattgccccaagctccagtaaacacataaatactgactactgcgagtcctggtcgcatgagcggcacaacgacactactaatcgatttaagcaagctggcaccatccacccatgcggcttcctcgagctcaatggggacagagtccataaagttcttagtcatccagatagccataggcaaagatgacgccgacatgaatagtatcgtaccgatagtggaatccaacatgttcatagaaacaaacagtgcatacaccggcaccataaggcatgaaatcggaaggcaagtgccaaacagtactgaatacaggaatggcttattgaacctagactgataacgagatatcggatatgcagtcaataccgcacagaacaacacgatgattgtagtggaagccgataaaacaaaactattccacagaggaaggaaagtcagatccttcgtcataatggccgagaaattcgccccagtccagtgagttggcagtttcgtctcaaatgttgcactagtatcaaatgccgcaaacaatagccacagtaatggcaataagaataaaacaaatacaatgcccatagcaaagtaggcgaaaaatgcagagacaccacgccttggtgaattgggcgtttgcagccgtggcctatgttcggaggtcttcgatatagcgattgcattactcattggtgactcccttctcatccttcagagcgcggatataaatcacaccgaagattgcgccaataaccagcatgacaacggcaatggcactgccatatccgatatcgccgaacttaaaagcagctttatacgcgtaaatgggcaacgtactgctcttcacgcccgggccaccggcagtcatcacgaagattaaagtgaatgcagacatagtctgaagggtgatcagcatcaagttggtcataatggtttgcttaataacgggaaccgtcacatgaataaatgtctgccacgcattagctccatccaccacagatgcctcaatcaaagacttatcaacttcgccaatggctgcttgataattcatcattgagaacgccgtccctcgccaaatattcgcaagaataaccgcaaacattgggaaggcatacaaccaatcgcgctgcccaagtccaatcacaccaagaatttggttaagagtaccttcacgagaaaagaaggcatagcacgcaaaaccggccaccatctctggcaggacccaagccgctatgacactaatactgacaaattggctcacaactttgttggcgcgcgacataagaacggcaaccaccatacccaataaattctgagcgataatagcactgacaagcacaaaaataatggtcagccatacagaattcgggaagtctctatcagtgaacatatgcatgtaattcttcataccgacgaattgcgcattgactgcattaacccccgtaagtgacgtattggtcagcgacccataaaaagcccataatattggccctaccatgaaaacacacaacagaatcattgagggcaatactgtccaataccgtttggcgaatttcattttcgttcctttgcctataaaagcaccgtaaacatggaccgcggcggcatcagaatcatcggctcaatctgccgccgcgtcgcacgcctaccgcatcatcacttagttacgacattgtctttgccgacaatgttgataaccgcatcgtcatatgcctttgcggcctcatcaacactcatctgcccagtgatgacattctcagtggctttctgaacctcagaggaaattttggtgtattcagtaacgctaggacggaagtgcgtgtaattcacggcttcagtggtgatctcctgataagggcttgcctcaaggtagctaggatcttcagcgacatcggtgcgaacagcagtaagcaccatatctttcgcataggtcagagagttgtccttattagtagcttccttaacaaaatcaaaagccaattgagcattcttagtcttggcaccaacagccatcgtccagccaccagacatagacacatatccaggcttttcgcccttctgagtcgggaagagtgccgccccaataacatcggtatagtctggccattcgtaggagcctccgatcgtccaagtggacggcatccaacttccatcgacagcaaatcccattttatccttgggaagataatcgctgccgactttagctccatagtttgcatcaagtacttcagatgcactcggcgtatatcccttgtcataaatcgttttcatgaattccagggaatctttcataccttgtgagccaatgacccatttctcacttttttgatcctgaagggcgtcatcaccagcggacgtcccgaacaacaattcgtagaaactctgcatgactgtaccttcaccggaaggagtaccggcaagcatgctcattggagtgacatcgggtagttttttcttgattgtagccgccgtgtcaaggatatcttgccaacttttaggctgccaaggaacaacaataccagctttttggaacacacgcttgttgtaccaaatcacacgtgtatcggtgctcagaggcaccgcataggtaccatctttacctttgccaactttcttagcagcatcggaaaaatcattctgccagtcatcccacttggccaaataagaatcaagattcaacagataacctgcatcagcatcagcacgaatttgtgatgaatcttcatagaacacatctggggctgtttccgcagaacgttgcgctaatgcaagttttgttttgtaatcgttatcgttcgcggttacaggttgtagctcaaccgtcgtaccaggattctctttttcgattttcgccttcaccgtcttcatcagagcatcaaaacggacaaacgaatccgtcttgtaatacatcactttgatggtattggcatcggcagaggcactactcattccacagccggataatgcgaccatggccgcaacggctacagccgccgctttgaagagttttcctgtaatcatatccttgctccttcgctcggttgcgtctcctattggatccgtgtctccatcgacaaatttattaaatcatattgatttaataatgtcaaggaaatgaatgttgacgtataaattttggctcttcgggtgtttgtgtgggtgtgggtcactggtctggcttacgggttattggcgtccggggagttggaggttgaggccgccgcatttgagcatgaccggggcgatgaggttgccgaggttcctgtagccgcagcccatcttgatggtggtcttgatcttgttgttgacggcctcgagcctggcgttggataggccggatcggatggtgcgcaggatgtcgaagcggcggcggtcgatcttctcgccgagtttcgagaactcctcgatgtggattggcaacggtgtgttggacggtttcttagaggacgagtccttgttcggtgaatcccttcgggctccggtatccgggggtggagtggagccgctggttgccggaccgccacacgtagtcgttgaggtcgcgcctcagctgctcgatcgtggtgcagtggttccggtacgcgagctccttcttcggcggcctgttcgtgttcgcgcatgatgccgccgacgcgcctcctggacgcggtgacgcccctcctttccggggcggccttgaccttcccggcgccgcagcgctcatggccgtcgcgccagaccgcgcgcacgtcgccggcgatcgggtccacccgcccggcttcgggatgttcgatcatccagtagcaggtggagcgtgggacgcccggcatcccgcatcgcgccgataccggataacgggaggcgttggcccgtatcacgcctgccttcgcgcgaataccggcgccgcttgttctgaaacgtccacctccatctccaaccgccggtcgcgcctccccggcccgaccggctcgttctgctcgggtgtgcggttgtcggcggctttcgtggagccgcggttgcggatgccctggacccaacggtgcagcgtggaatgcgggatgtcgtactcgtccttgatctcgcgcgccggcttgccgttctcgtaaagctgcacgatctgccgcttgaacgactcctcgtagtggcggggatgcttcgggccggccatcgtcggcctccaacctcatgtcaatcgtcccccatcggactgtctaatacattgcagccaatccatcagcgccggcacggcgctcctgggcgcgtgctccaacaggagcctggcgcagccgatgtcgagatgccgccagcggcacacgcccagacggtcgtacggccggccatgctccccgcatctggcggcaccggcccatgtccttcgcgtacgggcgcaccgggacgatgacgacgccccctccgcgcgggtccttctcgatgcgcggcacgccggccacgacgttggcgggcaggcccggacactacggacatagccgagacgctacccagctatactccgcagccgtgaatagtaatcgttgagcacgaaagcccgatcgttgattccagttgaaaatcgggtcttcgcacgcttggaacgaaatgcacactttacttacagacccacaagataaaccccccaacgccttggcctaacgggctggacaatacttcgactctcctatgtcaattctggtttaacagagacttttattacgcctgcctcaccccagacataatcaacaacaatgagacttattccacggacttgagcgagctgaccgggtctacgcgatcgagcactgggttggtgaacagctgcaccagcagcgcgaacgccagcgtcgccaccacggcaatcgcatagctgtaccagtgcacttccacttcgaaatac

SEQ ID NO: 3833 - DNA, 3882 bp, Unknown
  R35_2m  MAG No. k141_10071
gagagcccgttcccggctcctgctcgcttagctcttttgccagctcatcgtaatcggtatcggtggtcaggtacttgagctttcgggcaattttctgctgttttgctttttgacgtccgcggcccatctgaccccctgcgattactgtgctgttcgattcatcaacaatagagagtaccactaatagtggcttgttcgttgtcggctcacacttttaccataaaaagcgtttatctgagccctatttaaaggattttcgcatgaccgacgagcagcaactgacagcggcaggcaatgagataagcgcgagcttcctcgcggccaaaaagcgttcggacgaaacgctcgccaagctggaggccaagccgtcgtccttcaccatgttgaccggcgaccgtccgaccggccggctgcacctcggccactacttcggctcgatccgtgagcgtgtcgccatgcaggagcgcggcgtcaacacgaacatcatcatcgccgactaccaggtgatcaccgaccgcgacaccaccgagcacatccaagacaacgtgctgaacctggtgctcgactacatggccgccggcatcgatccgaacaagaccatgatgttcacccactccgccgtgccggccgagaaccagctgctgctgccgttcctgtccctggtcaccgaggctgagctgcaccgcaacccgaccgtgaagtccgagatggaggcgtccggccacgcgctgaccggtctgctgctcacctacccggtgcaccaggcgtgcgacatcctcttctgcaaggccaatgtcgtgccgatcggcaaggacaacctgccgcacgtggaaatcacgcgcaccatcgcccgccgtttcaacgagcgttacgccaagaagaacccagtgttcccggagccggccgccattctgtctgaggcaccggagattccaggtctcgacggccgcaagatgagcaagtcgtacggcaactccatcatgctgggcgccaccgccgaggaaaccgccaagctcatcaagaagagcccgaccgattccgagcgccgcatcaccttcgacccggttgcccgcccgcaggtctccgccctgctgaccaccgccggcctggtgaccggccgcgacccgaaggacatcgccaaggagatcggtgattccggtgccggcgcactcaaggcatacgtcatcgaatcagtcaacgagttcctggccccgcaccgcgagcgccgcgccgagctggccaaggacatggattccattcgtgacatcctgcacgacggcaacaagcgcgccaacgccatcgccgaggagaccctcgaccaggtgcgcgaggccatgggcatgaagtactgattttcccgccgctcgtagcaagacgccgtgtcagccccaactgggcaactgacacggcgttttttgtattgcggcgtctgctgtgtcctatcttcacttcgaggggcggatttcttgttttccggaggtctatctccgcttcgaggggctgttgctcaagtaggcgaggcacaaaaacggcggaatgacgttggcgtgaatgggattttatctgagattgagcgcatgaccagccccttgaaacggagatagacctccggaaaggctcaaatccgccccttgaaacggagaatcaagcgttagtaactctcaattcaaaaaacacaacatgttttccgtgcaacgcggctatcaagacggacctctggtcacttcatgccgatggcttgcatcaatacgtacgctccccgcacagcaatgtcattacgacgtgttgcggcatagcgcgcatggcttccggagtatcggcggcgtatgggtcggcgtccaacaacaccatatcggccgggtcgccggatgcaaggcggtcacggccagtggcggtcgaggctgccagcgaggtgcgtacatcgaggcactgctcgggctggaacggctcgcggtcagagctttcggagccgaacacggcggcggaaatggccagccacgggtccagcggggccacgggcgcatccgagcccatgcgcagcgtggtaccgacgtcgtggagggccctgaacggataagggatgccggccgggttggcccagaaacgggtgatgacgtcgcggtcatccatggcgtgctgcggctggatactggccgcgagccccagctcggcgaaacgcgggatatcgacgggtttgagcatctgcgcgtgctcgatcgatccatgtgcgtgcgtggcagcgactgcgttgagcgcaatggtgttcgcttcgtcgccaatggcgtggcaggcaatgtcgaagccatgctcggcggctaggcgcatatagtcttcgatttgctgcggcgtgtagctcagcgtgccatacgtcggcggctcgatgcccgaatacggcgtggagcagtaggcggagcgggtgttgagcgatccgtccgagatgagcttcatggcgcccacatggccgagcccggcgctgcccggcagtgggttgccggtatgccaacccgcgtcaatggcggcttgcaaccgctcggggtatacaccagcgtccacgcgcaaaccgttaatgccggccgcgaaacgattgatccacgtatcgatgttttcggccatttcataatcgcggatgcccaccacgcccttgcttgcggcgtcctgttcggcctcgcgcagcagacggtcagtctcttcagcagcgcccggcaccttgtcgaaggcggtgtaggcgttgaaccattcgagttcaccgaccagaccggattcgtccacatgtacgccaagcctgcgggccgcggcggagttcacccatccgcagtgcatgtccgcgctggagagggccaccggctgttcgccggtcacggcgtcaattgcagccagtgtgggctgctcgtcgtcggcccacagcgagtgacggaatcgcatgcccaccacgaaggcatctgggtcaagtgtgccggcggcgcggcgctcatccagatgacggcgcaacatgtccatcgcttcggcggcggaacgggcattgatgaggtccagtcggcccagcgtcttagcccattgcgtgaagtgcgtgtggcagtcccacaggccgggaataacccacaggccgtcggcgtcgatggtggtttcgtcagcaggtgcggaggccgacgttgggattgagacgctgccagaagcaatggcattcgtcgcgtatgccaacgatgtcgtatgcgccttagtctgcatcgtgccgtccgaagccgagaccgttccagcagggccgacagacgcaacaaccccatcgcgaagcaccacatccacgcggtcctgagaccccggaacaccggcattgacaatacgcaccaagctactcatacccgccatcatgccacctttgcatgaacgccatggagattcgttcaagctgaatcgcgccgtcggcggcgattcccgctggctgcctgcaaacccctacgttccatgtaattgcgggatggcctgcaactgcgatgaacacccatagtttatccaccgacttatccacatttatccaccgaaaaattggggcggtagacaaggccgatagccggactctacactgcgaggacaaagcgaacatcacgaaggggtgatcatcatgggtagctcaacggcattgaccgagctgacaatgcagaagtatcaacgaatgcagacgtgcgcagatgttcaacgacgaagcgcatggcgcccaccttatgccctgacaacagcgttggagcttttgatgctcctatacattgtcaagcgtttgggtgtgttgttttgggttggttgtcgagtgtatccactggatggcccgttgctcgagttcgggaaggtcgcgtgcgccgcgttcgatctcgctgatgcggctcgagggca

SEQ ID NO: 3834 - DNA, 25930 bp, Unknown
  R35_2m  MAG No. k141_10083
agcgtagcaatgtgttcaaacatacagttgcccccgctggcgagggctgtcacatggagtgtgactgaggacagtcctttcaaagaccactcccagtcagctatgccgacagcctcgcagcgggggcgactgagtaagaatcactcgacggtgttcttcgggacctcgatgccgttgccgaacttgacatcgcgggcggcagccacgcgggacggcaggccgtagatgtcgatgaagccgttggaggacttctgatcgaaggtatcgccggaatcgtaggtggcgagcttgtagtcgtacagcgaggagtcggaacgacggccggtcaccacagcgcgaccgccatgcaggaccatgcgaatctcaccggacacgtacttctgggtgtcctcgatgaaagcgttgagcgactgggtagccggggagaaccactgcgcatcgtaaaccagctcgccccagcgcttgtcgatgtcgcgcttgatgcggtgctgttcgcgttcgaggcagcagttttcgagttcctggtgagcggtgatcagagccacggcacccggagcctcgtacagctcgcgggacttgatgccgaccaggcggtcctcgatgaggtcgatgcggccgatgccctgggctccggcgcggcggttcatctcttcgatggcctgcagcggggtgacgtcacgtccgtcgatcttgaccggcacaccttccttgaactcgatgacgacttcatcttcgaccggcgggaaggccgggtcgtcggtgtaggagtagcagtccttggtcgggccgttccacggatcctcaaggaagccggtctcaatggcgcggccccatacgttctggtcgatggagtacggggacttctcggtctgggtgatcggcagcttgtgctccttggcgaacgcgatctcgacatcgcgggtcagggacaggtcacgaatcgggctgatggccttcagcgtcgggtcaatggaggcaatggagacctcgaaacgaacctgatcgttacccttgccggtgcaaccgtgggagatggtgtcggcgccgaactggtgggcggcgcgcacgaggtgcttggagatcagcggacgggagatggcggagaccagcgggtagacgccttcgtacatggcgttggccttgagggccttcatgcaatattcgttggcgaactcgtcacgggcgtcgaccacgtaggattcaacggcaccgcaggcgagggcgcgctgcttgatggtctcaaggctttcaccaccttggccgacatcgagggacacggccacgacgtccttgccggtgcgctccttcagatacgagatggcgacggaggtgtcaagaccgccggagtaggccagaacaatgcgcttgttatctgccattggttccctttcattcaaggtctgaaaaacaaactgatgcaagtatatacagaggactgtatatttatgcacggcgtgttggttatttggaagcgaggcttagtagccagtcggagcgggagacggcggtgtcgtcattggtgcaaatcaccatgacggtgtcgtctccggcgatggtgcccagcacgccttcgatcggctgcctgtcaatcaccgaggccacgtattgtgcggcaccggaaggcgtgtgcaccacaaccagatttccggcggcggccaccgaggtgaccagtccgttcagcacgcgggacatctgtgcctcaccgcgctcccctacatcctcaccttccgaagcaacgacgctgcgacccaccgtgtaggccaccgtgccgtccttcagccgggtcttcaccgcatgcatctcatcaagatcgcggctcagggtcgcctgagtcaccgcaatgccctcgtcgataaggattttggacagctgtgattgcgaggtgatgatatgcgtggcgagcgcctgttctatggcactcagccgcgccgccctggtggcagggcgctgcagggacggaccggtttcactcatgcgagcaggctttcgtctccacgggccttgccggtcaaccaagtcagcaacgctttctgtgcgtgcagacggttctcggcctcgtcccacaccacggactgcgggccgtcgatcacttcagcggtgacttccttgccgcggtaggcgggcaggcagtgctggaagagcgcatccggcttggccaatgccataagttcggtgttgacctggtaatcccagaacggtttggagcggatggcgtattcggcttcctcgcccatggagacccaggtgtcggtgaacacgcagtcggcgtcctgcaccgcttccttggcatcggtggtgaccaggatggagccgccggtctcggccgcgacgcgcttggcgtcggccacgatgtccgggcggggcaggtagccgtgggggccggccacgcgcacgtccatgccggccacggcaccgccgagcaggtaggagttggccatgttgttggccgcgtcaccgaggtaggcgatggtctggttcttcaggttgtcgacgccgcctcggtgctcggcgatggtctggaagtcggcgagaatctggcagggatggaagtcatcggtcagggcgttgaccaccggatgggtggagtacttggccatttcttcgacgcggtcctggccgaaggtgcgccacaccacgccgtaagccatgcggtcgagcacacgagcggtatcggccacgggctcgccacggcccagctgggagccggacttgtcgatgaccagcgggtagccgccaagctcggcaacgccgatggagaagctggaacgggtgcgggtggatggcttgtcgaacagtacggcgacggcctgcggaccggcgaacggctgcttgtagaagcggtcatggtggaacttgatggcaagttcgagcacctgcttctgctcctcatggttgaggtcgtcgtcacgcagcatgtggcgaagttctggggtcatgatgatctccttggatcggtgggtcggcagtgacggagagaaatcagtcgtcgggcaggtccgtaggcacatccttgaggatggcaagtgcctgatccacgtcttgaacggttacaatcagcggcggtgcgaaacgcagcgcattgggagccaccgcgttgacgatgagcccgtgttcgaggcagtagttcatcaccgcgtgggagcagggatgcttgagctcgacggcgtccagcaaaccacgaccgcgtacggaaacgaacagcggattaccggtggccataatgccatcgcgcagctgttcgccgcgagcttcggcgttggccaccagattctcgtcttcaatcacgccaagagtggcgagtcccgcagccgcacccagcggattgccggcaaaggtggagccgtgggaaccaggagtgaacagagccgcaagtttctcgccgaaagcgatcatgccgcccatcgggaatccgcctgccacgcccttggcgaaagtcaccatatccggcgtcacgccgccggacagatcgtcacgctggaatgcgaaccacttgccggtacgtccgataccggtctgtacttcatcgatgatgagcagcgcgtggttgatatcgcacagttcgcgcacgaacttgacgtaatcggcgcccaacggctgcacgccggcttcgccctggataagttccagaatcacagcagccaccggacccttgccatagcggccgagaccggtctgtgcaaaagcgtcgtgcagggcgaccttgtcgccggcgcgtacgaattcgatgttcggcaccagcggatcatacggcttgcggataccgggtttccatgtggcggacagcgcacccatcgtacggccatggaagccgtgagtcattgcgagaatgcgtgcgggcttgccgccgatggaaggcagggcaccaggcaaggtgcggccatacagcttggcaagcttgagggcagcttcattgccttcagcaccggagttgccgaagtagactttggagccttcaggtgcaccagccagcttgaccaatttggatgccagctcaatttgcggctcggacgcgaaatagttgctgatatgagccaccttggcagcctgatcggcaaccgctttgacccacttggggtgggcgtatccgagggaattgacggcgatgcctgccaggaaatcgaggtattcgttaccgtcaacatcccagatgtgggcaccttggccgtgatccatgacgcgcaacggcgtaccgaacacattcatgtggacctgagagtactctcccagccacttgctgtcctccgtacctagtttttcctcatgctcagtagccataagagctcctcatttccagtccttcatcgggcataaccatggtaccgatgcctgcggaggtgaatatctcattcaaaatcgaatgcggcttgcgcccgtcgatgatatgggcttggggcacgccaccgtcgatggccctgacacaggcctccatcttgggtcgcataccggattccaggtccggcagcatatcgcgcaggttttccacaccgatccggccaatcagagaattcttgtccggccaatcggcgtacagaccatccacatcggtcaagataacaagcttgcgtgcgcccacagcggcagccaaagcggcggcggcggaatcggcgttcacgttgagcacttcagtggcatcttcttcgttcggagccacggaagagacgaccgggatacgaccggcggccaccagatcctcgactgccgaggcatcgacggaaaccacatcgccgaccaagccgatatcggtgggcttgccattgatgatgggcttgcgctgcatggccgagaacaggccgccgtcttcaccggacaggcctacggccagcgggccgtgcgcgttgatcaggccgaccagttcgcgtgacaccttgccggtcaggaccatgcgcaccacgtccatggcctcgggggtggtgaccctcaggccgcctttgaattcggatttgatgccgagggccttgagcatgtgggagatctgcgggccgccgccgtgcacgacgatcggatgcaggcccacctgacgcaggaagaccatgtcttcggcgaagcactgcttcagatggtcatcgaccatggcgttgccgccgtatttgacgacgatacgctggccggcgaactcctccagccaaggcagcgcttcaataagcacttctgccttctgatcggcgcgcaaatcggtgtgcacgtcgaaatggaacccaggtcccttcaattctgtagccaatttttctcttttctgcgacgccggcgacgctatcgccgccggctgctacaaacagcccactgggctgtttgcgttatatgcgacgccggcgacgctatcgctgccggctgctacaaacagcccactgggctgtttgtcagctttcgtagtcggcgttgatgtggacgtattcgtgggtgaggtcgtcggtccagacggtggcctcggcgtccgagccggtgttcaggtcgatgtcgatgtggacttcgcgcggggtcatgtcgacctcgctgcggtcgcggccggcgccgccgttctcgcagatgcgcacgccgttgacgtccacggtcaccttgttcgaatcgtaaggcgcgacttcaggcggcacagtgcccagggagctgacgatgcggccccagttcggatcgttgccggagatggcgcacttgagcaggttcgaggcggcgacggcacgaccacaggcaagtgccgcgtcttcgctggtggcaccggtgacagtgatgcgaatgtcgtgggaggaaccttcgccgtcgccgatgatctggcgggacagggagacgcaggcctcacgcaccagcttgttgaattcgtccttgtccggttcgacgccggaggcaccggaggcgagtagcaggaccgtgtcgttggtggacatgcagccatccacgtcgatgcggttgaacgaatgttcggcggccacggcgagtgcggcctgcatctggccggcggagacgaccgcatcggtggtgatgacgcacagcatggtggccaactgcggggcaatcatgcccgagcccttgaccatgccgccgatcttccagccgttggagccggtcagttcgaccgtcttcggcttggtgtcggtggtcatgatggcgtgggaggcgtcggcgccggcttcggcggtggcggcaagagcctcatgggcgctcttggcaccagccagcacgttgtccaacggcagcagttcaccgatgagaccggtggagcagacagccacatcattcggttcggcgccgatgagaccggcgaccgtttccgcggtggcgacggactgggcgtaaccggcctcgccggtgcaggcgttggcaccgccggaattcagaatcacggccttgacgtgaccgtcggcgacgaccttacggctccactgcaccggggcggcacagaaacggttcgaggtgaacacgcctgcagccgcgtcgagcgggccgttgttgaccacgagggccaagtccttcttgccttcgacggatgaaataccagccgccacgccggcggcggagaaaccttgtgcaaatgtaacgctcacggtgctactccgatcttggtcaggcccgcgtcttccggcaggccgagtgcgatgttcagtgattggaccgcttgtccggcggtgccacggttgaggttgtctatggcggcaaaagcgtagatgcggccggccttgcggtcggcgacgacctgcaggtgggctgcgttggatccgatgatgttgccggtggcggtcagtgtgccctcaggcagcagcaccatgaagtcctggccttcataggccttggaccatacggcgcgaatctcctcatcgctcagtgccttggccttgtccgtcatgcgggcggacacggtggcgaggatgccccgggacatgggggcgagaatcggtgtgaagccgagcgtgaattcgctggcttcggccgcgcgcttgccggccgcgtgggcgaagttctgcaggatttcgggaatgtggcggtgcttgccgcccaccgaatacggcagggcggattgcagggcctcggcggcaagcaggttggtgcgcttgagattcttgccggcacccgagtatccgacgaccagatcggccacgatatcctgcgattcaaccagtccttcggcgatgccgggctggagggccagcgtggtggcggtgacgttgcagccagggcctgcgatgcgcttggtgccaggaagcgccgcgcgctggcgggtgtatgagccgtccgcggctttgccggtgatgagctcgggcatgccgtaggtccaatgctcatagaaatcgccgccgtagaactcatcccaagcggcctgctcttcgagacgatggtcggcgcccaaatccacaaccacggcatttggatcgagctgcgaggcgagcttgcccgaagcaccgtgcggcagtgcgaggatgataacgtcatgcccgttcagcacttcgggcgtggtatcttcgacgaccagattggccagttggggaatatgcggcatgtgcttggccatcgactcccccactgaggaatggcctgccacgcaggtgatgtcgaagtcggggtgcgcggccagaatgcgcagcgcttcaccgccggcatagcccgtggcaccggccacggccactgtatatttcgccatactcatctcttttcactgatgtgtcttgggatgagtatacgcgattatgcagactattgcatatttatgcagtgggtgtgttggtatgtgaacgccacttatgcggagatggagtcggaggaggagccggtgccgccggtgagttgctggagggcttcctggtagaggctcatggcgtcatagccattgaaggccatccagatgacggcgatggtgtatagcacgttgatcaccacggcggccacggccaaaccgaagcccttcatatggaaggtgcgcgtgcgccacattgccaccgcgcccatcagtgccgagagcaccggcacagggaagaacagggcgaggataaaggagatgatcgcatacgaatcccagtgcccgtagagcgggttctggtttggatcgttcaggtcgatgccgtggtaataatgcggctggtgaggctgaccgttcggctgttgaccatacggctggccctgcatgcccgggtacccgcccggatatgcgcccggaccggactgttggccgccttgagcatacggccagccgcccgcctgctgattgccgggccacggcgtctgctgaccgtacggctggccggcctgctgggattgtgccgcgccaccgttgttgccagcggctgcggcggaatccttcttggtatccggctcgggagcgccataaatatacgggttgtaattcggcccgtattggccagacatagcaccatattcaggctgctggtactgcccgtatttcggcttgtcctgctccggttggctcatggcgctcctcgattcggatgattggttgggtcaggcgcgcagctgggcgccgatttcggcggcctcagccacgatggccttgcggatggcgtcgctgtcttcggcggacagcgtcttgctcggcgaacggaacaccaccgcataggccagggacttcttgccctcgcccacctgttcgccggtgaacacgtcgaacagttcgatggattcgaggttcgcgccggcggccttgcgaatcacgttctcaagctggcctgcggtcacggtctcgtccactgtgaaggccaaatcctgcttgaccggcgggaacgtggagatcggcttggcctggacgggcttaccggtcagcgtggcgaacagcgcggtgaggttcagctcgaaggccgcggaatgggccgggaagccgagcgcctcgttgacgcgcgggtgcaattcaccgacccagccggtgaagacgtcgcccaccatgacgcgggcggcacggccggggtgccactggacgggcacatcgtcggcggcgggctggtcgagaacaatcgcggcaccgatacggccggcgatgcggcgcacggcctcgacggcgtcggaccagtcgaccgggcgcttgccgcccatccagccatcgtcctcggccagaccggtcaggatgccggccacatggtcgggctgttcgggcaaaccggcgtcaagcgcggcgagctgttcgtcggtggggcgcacgccgccgggcagtgccgggatggcgggcgcgttcggatcccacaggtagacgtggccgagctcatacagggacacgttttcgatgccgcggcggatgttgcgctgcacggtggtggccagggtcggcagaatctcgcgacgcaggtacggacggtcgccgtagagcgggttggcgatctcgacgctgaccttcttggtggcttccgggtcgaagccgaaggccttgtaatcgtcgtcgcccacgaacgggtagctcagcgattcgaccatgccgaactcggcgagctcgtccgccacgcgacggcgacgctgctggtccggggtcaggcccaccagaccctcgaccggtgccggcggcacggtaatcggaatctggtcgtagccgacctgtcgggcgatttcctcgaccaggtcgcacggctcgttcaagtccggacgccagctcggcgcggttacggcgaactcgccgttgccgccgccggccaccgtgcagccaatgtcggtcaggatgtcggagatgcggttgatgtccacgtcgaggccggccacgcgggccacttcggaggccttgaagtggatgaccttggcgcgcggcgtgttgttcacgtcgttcgggtgttcgctgggctcgccgttgccgtacttggccatgagctcagcggccatctgggtggcggcgggctgcagcgcggtgtcgatgccacgttcgaagcggcgggaggcctcggatggaatcttgtggcgacgggccgaacgggcgatggtcacctgatcgaagtgcgctgcctccagaagaatattcttggtgtcagcggtcacttcgccatacaggccgcccatcacaccggcaaggccgaggatgcgcgagccgcgttcgccgttcggcgaatcggtgataagcagatcttcgacgctcaggtcatgttccttgccgtccagggtggtgagtttctcaccctcgttggcgcggcgcacgacaatcgggccttcgagcttgtcgaggtcgtaggcgtgcatcggctggccgaggtcaagcatcacgtagttggtcacgtccacggccaaggagatggagcgcatgccggcgcgaatcaggcggcggcgcatccagttgggagtgtgggcgttgggattgaagtccttgacgatacgcgcgtagtagcggtcgcaaccgggcacgccgtgaatcggattgttatcgtcgatttcaacatcgatgtccaccggggtgccgggctggtagtcagcaggttccggggccttctcgttcagtgccacggccggatcggtgtaggcagcaccggtggagtggtggtattcgcgggccacgccacggtaggacagcgtgtagccacggtccggggtgatgttgatctcaagcagaggctggtcgaggtgcagcaggtgcatggcgtcctgaccaggcttcagagcctcatattcagcctcggagaagccgtactgacgcagcagaatgatgccgtcgtggctgtctcccagacccagttcgcgctcggatgcgcacatgccgttggagatgtggccgtaggtcttgcgcggctcgatcttgaagtcgccgggcagcacggcaccgggcagggtgacgacgaccttttcgccggccttcatgttgggcgcgccgcagatgatgccgcgcggcaccttgttgccgtcttcgtcggtctcgttccattcgtctccgcagtccacgtggcaccagttgatggtcttgccgttcttctgcggttcgggggtggcgtcgaccacgtagccgaccacaatcgggccggtcacctgggaggagtggatctcctcttcctcaagacccaccttgacaaggtccttggcgagctgttcgtaggtcaggccttcgggaacctcgacatggtccttgagccaatcgatatcgatcataggcatggctgaatcactcccccatcacaaactgttcggcgaaacgcacgtcaccttcgaccaggtcgtgcatgtcgttgatgtcgctgcgcagcaggagcgtgcgctccatgccgacgccgaaggcgaaaccggtgtagacgtccgggtcgatgccggcggacttcagcacgttcgggttcaccatgccgcagccgccccactcgagccagccggggccgcccttcttgtcggggaaccacaggtcgagctcggcgctcggctcggtgaacgggaagtagctcgggcgcaggcgcgtcttggcttcagggccgaacatggcgacggcgagcttgtccagcacgcccttcaggtcggccatggtcaggtgcttgtcgacggcgagggcttcgcactggtggaacaccggagtatgggtggcgtccagctcatcggtgcggaacacacggccgggggacgcgatgtacagcggcacgccacgggtcaggagggcacggacctgatcggaggaggtctgcgtacgcaccaccatgttggagccgacgaaaccggcggcgtccttggcttgattgcccttgacgtagaaggtgtcctgcatctggcgggccggatggtccggaccgaagttcagggagtcgaagttgtaccattcggcttcgatttccggaccggaggagatctgccagcccatggagatgaagaagtcctcgacatcttccatcagcttgggcagcgggtgacgggcgcccagaggcttgcggttcaccggcagcgtcatgtccacggtttcagcggcgagtgcggccttctcggcggcttccttgagctcgacctccttggggccataggcacggccgaagtcggcgcgcagcttgcccatgagcttgccggcttccttcttctggtcgacgggcagggagccaatggccttgctggccttggtcatcgccgaatcggcacctgcgtacgttgtcttgatggccttgagctcctccaggttggaggcgttctggattttctcgatgccctcggcaacctcagcagtcacctggtcggcgtcgaacaccatttgttctgccacgagaaccctttcgtctgatgttttctcagcgtttcacagcgtttttaccggtttcacattctttcaacatgacccgacatagacagcgacatcagcatcaccgcggccgaggtgccgaggttcagcgattcggccttgccgtacagcgggatggagacgatgcggccgcagcgcgtgaggatgtccggttccaagccacgcgcctcattgccgaacagcacggctttcggagcctcgaccgccgccttgtccgccagtactgcgggcaggctttccggcttgcattcttcggtgccgtatacgtcggcggcccagacgcccatattatggtcgcctgtccaggtgaagaattcgtcggtgctcatggcgagtaccggcagatggaacagggagcctgcggtggagcggatgaccttggggttcagcacgtccacgcagtcgtccacgaagattacggcgtcgcaaccggccgcatcggccgcacggatcacggtgccggcgttgcccgggtcgcgcacctgccagaaggcggcgatctgcgggccccggccgttcttgccaagttcgacgtcatcggcaccggcgtgcatggactcggcattgccgacggccacgatgccctgggcgtccggactgatgcggtgcatcacgtcgccggtgcagtagtgcacataaatcgtggcatcctgcgaggtttcgacgatcttctccaacgtggaggagatgatacgcggatgttccaacgcctgcgaaacctccacatagaggtcctgcaccacgtccggccgccaagtgacggcctcgcgcacggattgcgggccttcgataagaaaacggcccgaacgttcgcggcctttggcgcgggtcagatcggcgatgcggcgaacgcggtcggatttcggattatcaagaatctgggcgttgatgggcatagccactaccctactgccgggtcattacgtcagtcgtggctcgctcccgctggcggaggcatcgtaagcctttcagacaccttgaaaggcactgtgccagtctgtcgcctttcagacaccttgaaaggcgaagtgccaattcccggtgccgatggctacgcctatggaggccagcgggacagccagacagatgacgtagaagatccagtcgataggcttcagacgcgagatacgggcttgggagcgtggggcgctggagccgaagccgcgcgcttccatggcggtggcaagtttggtggcgcgccggatggagagcaccagcagtccgaacgcttgggagagggcacgggcgatggcgttaccgtcgccaaggccgcgcgaacgctgggacaagccaagtgcgcgccaatcttcctgcagcagcgtaaacatgcgcaatccagccaacccgccgtatacgaatcgcggtgagaagtgcagaatctcaaccaaaccgtccgccaaatcagtgggatcgaggcccagggccaggatcacgccgggtacggcaatggccgccaccctgatagccgtggcgatggccagattaatggatccctcactgatcacaatccagccaccctgccacaggatctcgcccgaggtacggccgtagagaaacacggagataaaactgccggcggcggcgatccataccggccaggtcttacggcatacggtccacggagccacgccaccaatccacagcagcacgaattcgatgccgagcgccgtggatgcggataccacatccagactgatgaacatcggaacgcacagcaacagcgcaccgatgatgcgactgaccgcgttgatgcgcgctatgaaccatgagggcgatgaggctttgaccggctccacgcgcgtttcctgcgggctgacggttaccacgtcactcatgcctcgcctcctcgaacatcacgcgtcgtgcgcccagcgcatccaccagcgcctcatcgtgcgtcaccatgaccacgcacgagccttggtcgcggatggcggcgatcagcttgaccatttcattccacgtactgaaatcctgtccgaatgtcggttcgtccatcaccaacactttgggtgcggcggccagcatggaggccacggacagtcgccgcttctccccgccagacaaggtatacgggttggctttggcgaagcgcgtgagattcatctgctcaagcatgcggtcggcggtccgataagcctcgtcttggctctgccccatcgacttggggccgatggcgacttcgtcacgcacgaaattggcagcgaactggtgttcgggctcctggaacaccatgccgatacggcccagcagttccttgcttttccagtcaatcggctcacgcccggcatgcgcgggcttgaggttgtcggcgatgagcaccttgccggcgataggctcgagcagcccggccaaggtcagggccaaggtcgatttgcccgcgccgttcggacccatcagagccgttacttcgccgggatagaaatccagattgatgccaacgccaagagcggtcccacggccaaagcttaagttctcggtgctgagcaccggcgcatcgtgcgcaggctcccgcttcggcgagtaatcgggaatcgcacggcccggcacccacgcgccaccggcggccaacacgtcgcccatctcggcgaacacctcgtccggcttgccgtcggcgatgaccgcgcccgtgggcgaacttgcatcgggtcggccgagcacgatcacgcgatcgaccagatcgagccatacatcgatatgatgttcgaccacaaccatggtctgcccggtggcctcgatgacctttttgaccgcgtcatgcacttcgaccacgccttcggggtcgaggttggcggtcggttcgtccaacaacagcagaccgggcttcatagccagcacgccggccaacgcgagacgttggcgctggccgccggacagatggcgggtggaccgatccagttcgagtccgccgagtcccaccatatccaatgattcgcgcactcgctgccgaatctcctcgcgcggcacgttgaggttttcgcagccgaaggccgcgtcatcgcccagtcgttcaagaatgatctgcgagtccgggtcctgaagcaccagtcccacgcggcctcgcgcctcgcgcgcatcgacgccatcgatggtgagcgagccctcctgctcgccttcctcatcgccgccaagtacgcctgcgagaccggccatcatcgtgcttttgcccgcccccgaagcaccgagcagcaacacacgttcacctggccggatggtgaaatcgacggcacgcaacgcgaagtccttacgcgtggcgtgccgccatccccagccgctggcctctaccgcagccggattaacctgcatcagacgcgcgccttgctgcggccggattcaaagcgttccagagcgccggtggcggcgagcgcacgagacaagtaccagaccaccacgccggcgatcacggcgccggagatgatggagcccaccagataccaagtgacgcgcaggccgttccagcccgggttggtggcccagtagtaggcccagcagcccacgccggcgagcgcaccggacaggatggtggtgccgatgttccacttcttccaagcgaagacggcgaaggcgatttcggcacccagaccctggatgatgccgacgatcagcgagccgccgacaccccactggttgcccagcgtaagctcgaggaaggcggcgagggtttcggcaaacagtgcggcaccgggcttgcgcacgatgattgcggcgagcgggccggcgaacagccagaatccgttgagcagaccctcgaaaccgggggtcacgccctcgaacagggccagcggggcggagcagacaatgtcccagccccagaaaatgacgccggatgcgacggcgatgattgcggcgacgacgatatcgacgacgcgccacttgtaattggctttggccacagcttcagtcatgaatgtgcctttcttctgctcgtacgcaggccgaacatacatggatatatgtacgcacatgatgcacatgttcgtggccacgcgcgggttggttcaggcacgggtgggtaagagcgacatttccgtgcgccggcattatccggtcacgttccatcggtcgagactatgaatctcctctcagccgcctaacggcagctcccgtgtcaactccccgactataaagcaagccgccgtcaaaggcaatagccacatccgtgacctaccggacggcggctcgccaccattaccgatgcggttcggttacttgccgagcttgtccagcagcaaagcctcggtgatcacgttgttcttgaggccgggcagggagatggactcattggggctgtgggcgttggccttcgggtcttcggggccggtgaccagcacctgagcgttggggaaaatgcgctgcagttcggggatgaatggaatggagccgccctcgcccttgttgatgggctcaacgccgaaggcctcggtcatggcttccagcgcgtctttggtggccacggcggtcgggtccatggcccagcccatgccgttttcgccgcgttcgacagtgaccttggcaccgaacggcgcgtgggattcgaggaatgcagccagtgcttcctgcgcttcttcagggcgctgggtgggcgcggtgcgcagcgacagacggaagtgggtctccggggcgatcacgttgaaggatccctcgaccgggtgggcgtcgaagccgatcacggtcacggacggcttggtccacaggcgtgaggccagcgaaccggtgccggcgaactcgtaaccggccaccacgccggaatcctcgcgcacggtggtttcgtcaaggtcgcgttgcaaaccgccgattggctcttccgcggccacgccgggcacggccagatcgccgttctcgtcgtacatggaagcgatgagcatggcggccaacgtgttggagtcgagaatcgggccgccgtactgaccggagtgcaccgggtgctcaaggccctgcacggtcacgtccacgcaggtgttgccgcgcagcgaggtggtcaaagaaggaatgtccgccgaccagttgccggaatcggccacgataatcacgtcggcggcgaattcgtcgcggtgagcctcgatgaagggaatgaagcttggcgagcccatctcctcttcgccttcgatgaacactttgatattgacgttgaggtcgtcgcccaaagccttcagcgcaccggagtggatggcgatgccgccgccgtcatcggcggagccacggccgtaaagacggccgtcgatttcggtggccacgaacgggtcggtgttccactcggccgggtccggaacaggctgcacgtcgtgatgggcgtagagcagcacggtgggggcgtccggagaaacgatatgcgagccgatgacctcccatgcgcccggagtgccgtcggcattggaagcctggaccaccttggcatccacacccacgaggcgcagttcgtctgccacgaattcagcggagcgcttcatatgttcggcggtgatgcccttggcggaaatcgactgcagcgcaaccttttcggccagcaccttgacgatgcggttccaatcggtttcgacgcgcgaacgaatctcgtcagcggtgagcgttgccatgatggtcctcctttatatgtgtgtaagcggcgtcattgcaatggctgcgccagtatacaagtgtctgaacgtcaccgtaacctcaaagcatgacatggaatccgtttaggaaaaaagaagaggcccaagttcccgttgagcaggccccgaagaagaccgccgatccttctgagaaaaaaggccgtcctaccccgaagatgaagcaggctcaggccgccggtatccgtccgctggttccggtggaccgcaaggccagcgccaaggccgccaaagcccgtctgcgcgagagggagaacgccgagtacgaggcgatgcagaagggcgacatcaaccacatgcccaagtcggaacgcctgccttggcgtatctacatccgtgattatgtggatgcccgtttcaaccttggcgaatggttcatcccggtggccttcgcgattctgatcgtctccatgttcgtcacttctttgatgcagaaccagtgggcttccatcatcatgatggcgcttatgtacggttacctgattgccgtgatcatcgacgtatggctgatgtggcgcaagctcaaggccaagctcatcgccaagtacggcgaacagtccgtgtccaagggctcccgctccttctcctacgcttggagacgttcgattcagatgcgtcgttggaggcttcccaagccgcgttacccgaagcgcggtcactggccggcagactgatgtccatatatactctggctcccctcgttgaggggctgagccgtaaagaaaacagtccagtggactgtttttaggcgaagtggcggcgatagccgcatatggctccctagcatgggagccatacttatatgcaccaaggaggcaatcatgagcgaacagtttgatctggtcatcatcggggccggccccggcggctattccacagccctgcgcgccgccgaactcggcatgaaagtggcactcgtcgagcgtgacgccaccgtgggcggcacctgtctcaaccgtggctgcatcccctccaaggcgctcatcaccgccacccacaccatcgacaccgtgcaccgtgcggccgaactcggcgtcaacgcctcggtgaatggcatcgacttcggcacgctgcgcgactatcgcctgcgcgtggtcaagacgatggtgggaggactggccggactgctggcccatcgcggcatcaccgtgttccgagccaatgccgcgttccatgcggatgagatcgctccagcaacttccaaccacatcgtccacctcgttccctcccccgaccaaagcgacatcctcacctatcacaaggccgatgtccccgaacccagcggccccacgatggacctcacggccacgaacatcgtcatcgccaccggtgccaagccacacccattgcccggtaacccgttcgccggcgccctcatcgactccacacaggcgctggaagtcaacgaatttccctcttcggcggtgattatcggcgccggggccatcgcccttgaattcgcctcgatgtggaacgccgccggttcgaaggtgaccctgctgattcgcaaggaccgcgtgctctcagcctgggaccggagagccggcaccacgctgacccgtgagctcaaacgtcatggcgtgaacatcatcacccgcgccagcgtcacccatgtggacaccggcgcgaaccttggtgccaccgtgcactacacgcgcgaaggccaggacggcgaacagagcgtttggggcgaaatcgcccttgtcgccatcgggcgtgacccgatcaccgacccagcatggggcgtgacgattgatgaccacggacatgtcgccacggatgcgtacggtcgcaccgacaaaccgggcgtatgggcggtgggcgacgtgacggccggtcacgcactggcgcatcgtgcttttgagcaaggcatcgtcatcgcggagaccatcgccggactcaatcccaagccggtggacgaagccgctgtgccgcagatcgtgttctccttccccgaagcggcgtcggtcgggctcaccgtcgaacaggcgcaggcgagagaggacctcgtcgaaatcaaggagaccaactatccgatgctggcgaacgcgcgcatgctgatgagcggcacggccggctcattgaccatcgtctccggctgcgacgcggccaacccggacaccccgcgcgtgctcggcgtgcacatggtctccccgatggcctccgacatcatcgccgaagccgaacagctggtcggcaaccatgtgccgctcgccgacgcagcccgcctcgttcacccgcatcccacattcagtgaaacgctcggcgaggcgctgctcaaggccgacggacgaccgttgcacacacgctgagaccaaccagcacaagcaagttcggaccagcgcacctgataagatattgtccagtgtgtttcgtcccaacaaaggaagaagtgatggcggaaaaggacgcgaagccgaagaagcagagcacaatcaagcagatcatccagatctacaagtacacggctaaggaagacaaggccctgccgtggcttgaggccggtgctttcctgctgcctgtagtcgtgatgatcatcatcggtctgattgtcaagtggacctggctgacctggatcttcaccatgattaccgccatcatgctcggcattctgctggccaccatgatgctcacccgccgcgcggatgcagtcggctacaagcagattgatggcaagcctggtgccgccatcggcgtgctgagcaacatgcagaaagccggctttgacttcccgcaggaaccggtgtggatcgacccgaagaccaaggatgccatctggcgcggcacttcgatgaacggcatctacctgatcggcgaaggcgaatacggtcgcgtcatgaaggcgatggatcgtcaggaacgcgatatcaagggcgtcaccgccggctcctccattccgatataccgcatcgccgtgggccacggccccaagcaggtgccgctgaccaagctgcgtagcacggtgatcaagtccaagagctatgagcccacgcaccacaagaacgcactgatcgccaagattcatccgcgccgtcgcttcctgctgaccaaggccgagatggaaacgctgaacgatcgtcttcgcacgctgcaggccaagaagggctatgccatccccaagggcatggatccgaaccgcccgcagaagatctcccgccgcgcgatgcgcggtcgctgatcggcagcacaccaccaaatcgcacagaagccccggaatccgttcaatcggttccggggcttcgtcatatgtctcataatcgcgtccacttacatccacctacgtcacctgtcaatacccactgtccacgttgcggacatctctacctactcccccgatagtctccgtttccattctgtaatgatgtttcgttgaaataacgcgcctgcgcgattgtcggcctcagtcacgaaacattctcgtaacccaagtttcgagccggcgaaacgcgctattttacgatatataccgttatatctcatacgaaaggagcggtcccgtgaccgaactcaagtccaaggaagacgtcgaggcccttatcaacaaggaaggcatcgagtatgtctccgtccgtttcaccgatcttatcggcgttcagcagcacttcaccgtgccggctagcgaattcctgaaggacgctttcaccgacggcatgccgttcgatggttcctccgttcagggcttccaggccatcaacgagtccgacatgaagctggtcccggacgttgagacctctttcgttgacccgttccgcaagcacaagacccttgacgtggccttctccatcgtcgacccgctgaccgacgagccgtactcccgcgacccgcgtcaggtcgccggcaaggccgaggcctacctgaagtccaccggcatcgccgacaccgcatccttcgctcctgaggccgagttcttcatcttcgacaaggtgcgtttcgagaactccatgcagcgctccttctacgaggtcgactccatcgaagctccgtggaactccggcgttgactccgaagaggacggcaccccgaacatcggtttcaagaatcgcgtcaagaagggctacttcccggttccgccgattgaccacacccaggatctgcgcgacgatatggtcgccaacctgcagaaggtcggtctgatcctcgagcgttcccaccacgaggtcgccggcgctggccagcaggagatcaactaccgcttcaacaccctgcagcacgcaggcgatgacctgatgaagtacaagtacgtcgtccacgagaccgccgctctggccggcaaggctgcgaccttcatgccgaagccgatcgccgacgacaacggcactggtatgcactgccaccagtccctgtggaaggacggcaagccactgttctacgacgagaagggctacgctggtctgtccgatctggctcgctggtacatcggcggtctgatcaagcactcctcctccgtgctggccttcaccaacccgtccctgaactcctaccaccgtctggtcccgggcttcgaggctccggtcaacctggtgtactccgctcgtaaccgttctgccgccatccgtattccgctggccggcacctccccggctgccaagcgcatcgagttccgcgctccggatccgtcctgcaacccgttcctggccttctccgcccagctgatggctggcctggacggcatcctgaaccacatcgagcctccggagccggtcgacaaggatctctacgagctgccgccggaagagcacgctggcatcaagcaggtgccaagctccctggccgaggctatggacgccctggaagaggaccacgacttcctcaccgccggcgacgtgttcaccgacgacctgatcgagacctggattggcctcaagcgcgacgagatcgaccaggctcgcctggccccgaccccgctcgagtacgagctctacttccacatctgagtttgagagcttagcaacgttgggatttcgccattgctcttctcttgtgggagtctaatgggagtcattcagcgtaactagaaagaacctcgtgaaattcgtttcacgaggttcttttttgtatgttgcgttgtgtgttatgcgatgtgtgttgctcctggaatattccaggggcgggccgctacttagtctcccaacgctccttgagtacataggcggcggctttgggctgacggtcgcgagtgaagacgtccttcttgttgccgtcgacgcgcatgataccttcaccggtttggaagtcgcagaggttccatacctgctcgcccaccactgcctcgaacatgtcgaacacttcgtgctgcatggtgaggtactcgcattggtactcttcactccattgcacgctcggcagcttgtgcgcaccggcatcggtgtccgcaccgtattcggtgaacaggaatggcttgttgggttcggtgttcatccattggttcatctcgttgatgaaggccttcttggctccgatgagctgatacccatcttgcacataccagccgtaataccggttcaggcagatgacatccgcgaactgatggcacttgtctttgcctccggcggccatcagcagattggtgtaggtcagcgggcgatgctgcggatcgagcgtgcgcgcgtaatcgaatatctccttgaaatacggcacggccgcctcggatgccgagtcgttggcggcgtcgatgaaattccaagcgccggaggccccggcattcttttcgtcgaaggggacaattcagaacacaactgccgacacaatcgtcagggaggccagcgagaacagcgtgcttacgagcacgaagccgaccgcatactcgggcatgttgttcttgcgaccggtgaacatggcaatggtggtcatggtcggcagtccggcgatgaccgtaatcatcagcaccatgtcatgggtgatcggcagttgcggcaatgcgccggtcagcgcggtcagtagcgcgtagaaggcgagcgggaaggcgatcatcttggcgactaggccagcatagagttcgtagcgtttgaggacgccccaccacttggtcagcgcgaacaggccgcccaagtagattagcgacatcggcgtggccatattgccgatggtgtgcagcggcttcaggatgatgtccggcaccttgccgccgaacagaatcagaatcagggcgagcatcacgccgacgaaggcgggattgacgaatcgtttaagcaggccgaggacgcgggtgcctggcgaggggcggacgacggccggagaaccaccgtttgcggcattgctcgccgaaccagcattgcccaccgaaccggcgccgttcactgaaccgttcacgaccgcacctcgcgcgccaatcgcgttgccgccagtcgtttcgtcgaccggctcgcacagccatacgccgtacgtccagagcagcgtctggtcgatgatcgacatcagcgccacgtaaatcgcgccgttctgcggccaaagtgccataatcaacggaatgccgatgaatccggcgttgccgaagataagcgacgcctgaaatacatggctacgcgaacctttgagccgcaacagttcggcgaccagccagaacaccaggatgagcagcacgtacatcacggcggtcagcagcatcacgccccagttagaggcaagctgcgcgcggtccgcaccatcgacggcgttcgaaaacacaagcacggggatgagcacgttgagcagcaacgagcacatgccgtccaacgccgtctgaccgtagaatcgaagcctcacacatccatacccgaccatcagcatgatcagaaatccgactaactggccaatcatgacgccgaactgccccatgcacactcctctcgctcgcgttcccgtgcttttctgtcactggttcatataggcagccatctggacaggctcggcggcacacgcatcagtatgttcgataccaccacatgccaatccacttctcgttcaaccgttccccgtgctaatgcgccgccggccaccccgtgttgccggtgctgcgcgagcaccattacacgtattgcattccggtgatcagcgggcgcaacgtgtgggtcggcgcgaacgtgtcgattctgccgggagtgaccatcggcgacaattgcgtgattggcgccggttcggtcgtgacacattccatccccgccaactccgtcacctacggcgcgccctgcgaggtcgtgcgtgaaatcggcgacaaggaccgcgagtatttctacaaaaatcgcaagctcgacgtgtgggagtgagctttcgcgctactgctctttgagcttaaaacgctcactgaattggcggtcgcgccagtagtagacgtcgtcgcgttcgttgatttcgcgaattaccttgcacgggctgccataggcgaccgtgttggcggggatgtccttggtgaccagcgagttggcgccaatgaccgcgttgtccccgatggtgaccccgggcagcacggtgacattcgcgccgatccagacgttctcgccgatgtggactggcaacgaatactgggcaccctgatagcgcaggtccggacgcacgggatggccggtggctacaagcgtgacgttggggccgatcatggtgtgggatccgatgaagatctcaccatcgtccaccagcgtcaggttgaagttggcgtaacagcgctcgccccaataagtattgcagccccagttcgcatacaccgggcattcgaggtacagaccctcccccgccgcgccgaagaacgcctgcatgagttcggtacggcgcttcgggttggtcagcggcgtggcgttgagttcgagctggagatcacgctgggcggcctgcaaatcaaaaaagccgtccacatcatccggcaggtagacctcgccagagaacataagcgccattttctcgcgcgtcgcatcatcgataatcggcttggcgatcggcttgtcttcggtcatcattggctcctgttcggcgttttggcgattgtgtcggtcgaactattctgtcacagactcgttttcgacacccagcatcgagcgcagccagtcaaggattcagatgtgcgattggcaccgtgcgggcctcacacttttcttattgagaacgattcgccgtgcagtcaagccctccatccacccaaaaaggactcgcttttggccgcgtcgtcgcggtaggccttgccgaactcgtc

SEQ ID NO: 3835 - DNA, 3720 bp, Unknown
  R35_2m  MAG No. k141_10568
atgtggatcaagttcaacgaggcgttgcgctccgggggagtgccggtgaaggaaggtcgtttcggcgcgcatatgcgggtcggactggtcaatgacgggccggtgaccatcatcatcgacaccgagcatgacatgcctgacggaacacgctgaattgcgataatgatttgacattatatcctgttctctccaatatgttactaaagcgctttagtcttctgcgggagagggcgcatgtcgatatgtttcccatgaacgggcagcacaatgatgtggccgtacaagcggcagagataaggggagtgaacagcagatgttcctgaaacctgaacagcaactggagcggtgcaagcgcatagtgcgccagcgcgtggaccctcatatccacccatcgatcgcacagctcgcggtggagtcctttgacgttcccggagaaccgatgcccactgacgagttcttcgcgaagctcaatcgaggtgacatcgatttcaagccgtttacgctcggcaacgaatggggcaccacatggggcacggtctggttccgcctgaccggtactgtgccggccggctacccgaaaggcaaaccgctggagctcatcctcgaccttggctggtacccgcactcctgcggcggccatatcgagggcctcgtttaccgtgccgacggcaccgccatcaaagccgtacacccgctcaactattgggtgccgttcatggatgctgaaggcaacgcgcaagtgtcggtcgccgaagacggcagcttcaccctgtacctcgaagccgccagtaacccgctcctgctcggcgtacctccgttcgttgagactgaactgggcgaccatgccaccggcaagccggatgagccgtacgtattcaagtccgccgatctgaccgaattcgatgaacgctacgagcacgactccgtggacctcgacgtggtcagctccctgatggaactcgccgacaagcagtcgccgcgctactggcagctcgcgaaggcgttgcagcgttcgctcaacgcctacgacgagcgcaaccccgaatccgtggaagccgcgcgtgcagcactcgcctgcgtactggccaagccggccaacgcctcggccatgaacgtcagcgccatcggccacgcacatatcgactccgcatggctgtggccggtgcgcgagacgcgccgcaaggtggcccgcaccgtatccaacgcattggctctgatggacgccgaccccgacttcaaatacgcgatgagctccgcccagcagtacgcctggctggaagaggatcatccggacatcttcaagcgcatgaagcggcgcattgaagaaggccggttcatcccggtcggcggcatgtgggtggaagccgatggcatgttgcccgccggtgagtcactgatccgccagattgcatatggccgcaaatacttcaaggaacatctcggtgtggagcccaagggcgtatggctgccggacagcttcggctacaccggcgcatggccacagatcgcccgccgtgccgggtacgaatggttcctcacgcagaagatctcgtggaacgacaccaccaagttcccgcaccactcgttcatgtgggaaggcatcgacggctcgcgcatcttcacccacttcccgccggcggatacttatgccgcttggtgcaaggttcaggaactcgactacgccgagaagaacttccaggacaaggatctctccgaccgctcgcttctgctcttcggtttcggtgatggcggtggcggccccacgcgcaacatgatggagcacctgcaccgctacgagaacctcgaaggcgtctccaaggtgagcatcgaagagccgaatgacttcttcgacaaggcgcatcagcagcttgcagagaacgccggcccagaaatgcccgtctggaagggcgagctgtacctcgaactgcatcgcggcactttgacctcgcaacaggacatgaaacgcggctgccgccaagaggaatcgcggctgcgcacggtcgaatacctgggcgcagccgccgtgttgtccgatccggagtacgtctacccgcgcgaggagctggaccgcatatggaagacgctgctgctgaaccagttccacgacatcctgcccggctcggccatcgcatgggtgcaccgcgaagcccgcgaggactatcgccgcgacctgaagcgtctcgctgaaatcgcccaagacatgtgcgccgtgctgcgcaaggccaacccgcaggccgacttgctcgccgaggcccgcatcagccagttccgcaatgacggcgcgtcttggcatgccaaccgcatcaacgaaccgaccgacgcgctttccgtactgacccagacattggacaacggccgtgtactgctggccaacggcgtactgtccgtcactatcgaggccgacggtacgatctcgtcgctgcttgacgaggagcatggccgtgaactggttccggccggcacccgactgggccgatacgagctgttgaaggacgaacccgccgtttgggatgcgtgggagatcgaacgcgaatccctgctcatggcgaatgccatgaccggatcaatcgaatcggtcgataccgaaaacggtgcggcacgagttcgcgtgcgcgccgccgacgatgacaccgtcatcaccaccaccatcacgctgcgccccggttcacacacgctcgatttccacgccgacattgactggcacgagcgtgaacgcttcctcaaagtcgatctgccgctgggtatcgtggccgaccaagcaacatacgactgccagtatggtctggtccgccgcccaatcgtcaaaaacaccgcatcagacgaagccaagtatgagagcagcacgaaccgtttcgccattatcggcgatgccggttacgccgcggccgtcatcaacggatcggtatacgggtccgatgcctcaccgatcgccgggaacgccgccgaaggtcgtgactcgggcaccatgttccgactgtcgctgctctccgcgccgaccttccccgacccgcgcaccgatatcggtgcgcatgagttcgactggtccgtggtggccaacgccacggtgggccgtgcgcttgacgccgcttgcgcactcaacgcgccgacgcttcatgacatgcccgacttagcgccgctcgcctcgatcgagtcagcaaacggcaccgtggtgttggactggataaagctggccgacgatggctccggagacctgattgtgcgcgcctatgaggcggccggcggcagggccgatgccacgctgcacgtctgcccggcgctcgcaggcgcttcggtgcatgagaccaatgtgctggaaggcgacgatttggccgccgacctgccggtcgcgctgcaagacggtacacaaaacgccgaaggcgccacactgcacttcggcccgttccagctcgccaccctgcgcatcacgcgctgaattcccgtctgatgcttctgcctcctcgaaccatgaggaggcagaagtatgtcgtattacggttttccaaattaccaccacacccatcatttccatcattcccaccagacacagcaaaggagaattctccatgtttcttctgcccgatcagcagttggagcgctgcgaccgcgtcatgcagcagcgcgtcaaaccgcatatccacaccacactcgccgcatgcaccttgcgttcgttccacaatcccggcgaaccggtgccctccagcgaatttctagccaaagtgc

SEQ ID NO: 3836 - DNA, 12485 bp, Unknown
  R35_2m  MAG No. k141_10629
aatcacctcgtccaaagtgcgtggacgcatgcgcaccgccaacggccgtgtcatcgactccggcgcatcagccgccccaaacaaatcgttctcactcataacgtcctatagtaccccagtgttcgaacagacgttcgagctgcaccttggcttccctcagagaggggagccaggaatcagttactcaccttgtagtcgtggaagactacttcgccggtgtcttgggtggcgtcaaggtccacgatgccttcgatggcccagtcgtggtcgccatcggaatcatcgataatctgacgcaccttccacgtatgctcgtcgttctcgtgcttgtcatccaacatgaacagttcgggcgagcgcgcttcggcgccgatgcccacgtactcgtgctcgtcgtagtagtcgtcgagcacatcttcccattcgtgcacgccgtagccccagtccttgtcgagcgcgccgagcttgtccggctggtcaaggtccataagccgcacacggcggaacaaggcattgcgcaccagcacggtaagaccacgacggtcctcgaccaccgcgctttttgcgccgggcgcggccaaggatgccgcagcctcggattggtcagccgagtcaccggcgttctcccattcgtccaccagcgaggagtcgatggagcgcacgagcacgcgcagccacgagatgatgtcttcgagttgctcgtcacgcttttcgggcggcacggtgcgcgccagcgtgcggtaggcgtccgagaggtagcgcaacagggtgccttcggagcgggcgatgttgtatcgggtgatgtatccggtgaagtcggaggcggtttccaccatgtcgcgcaccacggatttcggcgatagccagtagtcgttggcccacggcacatcgtggcggtactgatcgaacgcggcttcgagcatgtcttccagtggcttcggatacgtaatctcctgcagcttatccatacgctcgtcatagtcgagtccgtcggccttcatatcggccatcgccttgtctcgggcctgacgctcctgggcacgcagcacctgcttggggtcttcgagcgtggcctcggccatggagatcacgtccagcgcataggtgtcggactcggggtcgagcagttcgagcgcggccagcaggaacggggagagcggctggtcgagggcgaagtcgtccggcatatcaagggtcatgtagtagtccttgccgccgtccttgcggtcctcggtttcgatgacttcggtatcgaacagggtttggaagatctcgtcggcccgctggcgcagatgctccttctggtcgggggtctgcgcggaatcgtcgatgagatcgtcgatacgggcacgggcgtcaccgccctgcgccacttcattgagcaccatcgaatgcgtgattttcaggtgcgggaccagggtctccggttcagcgtcgatgagcttatcaaacgtgctctggttccaggtcacaaaaccttccggcgccttcttgcgcttgaccttcttgagtttcttcggatctcccccggccttggcgatggctttctggttttcgatttcatattcgggagcctcggcgatcaccagtccctcggtatcgaatcccatacggccagctcgtccggcaatctggtggaattcgcgggcgcgcaggcggcgcatcttggtgccgtcgaacttggtcagggccgtgagcaccacggagtgaatcggcacattgatgccgacgcccaatgtatcggtgccgcaaatcaccggcagcagaccctgctgggcaagctgttcgaccaggcggcggtagcggggcagcatgccggcatgatggatgccgacaccggtgcgcagcagtcgctgcagaatcttgccgaaggctgtggtgaacttgacgcctttgatggcttctgcgatggcttggcgctgttccttgctggatacaccggtggaggcgagcgcttgcgcggtctccaatgcggcgtcctgcgaaaagtggaccacgtaaatcggggtttcgccgttgcggaaggcgagttccacggttttttccatcgggtcgagcgtgtattcgtagctcaacggcaccggtcgcggcgcgtcggcgattacatccacgtccggggtgtcgttcagatcggagagcttgtcggcgatggcgtccacattgccgagtgtggcgctcatcagcaggaactgggtctgcggcagcgtgagcagtggcacctgccacgcccagccgcgctccggatcaccgtaataatggaattcgtccatcgccacgaggcccacatcggcatgggtgccttcgcgcaaagcctgattggcgaggatttcggcggtgcagcagatgatcggcgcgtccgcgttgatgtggctgtcgccggtgatcatgccgacattgtcgcggccgaacacttcgaccaagtcgaagaatttctccgacaccagcgccttgatcggagcggtgtaataggagcggcggccagtgcatagggcggcgaagtgcatgccgagcgccaccagcgatttgcccgaaccggtcggggtattcaaaatcacatggtcgccggccaagaggtccataatggcctcttcctgatgcggccacggctcgatgcccttgacgtcttccacccagccgaagaaccgttcgtagatgtcgtcggccgtaagattccgttcgcgtccgtcgccgtcccattcgggggccagccgccccagggatccgtattccttctcgtcagtcataatgctcagtctacctagtggcctattccgacggcacgagccgccctccgtcgctatgcgacgcctcccgccagcgggcggagccatgcgaagagctgtgccatgcgcttggctccgccaatgggaggatcgctcacgccaaccggcggcgcacctcgtcggggtccacctcgggttcgaggggaggccaggtcatgttcatgttcttcaaggtggtgcgcagcagttcggagaccacggctcgcgaataccagcggttatcggccggaacgaggtaccacggtgcggcggccgtgctggttttctcgaacacttcctgccaagcgaacatgtactcatcccatcggtcgcgggcctcgaggtcggagatatcgaatttccagaacttggtgggatcatccagcctcccaagaaagtgttttttctgttcttcctggcttaccacgaggaagatcttgaggatggcgcatccgctggcggccagttcacgttcgaaatcgttgatctggtcgtagcgggcacgccatacgtcttcgggataggtgccatagacgtgcggcatgaccacatcttcataatgggagcggtcgaatacggcaatccaccccggcttgggcaattcacgcttcacacgccagaggaagtcgtggtcgagctcctcggccgtaggcttgccgaagccatggtaatggatgcccatcgggtcgccttggctgaacacgtggcgcacaatgccgcccttgccggaggcatccatgccttgcagcacgatgagcagccgccgtgccgagcctttgacgccattcgcgtacatgagccgctggtatcgggcgatttcggaggagctgatcgaaatgaacttctcggcgtcctctttattgccgtcgaatccgggagtggaatcgccttcgacatcagtgacctgcatgccgtggtggaacataagacgttgagcgggcggcaacgaccatacggcgctgagcagttcactggatttcgccgcacgcgccagtcgttcaggcacgctggcactggagtcgatggtgtctatgcgatccaccgcgagctgtaataccttgtcgatccgtcgatcggttttggattcctttcccttgccgttcttgttgttctttcctgaggattttccggccgtaccccacttgccggcctcttcaggctcgttggttctgtcgtcgtccttggtcatgctcccgattgtacgtcttgtaactcaggagacctagcaacgtagcgacattcacatttcgcctgttactgcaaatctataggcatgcagtcgttcggaccgtaattgttggctttgcaccaattccaagcctcatctgtcgagtcgaagccctcaccggcaagaatcacatagtatttgtcggaattgctgctgtaggcgggccagtcacccgaccagataagcagtacgtttgaattcttgttgtgcatcgtgatgaattgcgcaagaatatcgcggtagttccaggtcttgccttcagcctccatacccttacgcttgctggacagctgtgcggtatacgtggaatagaacagctctgcggagtccttgtcgtgctcgacctgccaatccaatgccttgcttgcattattttcggcttcgtcatccgtaacgttgctgccgcttatcacgcctggatcagacgacccccagcaatatcttctttccggcagacccaccggaacgcggctgcgcagcgccaccgttgcctggcgccgtcgacaatgtcgaagtaggtgcagtcgccgtgttgaaacttgggggcaacggcatcgaacccgctggcacctgctggggagcagccggtaccagcgtcgggccatccatcgactgaggacttgggtttggcgcagactgtgccatcggcgcaccgcattccgtgcagaatcggcttccctccggcatctccgttccgcaaacctagcacttcataccctctccgttctctctcgtccctatcggccaatcccccgtccgtttgcagtacataaagaagcggcaaacggcccgaaacatacctgagccatcaggaagacggcacgatctgctacgagaaagagatcatcaccgaccggcaaatcgtcggcatcatgctgaagcatccgaccagcgcacgcggcttcaagcgctacttgcgcgccacatcatgacgcttgaccacgatggtgacgccacccgcagcgaacagcgtcgccagaaccacaaccaacgcaaccgaggcaccggtattggccgtatgttcggtctgctgtggcttggtgctgccattggcattgacgctaccgctatggttgccgttatccttgtcgtccgtcccggtggacactccggtaacggcaacgggcagagcgaccgtggtcttattggtcgcaccggtcactgtcaggctgatatcaccggtcttggttccggcgggaatcgtgaccttgagctcggcggtatcgccattcgcaacctgcgcttcgccgaccacctgctcgccgatggtggcggtcagcttcgtctcgtcaggcacgcccagcgaggtgagcgtgagcttcgagaagtgcagggtgaacgagccaccggccttgaccgcaccggtcgggataccggtgacggccactgcacggcggtcgtagcgcggggcaaccggattgttgtccttgagatagtcgatccaggcgtcgcggtccaccagaccggtgtccttggtgttcgtgccttgggcgaaggcgcggaagttatcgccgccctccaacaggaagctgaacgaaccgatacggtagttgcgtttcaggtccagaggctcaccgttgacggtcaccgaggtgatgtgatggccttgcgcggcatccggatcatacgtgtagctcacgttgtgggacagtccgagttgcagatacgcgcgcgatggcgtgctgccgtccgcgttcgtctgccactgctgttccagcgcttccttgaactgcgcgccggtaagcgtggtggtccacaggttgttcaggaacggcagtacagcgttggcctgggcgtaggtgatattgccgtcggcatcgagcgtgcaggcgtcattggtgccggacttgcagaattcggcacgcagaccgccggggttgaccacaccgatttcggccgcgccgcggtcctcgcctttgagcgaatcgagcagcgcatcagccaccagattgcccatggtcgattcggaggcgcggtcgtcacgcttgccgtccttgaatgcggtggtgatatccgcagacaccttgccgaccttctcgccgcccttttcatcggccaccttaagagcctggtacacgatgtccctcaccttggcgacagtcgggttcgcggcggcgagcaggccatcgttgtattcggcgtaatcgttgtagtgcggatcatttttgtcggcgggctgcgaagccacctgcacggccgtgttgccggacttgtcgtaagacaccgcaccggtggccgtgttgtaggtgagcaccacttggccgatgttggcggcatagctaccggtctggatgatcggccggttgttgtgcgcgggatcggtgtacgagtacttcatgtgggtgtgtgcagtgaagatcacgttcactgccgcatcggtatcgtccacaatcttctggaatacggggctggcggccttctgctcgtcaagcgtgggcttggccgtggcgtcatcttcattggaggctgcaccctcatggtattcggccacaatcacgtcagcctcgccgttggattcgtcgccgtcggtgagttgcttggccacacggttcacggcttccaccggatcgccgaattcgatgtccttgacaccaccgggagccaccaatgtgccggtttcctgagtgaccgcaccgatgatgccgaccttcacgccgttcacctcctgaatgctgtactcgggcagagccggggttgtggtgcccttcttgtacacgttggcaccgaggtaatcccattgggcgttgcgcgcgccctccttgccgatcacacgatcggtaaggtcggcatagccttggtcgaactcgtggttgcccaccgccgaagccttgacgcccaaagcattgagcacatcgatggtcggctggtcctgctgcaccgaagagttgaacagcgaagcaccgatattatcgccggcggacagcagcagtgatgagtcagggtattcgcccttgagctgctcgatggtggcggcgaacggcacggtgaggttcttgtcgatacggccgtggaaatcgttgaagttcagcaggttgatggtggtgctggcgggaactggctgattggttgccatatagcccatacgcaatgaatggccattggtcacgccgtcgtctgcccagaacaccggcttgtacaccttgccatttactaccttggtggcttcggtatcaggggtgatggcaaaaccttcggtgttctgcgtacggatttcatccggagtgtcggtcagcttggtcagctgcagcacaccgttcttgaattcgtaggtgccgattttggcaccggtgttcgcgtcattgtcgctttgggcgagcaactggttgtgctcggcgtcccaagtcagatcgcgcgggccatcatagccggcgttcaccgcggactgcggcaggtcgatgtcggccaccggatgtaccaggtcctcgccattcacggtttgcagcgcgaaagcgtagatatggccggttttctccagtgcggcgaagaacagaccgccgaaactattgccgaaaccatccgggttgtaggtcactacgttcttcgggtcaaggttggactggaatccgttggcggtcaggactgagtcaggaataaaggctatgccttccaccccaagattggcgtccgctccgtggcccagcgtcacgccgaactgcgtgagtgctgcgatgagattccactcgtgcgtagcgttcagatcgtgcgctccgtcgccgttggcgtcggtggttttctcggtcacgtcatactgcaggatggaaggccgcggcacattcttgttttcgttgtcgcgctcggcgccgatgaatatgcccttggatgaatctccgttgatcagcgtgatgccttcggagtccacaccgcccttgccgtccttgaagtgcagctgcttgccgcccttggtctgaccgttgttggtgaaggtccagccatcagtgggatcctgctgccatgtgccgttctggtagacgaacttgttgatggagccagggcccttatcagcggtgttgccgagcgtggggttcagatcgttgtcggccgcccacagcacgccttgcttgccgtctttaccggcttcatacaccagaccagacagattgccgtcagtgtggtcgccgccttgtcctttggcgccaaattcgccttcggcatccactgtggtcacatcggccaatcccgaccatgcgttcacggtcatggtctcgccggcggtcggagtcggagtcgggtcatcgaacacgttctgtgcaccgggcgtgggcgtatcggaaagcgcgaaagtgccatcgtccttacgggaccacgactgactgtcgctcatcttcttcacgccggttgtatcggtattccatgacgtggaatccaccacatcgctatcggtaaagtcgccgctggtagtggtcagataggcttcgtcggcatcggaacccaggccgggctcggccttgtcggggtcgatgtatgccaccagatatccgccggctttgatgacggtgtccgtattcgttacttcgctggtgccgatggtgtagtgcttcttggctttcttgccgctgtcgtagatgccccagcccttcacgtcaacgtctgtggagccggtgttcttgagctcgacccaatcgcaacgcttgctatccgggtctccggcagctttcgtattgccggcatagacctcgttgatgattacggatggtttggcagccgtgttctgttcggcagtggcctgctgctcgtccgcagccgcagcgggcacgccgatcagggcgatgctgctcagtgtcaccgcagcggtgagcagcgcgatggcgcgccgcgacatcgcggtgaaattgttggtgtggaacattactcccgttccttcctcgggttgtgccgccgcagcatgatgctcttcggcggatgacacccccgagggtatgggagggagatgaagccgacaccatatgaaggcaaactcggcagatctccaaactgaactttggctgaattaccgctgaagctggttcttggatttgcgtcgaaccgtccgtattccgccgacaatcgcgattacagcagtaccgatggctacgctgatcaacgccggtcgttgcgcggcatggagggtggcgagatccggcccggccgcaatggcgctgttttcacccgccgagccatcagacgccggatgattacccgcgtcggcgtactgggcattgaccacactcgggccggcaagcgccacctggtcggcggtctcgaccttggccacatcgccgtgcttatccaaggtgacgcgggcgcacagggctttggcccagttgatacgctgccagccgtcgctcgattgccatagggggtatccggaatccaaggcagtggctttcaaaatcgcgttgcgctgatcggcgtgcagttcgggataggccagtcgcagcacgtccgccgccccgcgcggtgccacgaaatcagcgccggactgggcggtgtcttgcgggaaggtgtaggtcaggcgtgcggtgtagacgcgcacggccgaggcctggtccgcgaccggctcggtggccaccgggtccagaaaatcgttggtgtagccgcccgaaccggaggccttggtgttggcgatgcaggcggcgagggtagtgccgtggccgtccgcggcgcagcgggacaccagatagtcccgcagctgccgggacgcgggcacgatggacgaagcgaattcgttatgccagtactgcccgttctgggcggatgcgccaatgcgcccgcccatgatgtcaagcggataatgcacgccgagcacgatgcggttgttgccggcctccgaagtgcgggccatgatttgcggcgcgagttcgggaatcatgccggccagcgcgataccccacgaataggcgccggtagtgtggccggaggggtaggaactgtttttctgcaagttcgagtagccgggcacgtgttcgagccatgagggtgattgcttgatgtcaagcgtggcgggcagtccggcgagatcgttagtgccgccgtagctgctttccgcacggttcagataggggcgcggatgcatggccgcacgttttgaggcgtaggtggaggccacgttaaaggagaagatatcggcgacggcgttgagtttcccggatttgagcccttcgctcatatatttgccaagcaccggaccgagcgcgtccggcatggcttcctcggcttgcagatcggagtcgacgagcgcacgcttgcgttgggcgttcaggccatccttatcgagattttcggcggctttgtggttaatggccacggccaaatcttcgtcgagtttcattgtatcggcgtcgagcaccttgccaccgtgttcggcatcggtgggggcctgccaatagttcttttcgtagtcggagagcaatgccacccaatccgggttgggcagctggtcggcctgtgcgattgcgggcgtcgcggctagcgtggccgccaacgccagcggcgcaatggtcgcaatagcaaaaacggaggataggtgccggaacatcttcatatgttccaacctatcctccgtgaaggctacgtagccggaacccagtcaaacactcagtaaattcttcgtgccggcttagcggcgattgagctgactgtcaggcctctgactcgtcttcggacttgcggaacgccgggaattcgccggtttccaggtcaacctgtgactcgggctgggtggcgtcatatccctgttcgtagcgggtgcgccgccagttgcgaatcgaggcgttggtgccacggtgatgcacatggtatttgcgcggcgcaccaccaaacggcagctcttcgacttccttggccaccgcgatctggttgacattggacgggtctccggcggcgatcggcgccacgggctcggcctcggtgggcgcggccgtgcgctgctgcatgcgcgaaggcagccattcggcgagcctcgacaacagccagcaggcgacgaagtagatcaccgcggccatgaccagcgtctgcaggatgttgaagtacatcgagccgagtcggcgcgattcctgcagcaggtcggtatacatgatgatcgagcctagggcggtatccttcaacaccacgaccagctgggtgacggcggccggcagcatggcgtagacggcctgcggcacctcgacctccatcaacgactgtgtttcggtcaggcccaaagcgagcgaggcctcgcgctggccgcccggcagattgccgacgccggagcgcacgagttcggcgaccaccgaaccgttgtacagcaccaaggccagcaccacggcccaataggacgggctgggcaggcccgcgaacgcgaaccatcgccagaagaagatcatgagcagcagcacgggaaccgcacggcagaactcgacgatcacggcggagacgccacgtaccagcgggttcggcagcagtcggcccacgccgaacaccaggccgaacaccacggcacccaccacggccacgacggtggccttgatggtcatccacagtccgggcaggtagaagtcggtccacgcctctcgttcgacggcgggcttccacagctcccagctgagctggttctcgccgtccggcgggttgtgcaggcgcatgaggataaacacgagcaccaccgcgaacagaatgcccgcgatccagttgacgatgcgaatggtgcgccggcccttgggacctggcgcgtcgaacagcacggaattcgaagtatcggccatatccgtcacctccttacggcgagtttgttggacaggtacgtggtgagcatgccgatggggatgatcaggatcacgtagccgagcgcgaagatcaggaagatttggatgatcacgtcgggacggaattcgatcatctcgctcatcagcgaggatgtttcggtggccacggatgcggcggcggccacggtggagttcttgagcagggcgatcagcgtgttgccgagcggtgccacggagcctcggaaggcctgcggcagaatgatctcggtggcggactgcatgaagcccaagcccagcgctcgtgcggcctcggcctggccaatcggcacggtgttgatgcccgaacgcagagattcgcacacgaacgccgccgtgtacaggctcaggccggtgaccgcgagccagaagaagttcgtggtgaaggtgtcggagaagctgagcttcagctgcgcgtaggcacccagcaccatgaacaccatgatgatggtcagcggcaggttcttgaacagttccacatacgcaccggccacggccctgagcgaggaaatcggcgagatgcgcatcaccacaaggatcacgccgaggatcagggagaacagggcggaccatagggtcagttcgatattgaccagaaacgcgccgagcacgtcatactggctgaagagttccaggaatccgctcatcaggcctcctctccttcgtccggggtgggcgggttgtagcgtacgtcgggcgtgtagttggtgcccttggtgttatcgctgatggcgttctccc

SEQ ID NO: 3837 - DNA, 39847 bp, Unknown
  R35_2m  MAG No. k141_10754
gacccgtcgttggaacccgaagatgaagcagttcatcctcacccagcgcaacggcatccacatcatcaacctgttcaagtcgctcgacatgatcgacaaggcgtacgacttcatcaagaccaccgtggcccacaacggcaccgtgctcttcgtcggcaccaagaagcaggctcaggaagctatcgccaaccaggccacccgcgtgaacatgccttacgtctccgagcgttggctcggcggcatgctgaccaacttccagaccgtctccaagcgcgtcaaccgcctcaaggaacttgaggaaatggacttcaccgacgtgcacggctccggcctgaccaagaaggagctcctcctgctcgagcgcgagaaggacaagctcaacaggcagctgggcggtatccgcaacatgaaccgcaccccgtccgcgatgttcgtcgtcgacatcaccaaggaggccctggctgttgaggaagctcacaagctgggtatcccggttgtcgccatcgtcgacaccaacgccgacccggacaccgttgagtacccgatcccggccaacgatgacgccatccgcggcatcgaactgctgaccagcctgatggctgacgccgtcgccgaaggtctgttggagcgctccggcgccaacaaggccgagggcgaagccgccgagcagccgatggccgcttgggagaaggaactcctgaccaacgaggctcctgccgaggcttccgctgaagccgccgctccggctgccgccgagggcgaaaccgccgaggcccccaaggccgagtgatgctctacgatgggaagtgcctgaataagcgcttcccatcgttcatgggtaagcaaaatttctcaaggagaataatcaatggcagcaattaccgccgcactgatcaagcaggttcgtgaagacaccggcgccggcatgctcgacgtcaagaaggctctgaccgaagccgaaggcgacgtcgcccgcgccaaggaaatcatccgagccaagggtatcgccgcagccggcaagcgtgaaggccgtaaggctcaggaaggcaccatcgcctccaaggtcgtcgagaccgccaatggcgagaccggctacgccgtcgagctgaactccgagaccgacttcgtggccaagaccccgaagttcgtcgagttcaccgaggaagttctcggctacgccgtggacgccgacgccaactccgctgacgagctgctcgaggccaaggctggcgacaccaccgtcaagctggctgtcgaggaggccgccgccctgttcggtgagcatgtcaaggtcggccagttcgccaagatctccggcgagcacgtcgaagtctacgctcacaagaagtccgccgagatgccgccgagcatcgtcgccatgatcgccaccgacaaggccggcgccgccgtggctcacgaagctgctctgcagatctccgccatgggcgccaagtggctgacccgcgaggacgttccggccgatgtggtcgagtccgagcgtcgcgtggccaccgagaagtccctggccgagggcaagccggagaagatcgttccgaagatcgtcgaaggccgtctcaacgctttcttcaaggaagtcgtgctgctcgagcagccgttcgtcaaggacccgtccaagaccgtcggcgacctgttcaaggaatgcggtggcaacgccaccgcattcgctcgtgtcgaggtcggcaagggcgaagaggagtgagcctaaggcttactccacgcgcttagcgtaatttcaacgaaacgccatccggttattcaataatcggatggcgtttcgctattccaagggtgtcgttgctagggggtgtcgtcgtaaaccgatacgcttgtctacggataatttcgcactttcggttttgagaaaggcacaatatgactgatagcgacaagccgcgcagagttctgctcaagttgtccggcgaagcattcggtggtggcaaggtcggcatagatacccatgtgattcgtcgcattgccgaggaaatcgttccggctgtacaacagggtgtgcaggtggccatcgtggtcggcggcggcaacttcttccgcggtgccgaactgcagcaggccggtattgatcgttcccgtggcgactacatgggtatgctcggcacggtgatgaactgcctcgctctacaggacttcctggagcaggagggtcaggccacccgcgtgcagaccgccatcaccatgggacaggtcgccgagccgtatattccgctcaaggccatccgtcaccttgaaaagggtcgcgtggtgattttcggcgccggtgccggcatgccgtacttctccaccgacacggtttccatccagcgttccctcgaaatccactgcgacgaagtgcttatgggtaagaacggcgtcgacggcgtctacaccgccgacccgcgcagggacgagaacgccaagcgttttgaaaccctgagctacaatcgcgccctcgtggacaatctggcagtcatggacgcctccgcactgtccatggcccgcgacaacaagaagcgcatccgcgtcttcggcctcgaagagccgggcaacgtgacccgcgccctcgtcggcgatgaaatcggtacgctggtctccaccgccgaatcgcgcgtggccgagtaagccgcaaacgcctacaatcgaatcaaacgttcatagacgaacaacacagacgaacaccaacacacaaggagtgaatatgtctcttatcgaccaggccaaggaacagatggccaggaccgtggaaaacaccaaggaaaacttctccggcatccgcaccggtcgcgcaaacccggccctgctcaacggcatcaccgtggactactatggtgcccccaccccgattaaggccgtcgcctccatcggcgttcccgaaccgcgcaccctgtccgtcaccccgtttgacgcttcccaggccggtgccgtcgaaaaggccctgcgcaactccgacctcggcatcagcccgaaccgtgatggcaacgtcatccgcctgaccatgccggaactcaccgaggaccgtcgtaaggagtacgtcaagctcgccaagggcaaggccgaggacggcaaggtcgccgtgcgcaacattcgccgtaagaccaaggaaaccatcgacaaggccgtcaaggacggcgagatgggtgaggacgaaggcgatcgcctgctgaaggatcttgacaaggtcaccaagtccgttaccgacgagatcgatactctgctggagaccaagcagaaggagatcatggaggtctgattcagaccaggtccggagaattatggaacgcaacgaacaactccatgaagaggccgaggagacgctcgaccggatcaacaagaagaccggccgcaacatgccgcaggccatcgccacaggcgcggcactggtcatccttattgtcgcgtgcctgctgctcagcgtcgacctcttcgtgctgctggtagtcgtgttcatgattctggcgctgtgggagctcagggtggacttcgccaccgtaggcctgcacatcccggtgttcatgctgtggctgtgcgcgtccttcaccctcatcgccacctattattccccgtaccatctcatcacgatgtcgctgagtatcatcgtgtcgattattctggtcgccatcgcggccagcgcaaaaatcagcgtcggcaaccgcctatctctggcggttgccggcaaactgtccaacacggatgccagcgcgcgcctcgaatcctcgttcaatcatgagggcggggaacagcatcattcccggctcagccatgtggctgtgtccgtgcttaccgtgttgtacattccgttgctggccagctgcatcatcatctcgctgactttcaatgggcatccgattgcacacgccatcatgctggtgttcctgcccgccctctccgatacgggtggtttgtttgccggtgcctggctcggcaagcacaagctcagcccgcgtatctcgccgaagaagtccgttgagggcctgatcggctcgatgctcttcgccatggctggcgcattcgccgtattcgcatgcacgtatgatgcctcgaaatgggccactcgttggtgggtgccgatcgtggcgggtattctcatcggcgccgtgggcacgttcggtgatttgtgtgcttccatgctcaagcgcgatatcggcatcaaagacatgggccatctgctcaagggacacggcggtgtgatggatcgtgtggattccattttgatgagtgcaccgttcacctgcgccttgctgtgggtcaccggactgtgattcgcatgcctcgtgcatgaacaatgtggcatcgtgtgtatatcgcacggtgccacatgccatatatggggggaatcatcgttcaatatgcgttcgccatgggctaagacatgggccatctgattcgtatgcggcacgccgtatggtggattctgatatttctattgcatgtttgactattttctgatattgagagcgaagcgaacccatcatgaccacacagcatcctgacactccggaaaccggcattactcccggcggcacatcaggtgccttccgtgacgtgctatccaaggaccatgcccgccgtggcaagccgccgctgcactttgtggatatgacgcccgagcagcgcatcgagaaagcggccgaactcggattgccgaagttccgagtcaagcagctcgccaaccattactttggccatttcgatgtgaatgccgctgaattcactgattttccggcagccaagcgcagcgaggccgccgccgcgttcttcccgcagctcatcaccgaggtgacccgccaagtggcggacgaaggcaccaccatcaagaccttgtggaagctgttcgacggctccctcatcgaatcggtgcttatgcgatacccgacccgcaccacgctgtgcatttcctcgcaggtcggctgcggcatgggctgcccgttctgcgccaccggcaagcttggcctgacccgtaacatgtccaccggtgaaataatcgaacaggtgcgtgtggccgccaaaatgatgcgtgatggcgaagtggccgggggagagggccgcctgagcaacatcgtgttcatgggcatgggcgagccgatgggcaactacaactccgtgctgtccgccgtacgacagatttccgccatgcctcccgaaggcttcggcatttccgcgcgcaacatcaccgtatccacggtgggcgtggtccccggcatcaagaagctcactgccgaaggcattcccgtgcgtctggccgtttccctgcatgcccccagcgacgaactgcgtgacgagctggtgccgatgaacaagcgtttcaacaccacgcaggtgttggatgccgcgcacgattattggctggcctccaagcgccgcgtcagtatcgaatacgcgctgatgcgcggcatcaacgaccaggccgagcatgcgcagttgctggccaagaggcttaaccattacggcgacaactgggcccacgtcaacccgattccgctcaaccccatcgagggctcgaagtggaccgcctccaagccgggagacgaacagcggttcctggagatcctgcaccgcgcgggcatcaccgccacactgcgtgacacccgcggccaggacattgacggtgcctgcgggcagttggccgctaaggagcggtagttacttcagcgcatccttgattgcgtccacgaagtagtccaaatcagcgggcttgcgggacgtgatgagcttgaagccgttggcgtcgtccacgtgcagctgctcgtcgacgtaatggccgcccgcgttctcgatatcggcggcgatataacggcagggcgcggcggccttgagatcgcgcagcgggcgcgtcagctcggattctcatattccagaaacgggtgcggcgcatgtaacgggcggtaggtagtctgaaggactgtaatgcaaagccgaacaggggagtgaagcatgtcgttggcggtacgagtcatcccgtgcctggacgttgacgccggtcgcgtggtgaagggtgtgcatttcgaaaacctcaaggatgcgggcgacccggtggagctggcggccgaatactatcgtcagggcgccgacgagatcaccttcctggatgtgaccgcatccagctcccaccgcaacacgatgattgacgtggtctcccgcaccgccgaacaggtgttcattccgatgaccgtgggcggcggcgtacgcacgcccgaggacgtcgactcgctgctgcgctgcggtgcagacaaggtcggtgtcaacacggcggccatcaatgacccgtcgcttatcagccgcgtggccgaccgtttcggcaaccaggtgctggtgctctccgtggacgcccgccgcgaaaagggcgagcaacacacgcaatccggcttcgaggtcaccacgatgggcggccgcaaatccaccggcattgatgccatctggtgggtcaagcgcgccgagcagcttggcgccggcgagattctgcttaactcgatggacgccgacggtaccaaggaaggctttgatctcgagatgattcgcgccgtgcgcaaggaagtcaagattccgatcatcgcctccggcggtgccggcaaggtcgaggacttcccgcccgccatcgaagcaggtgccgacgcggtgctggccgcatccgtattccattacggcatcctgaccatcgccgatgtcaaggcggaactcaagaagcacggctacaccgttcgctaaacgaatacaccttgctcccgctggacgaacaatccagtggattgttcgtagcagtgcgctatgcacatgtcgcacataatccgggagctgtcagcgaagctgactgagggtggtccacataaggaagataggtatgacagacactacatacgacaattccactgaactcgatccccgtattgccgcacgcctgaagcgtgacgccaagggcctggtcgctgccgtcatccagcagtacgacacacacgaggtgctgatggtcggctacatgaacgacgaggcattacgccgcacgctgaccaccggccgcgtgaccttctggtcccggtcccgtcaggaatactggcgcaagggtgatacctccggccatgtgcaatacgtcaagggcgtgtccctggattgcgacggagacgcactgctcgtcgaagtagaccaagtcggtgccgcctgccacaccggcaagcgcagctgcttcctcgaaggcggccccctgtccgtggtcgaaggccaccgcccggccgagcagtagaacgggcttccctgactgggggaagccgaacgaccgcgtactacgaaacaagacatcgagttgtaagtaaaggagcgaatatgagcgaatgcagcgtcaaacacctgaagtggggcgccacctggcccagtcgcggccagttccacgaactggccgacgccggctaccgtgtgattccgatcgtgcgccgtctgctcgccgactcgctcaccccggtcggcttctacgagcgtctcgccggcggccgatccggcaccttcatcctcgaatcggcggaatacggcggcacgtggagccgttacagcttcatcggcgtcaactcgatggcccagctgcgctccaacaacggtcaggccgactggttgggcaaggtcccggttggtgtgccagtcaccggtgacgtggtcgaagtcgctcacgccacgttgaagactctgaaggccccgcatgtggaaggcctgccgaacctgaccagcggtctggtcggcacggtcggctgggatgccatccgccactgggaaccgaccctgcgcgccgaagctccggacgagaccggccagcctgagaccgtgctcgccctggccaccgatatcgccgtggtcgaccacgtatccggttcggtgtggctcatcgccaacgcggtgaacgtggatgataaatccacccgcgccgacgtcgcctacaacgaggccgtcgctcgactcgaccagatgcagcacgatgccgccaccccggctccgggcgagtcccgcgtcaacatcttggacgaaacggtcgcccagcctgagctgcgcttccgcaccgagaaaagccactacgagcaggccgtcgaacgcgccaagcagcacatcgtcgacggcgacgtgttccaggtggtcatctcccagcgtctcgacatcgattcgcctgccgacccgttcgacgtgtaccgtgtgttgcgcacgctgaacccgagcccgtacatgtatttcatggcgttgaccgatgctcagggccgcgacttcaacgtgatcggctccagcccggaaaccctcatcaaggtggacaacggccacgcgatgaccttcccgattgccggatcccgccctcgcggcgccacccctgaggaagacgagaaattcgccaaggaattgcttgccgatccgaaggaacgcagcgagcacatcatgctcgtcgacctgtcccgcaacgacctgagcaaggtgtgcgtgccgcagtccgtggaagtcgtgcagctcatggacatcaagcgtttcagccacatcatgcacatctgctcgacggtcaccggcaaggtcgacccctcgctgaccgcattcgatgtgttcaagtccgcgttcccggccggcacgctttccggcgcgccaaagccgcgcgcagtcgaaatcatcgacgagttggaaccggccgaccgcggcatctacggcggcaccgtcggctacttcgatctctctggcaacatggacatggccatcgccatccgcaccgcgttcctgcgcgaccatgaggcgagcgtgcaggccggtgccggcattgtgctcgactccgtgcccgctaccgaatggcaggagacgcgcaacaaggccgaggccagcgtcgaatccatccagatcgccgcccagctgcgcgaactgtaacgttcaacgcataacgatgcccctgctgacaactgctgtcagcaggggcataacaatatgcgtatcagtgggtttcgcccatgatatcggtggcgtcggttccggtgcccacagcggcctcgatggcggcttcgatgccgcgcgccatggtcgcgatttccatggtcggcgtgccgttcggcttgcccacgccctgcgcggtcgcatacggcacatgaatgaagccgcccttgacgccggggaatttgcggtcaatcagatacaacacgttatacatgatgctgttgcacacatacgtgcctgccgtatacgacatgaatgcgggaatcccgtggtcattgatgttcctgaccatggccttgaccggcaacgtggcgaaatacgcggtgtcgccgtcctcacgcaacggcgtatcgaacggctgctcgccatcattatcgggaatacgcgcctcggccaaattaatggccactttctccacggtcagagccgaacggccaccagcctgaccaatgcacagcacatagtcaggctgctcgcgcaccatggcttcctcaaccacggtcgcactgcgcgtgaacaccgtcggaatctccagtttcaccactgtcgcaccggcgatttcatccggcaacagcttgactgcctcgaatgcggggttaaccggctcgccgccgaacggatcgaatccggtcaccagaatcttgctcatcattagctccttatttcacggattgttgtggtatttggacaacgaggttattgcgcgatcagcatatagacgatctgcaccacaatcatcaccaatgcgggcagcacctgcttcttaatcacgcccatgcggtccttcatatcgagcatcgcgacgggcacgatgttgaagttggcggccatcggcgtgcacagcgtgccgcagtagccacaggtcagcgccagaatgccaatcaccgccgggtccgcaccgtaggcgagcacgaatggcgcgccaatgcccacggtcattacggtaatcgcggcgaaggcattgcccatgatcatcgtgaacagcatcatgcccacaccgaatacgatgatgcccagcgtgacgttgcccttcggaataatgccgccgaccagcgtggcgatcacgtcgccgacacctgcggctgtgaaaatcgcgccgagactggccagcagcatcggcagcatgcagagcgcacccatggcagacaacaggcgttccgaatcgttgaggaatacgaccggcttgttgtcatgcgagaacgcgaacagaatcacggcggcaatcatcacaccgatgcagcagccggtcagggcgctgacgctgggaatcagggcgccgataatggcgaacacgcccagacacagggcgggaatgaagatgcgcatgccgatgcgctggaagttcgcggccacttcggcggtgctgggagcgctcgaatcggatgccgagcccttacgcacttggcggaagatggcgggaatgaccatgatgataatgagcacgccgtccgcaatggccggaatccaacggccgaacgcgatgacgataccgagcgccgtccagaacacgaaagtgccgtagcgggccttgttggttttatcgagtaggttgcgtacgcccgcatacacggacatgaaacccatgaaaatatagaagaactcgaggattttcgtgccaacggtcacgctggggtccatgaagaacgacatatcaggcctccttgccggtggtggtagcggtggcggcctgagcggcggcttcggcaccgtagtacttcttgcgcagtcgtgtgtccttgatgatgtaatagacggcggtgaccgccacggcaatcaccgcgacaggaatctcgataatggccatgcgcaacagttcgacgtcataacccagcggcttcaacgtggactgtacgagcagcgcaccggccgtacccacgaacagcacctggccaaagaaccatgcgacgttctccatgccggaagccatgcccttgagctcttccacatactcgtcgttcggctcgtgaccggacgctgcaatcgcacccaccgccatcggcatgatgaccggacgcacgaacccggccacgccaccaaaactcacgttgaacgcggcgaacacgagacgcatcacaccatacagggcgatcaccataccgggcgtcgcattcttcactttgccgatcagctgcgcagctgcggttttcagaccgttgcgctccaatgtgccggtgaccagcaacacgatgatgaaaaccgccatgctgcggttcgagacgaacgacgtacccaacgtggtcaggaagccgtcgacgccaatgccgccgaccagcgcagtcaccacagccgccacgataatgatcagaatcgcatcaagtttgagggcgaaacccacaatcacgatcacgattcccaataacacgagataatttggttccatgcgggaaatccttcctatactgcacacgcattgcgccgcaagcgtgcccggatatggatagtgtacgacggaaatcacgattcaactgtcttatcgcgcacattgcaggtattacatgagcctacgggcatataagcgtatggacgcatgagcgtcggctgagcccggtcggcatggtgttcgctatgatggacagtcggactttggtaagagacagtattcgtaacaggcaagtaggttattcatggctattgaggtgcagggacttgaaattcagatcggcgcgcgcacgctgcttcaccccaccaacttccatgtggccaagggagacaagatcggtctggtgggccgcaacggcgccggcaagaccacgctgacccgcgtgatcaccggcgacatgttgcccaccgccggcaaggtgcgcgtctccggcaagctcggctacctgccgcaggacacgcacgcctctgatcccacgcagaccgctctcgaccgcatgatgagcgcgcgtgacatcgccaccatcatcaaccgcatccgcaaggccgaaaaggatatgaccgacccggatccggacgtgatgagcaaggccatgacccggtacgacaaggccatgcaggacttcgacaaggctggcggctacgcggcccagtccgaggcgatttccatggccgcctcgctcggcctgccgcaggaggtcatggagcagcagctcggcacgctctccggtggccagcgccgccgcatcgagctggcgcgcatcctgttctccaacgccgacacccttattctcgacgagccgaccaaccacttggatgccgattccatcgaatggctgcgcggctacttgaagaagtacgagggtggcttcctggtcatctcccactccaccgaactgctggacgaagtggtgaacaaggtctggcatctggatgcgcagctcggccagatcgacatgtattcgctcggctggaaggcctacctgcaccagcgcgtggtggacgaggagcgccgccgccgcgaacgcgaagtggccgagaagaaggccgaccgtctcatgaagcaaggcatccgactgcacgccaaggccaccaaggccgtggcagcgcagaacatgatgcgccgcgccgaaaagctgctggaaaacacctccgaggcgcagaaggccgagaaggtggcggacatccgtttccccgagcccgcgccctgcggccgcacgccgatcatggccaaggatatttccaaggcctacggttccaacatcgtgttcgccggcgtgaacctggccatcgacaagggctcgcgtgtggtgatcctcggttacaacggtgccggcaagaccaccacgctgcgcctgctggcccacatcgaggagccggacaccggttccgtggaatacggtcacggctgcaagattggctacttcgcgcaggagcacgacaccttggatctgaacgccaccgtgttggagaacctgcagcatgtggcgcccgagctcgataacacgcaggcccgttcgattctcggctcgttcctgttctccggtgacgacgcgatgaaaccggctcacgtgctttccggcggtgagaagacccgtctggctctggccacgctggtcacctcgcgggccaatgtgctgctgctcgacgagcccaccaacaacctcgaccccgcttcccgtgaggagattctgaaggccattgccaagtatgagggcgccatcgtgctcgtcacccacgatgagggcgccgtcgaggcgctcaaccccgagcgcgtgctcctcatgcccgacggcgacgaagacctctggaatgattcgtacctcgaactcgtagccgaagaatagtcctacctcttggctcccctcactgaggggagctgtcagcaaagaacgggttaaccctaggttcccctcgctgaggggagctggccgccgtaggcggtctgaggggagtctcgcaagcatgcaaaggaatcaaccatgccaaccacaacaggccagaagatcgccatcgtcaccggcagcgcgctgggtttgggctacgagctcgccagccaactcatcgccaagggctggctggtggccggcatcgacttcaacgccgaacgtcaggccgagctgagcgcgcagtggccagccgaatcctaccgcgccttcgtaggcgacatcaccgacgaagcgtttgtcaaggaatccgtggcgagcatcgccgcgctcggccacatcgacctgctcatcaacaacgccggccagccttcgttcaaggtgcccaccgcctatgaagccgctgacattgacaaatgcctcaaggggctcaaaggcatgattctgtggacggtggaaaccctcaaggcctgtggagagcgcgacgtgaaaatcgcccagatcatgagcaccgccgccacgcgcggcaacgcgaacgaaagcgtgtactgcgccaccaagtggggcgagaagggctataccaagagtctgcaggccgcatacaagggcaccagcgtcaaggtggtcgccgtctatccgggcggcatcgacaccgccttctaccgtgatagccacgattacgtgtccgaagccaagcagcacaccttcatgcagcccggtccgctggccgaagtcatcctcttcaacctgatcaacgaggccaacctcaccgtcaccgacatcgagatcaaccgcaacagctgagctggcaggttatacacatatccaccgattcggccgagctggttgcgcgcagaagtcggttatgccatcgtgagttgtatccgtgaataacgcggttcacggatacaaccatcagggggatggcatggagtcctatgcatacaacacgttcttcacacttgatgaggcgcgagacctcgcccagaaaacactggaacaatgccgtgccagatcgatgcgcacttcacaggagctttgcttcagccatggcaccaggctacagcttgctggtatgacggccactctgaattacaagcccaactatgacctcaacaaactgcacattacggtgtccggggctgaaagattgtcgaatcttaccgaaacgcaatgccattattggggtcatggcattgaccagatgatgattgatgatcttatcgccgtggcttcagtggaacaggcgctgtgtcagatcgcacagttcgtcgatgtggaaagtatggtcattgccttggattgggccacctgtcgtaatgagcatttgaaacagacaacgaaagacaagatatcgttgttcctcgccgatataggtagattcccaggtatcagattatttcgcaaagcgctctcgttgtgcagagagaacaccgattcgccgcaggaaagcatccttcgccttgaatcggtaaaacgtggattacccgaattggaggtgaatgctccgatatacctcccgttgcagaacaaagaggtggttgtggacatggtgtatccgaatgatcatgtgattctggaatacgacggacggtaccactatgaccgaaaccgatgggaaggagatatcgagaaaaggaacaacctctccttcgcgggctataagacttttcccgccacaagaagaacgttcgctaccacgcagaatctggatgaatacttcagaatcgttggaagtgcaattgcggaataccgcaataccgggtcattttcacaatgagatatgaccggacgcattcattaggtcgattcttcattcattaggtcggtgagctctgacagtcaccactggaatggcgtcatcccaatggtgacaatcacagcctcatgacctaatgaatgaagaatcgacctaatgaatgattggaagcgttccgtgcaacgttatggcacccgcaagaagccggaacccggaatatgtctgttatcgtgggagccaagcaacaggtgaaggattgagtatgcacatcggtgacgatgagtttgaacgggccattgaacaggtgttggatgatttgcctgaacggtttgcgcgggtgctggagaatgtcggcatcgtcgttgcggacgaacccaatgagcgcgaactggccacaatgagcaatccgtgcggtgagctgctcggactgtatgagggcatacccatcacgaagcgaaccacgggctacagcggcgtgatgccggacgtcatcaccctgttcaaggggtcgcatgaacgcgtatgctcaacacaggccgagctgcgccaacagattcgcaaaaccgtgttgcacgagatcggccattatttcggcttcgatgacgagtatctgcactcgcacggctactgaagcgctgctgtttcactagcggggagccgtcataccgccgtatgttgccagatctactgcaagtggtgcaacgcacggatgatggcgcaacggtcctcggtggttccctcgttggcgcacatggtgtgcgtaccaacgcggattgcgcaaggtctcggcgccggtggcctcatccgtggcgacgagcgtgtgcagatcgttggcgtactggaaatgcaggtggctgagcagcccgccctcggcgaacgccttgcgcgaaggcagagggttgatggccagcagccagcggaacgggctgtcttcggcggccgggcttgaagccagggccgcaatccggtgccgatacggttccaagtcaaacgcccgcaatcccatggcggccacgcagccgggggagagggacaggaattcatcggcctcgtaatcctgcacgatatgtccgccgtcgaataccacgtaccggtcggccacgccgttgagccatgcgagtcggtgatgaaacagggcagcatcatcgtgacgcccacggccagcgcggagaccacatgcagccacggcagtcccagggcatcggggtcgagcattcccagcgcggtgagtacggcataggtcacgccgaagttcaacgcggttcgccatcgggcggccgccagcaggggcaacaggaacagcacgaccatgacgatttgcgtggcgagccctacatggaagaacagcatgaggttcgccaccagcagaaggaagagtctcgcgcgcggatcgagcgtccggcgggcaggaagatggagccgaagccgctggtgaacagggtgctcaccagtgtggcgatgcacaccatcacgaagtacagggccgcaaacacgccgatggtgatgaggtcagagacctccagtttgccggatttggcgggcttgttgagctggtcagaggtttcggcgggcgtgttcggtgcggtcacgatgttttccgtttcgtatgcattgacaatattcctctcgccaatctaacgatgatttcccgcaaggcaatagtctgtctgtgatttttgcgtgcgaaacaatagagctcccctctttgaaggggagcctgagtgttccatcaaaaccgaatgctcgcccggaactcgccttcggccagttggccgagttccagcctggctcccatcgcctcgcatgccgcactggcgatggacaggccgagccccacgccgggcacggcgctgatacgcgagttctcgccgcgatggaacggttgggtcagctcgttcagatcgtccggcagcatctcatccgtggtgttcgtgacggtcagacggggtccgcttccatcctcatccgatacgacggtcacgtcgatcgacccatcatccgtgttgtgcacgacggcattgcgcagcaggttgccgaccgccagttccagcaacgccgggtcggcggcgatgagaaacatgtccgcgtcgccgccggccttgttcacggttatggtgatgcgacgcttggtggcggcatcgtcgatatccgcaagggagttgccgacgcatccgtacaaatctgtggatgtgcgtgccgttgatgcgggactcatctgtgtcacatcgcccgcctgcttgccgccgatggtcccgctttgaatacgggacaaggtcagcagcgcctgcaccagttgcgcgccgcgccgattggcatccagtgcgcgctgtaccgacggtcgcacatcctcggggaaccgcccctgggccaacggcgcgtccagattggtctccaccgcggcaatcggcgtgcgtagctcgtgcgaggcattggacacgaaccgccgctccgcttcggatgcggcctgaatccggtcgagcatgccgttgatggcgtcaccgagctgcgtgacttcggaggattggccggcagctcgaccgtccgtgcggctgtccgtgcggctgtccgtgctatgatcccaatcctcggtcccgcgtctgcccgcacgccggaactggggcctacggcgagatggcggcccattcacgtcgatgcgcgtatcaagtttggccgggtccaatgccgccgcctgcgcgctgatggaggtcagttgccgggacatgcgcgaggtgaccagccagatgatcagaatgctggtgatcccgaagaacacgaagatgatggccgcgctgatgcgcaatccggtggcgatgttgtcctggttccacacggagacgccatacggggtgttgatggtatacgacccgtccttgccccattccacctgatagtcaccgtcgcccatatcgccgccgacgctggatgttccagtgatatcgttcagacctgtgccgcttccccgggaaaacattcgcgggtcggaatccgggcgtttgccggtgccggaaccgctgtgctggctttcgacctgcatctcagggtttttggcggtgaccgtcgtggcgtacgtgaacatgctgttgaccacaatggtctgcacgagggtcgccgatcccatggcgatgaggaacacgagactgatggccaacgtcagtttggcgcggaatgatttgggccgcagtttgccggcaagcgcctgtatacgacctgatgctttcgccgtgttcgtcgccttcattgcagccggtatccttccccgcgtgtcgagacgatggcctcgcgatcggcgagtttgcgccgtagcgaatagatggtggttttgatcacgtcggtcgggtcggcggcggtcggctcatcccaaaccgcatcgtagagttcgtgcgcggtcacgtatccgccttccgcacgcatgagctccagcaatatgccgtactccttgggtgtgagtttgacgagcgtgcgcccgtggtcgcggaacacgagccggcgtgtggaatcgagggtgatgtcgccgcgcgtgagcacggctgcggtcgcgttgctggtcccgctgcgccgttgcagggcgcggatacgggccagcagttcgggataggcgaacggtttggtcaggtaatcgtcggcccctaggtccagcccgctcacgcggtcgctgacctcggcggcggccgtcagcatgattacggccacgggaatgcggttcgcggcgacggtggccatcaccgcgtcaccggacaataccggcagatcacggtcgagcagcatgatgtccacgttcgtgccggcaaggatcttcaacgcttcgacgccggtggttgccagactggtcgcgtacccctcgtagcgcagcgcgtcgtccaacgcggcggccagttcgcggtcgtcctcgacgatcagaatccgcatcatgtccccttccgagccttcccgaaccaatggcatcacccaacattttcccgattctacggtaaggcgaaagtaatccgtccgcttaccgacgctccacggtgagggcgattggatggaagtcgtcacaatcgactcacggaatggagacggtaatgtccactactcatacgcgcctggtacggcgaatcgcaatgcttacgtccgcactctcgctggcttcgatgctgggcgcctgctcgtcaccgctggcggcagtcggaacaggctcaggtgccgacgatcggtccgatgcgacgaccaccaccgacgccacggcgaagcgattcgccgcctgcctgaccggcaaaggattcgacgcgcgtacggctgctggcgtgtcgtccggctccggctcgggcaaacaagccccgaccaaaaacgcggtcgcactgcgcatgatcggcaccgacggcaagccggtcgcctcccaaggcaacagcctcagcgcatccgacgacggcccgcaactctacccgaacgctgcctacacgtcgatggaagacgacagcacctgggtggtgttcaaggacgccaaggcgctcgccggctcaccctacgaatccaaacagcgggaatacgccgactgcgaggccaagaaccccgacttcacccagcccattccggacatggggccgcaacaccagtattccggggaagacaagcaggcggcgctcgcctacgcccaggccgcgcgtaagaagggcttcgactgggtcaaggacccggacgccgatacgcccacctcaatcacgattcccggcaccgtaagcgaatccgaactgcgccgattcctcaaggaatgcccgaccgatggcgcgaacatctcctatgccttcgccggcaccaccgaggaattcggctatgactacaacaaagtcctctccgaattcacctccggcagcgcgtccaccgaagccgcgccccagcaatgagacggccatccgataacggacaaaggagcaatcatgacacggacggaagcgcgcagattcgggaaacaccgcagaatcgtgacgatgattatcgcggcgatcgccgtgatcggactggccgcggtgtgcgtggcggtgaggccgtggacgttggccgggcacgtcaccgcgaccgggcagactggccgatcgcagcaggtggatgtgtccacgctgcgcacgcaggaggtgaccaagggcgtactcaacgccgagacccggctcggcgcgagtctgcaatacgatgacgcctccgatttcgcggccgcttccggcacaatcacccaactgccggtggccggcaaacagatcaacaccggcgaacaggtgtacgagatggacggcgcgcccgtgccgctgttccatggcgaccgcccgttctggcggacgatcggcgatggcgtctccgacggcccggacatcacgcaactggagcagaacctgcaggaactcggattctacggcggtgaggtcggaccgcatttcaactggctgacccgcgaggcgatccggcaatggcagcgctcgctcggcctgaccggcgacgcggtcaccggcacattcgacccgaatacggtggccctggccgcggccgcaccaatccgcatcacggcggtgaacgcgaaactcggccaatcacaggtcagcccggcaagctatacgggcgtcaccctgcatgcgcaggccacgttgaccgccacgcaggcggcgatgttcaaagccggagacaaggcgcaggtcgtgctgccggacaacaccaccgtcgaaacgacgctcgcctcggtcgatcagggcgggcagaagaccggcgacaacgggcaagccacacagccatcggcgcgcatcgacttcccggaccagtcgcaggtggcggctttcgggccgacggccgtgcaagtcatcatcccgaacgccgatgcctcgaccggggaggcgctgatcgtgccggtgaccgcactgatcgccagcgccggcagcgcgtatgcggtcgaagcggtacgcggcggcaagttggtgcgtgtgccggtgtcaatcgggctggtgtccgacgcgcaagtgcaaatcaccaagtccgacggcctcaaggcgggagacaaggtggtggtctcatgaacgacatcgagtttgcccccgctggcccagagcatggggcattgctgacgttggagcatgtgacgaaggcgtttccaggcaaggacgggagcgtgctggagatattgcatgatacgtcactggccatcgatcgcagcgagctcgtggccatcgtcgggccgtccggctcgggcaaaagcacgctgctgtcgttactgggcacgctggacatgccgacctcgggaatattgcgatacgacggcggggatgtgaatgcgatgggtgagcggcagcgcagcgtcctgcgggccgcgcgcatcggcttcgtgttccagcagttccatctgatcgccaccgtatccgccttggagaacgtgatgacaggcctgcaatacacaaccctgccgcgcggcgaacgtcggcaacgggccgccgaggcgttggaacaggtcggattggggaaccgcctgcatcaccggccggcccagttgtcgggcggcgaacagcagcgtgtggccatcgcccgcgccctggccaaacggccggacatcatcttcgccgacgagccgaccggcgcgctggactgcgaaaccggccacaccatcgtcgacctgctgctcacggcggccgattccggcgcaagcctggtcatggtcacccacgaccagaccatcgccgcacgtttccccaggcgtctgcacatccaagacggcctagtcaccgaactcgacaagccgaatcaagccccctctgacgaggggctgtcagccaaaggctgactgggggagagatatgagtgaacgtactcctatgagtaaaccaatacgcacgcgaattgcggatttgatgcatgcggcttgggttggggccgccgggcgggcgtcccgcacggtgctggcatcgctgggcatcgcgcttggcgtggccgcatatgtggcgttgtccggcatcgccgcatcgaaccaggcagcgctcctcgcccaactcgacgcgcttggcgcgaatctgtcggtggtcgcccccggcgtggacgccgcccagcagaaggttccgctgccggattacgcgcccacaaccatcgcccgtcagccgcaggtcgaacgggtcggtgtcttcgacaccgcgccagagaaggtgcagatcttcaagaacgggctgtgccccaaaaccaacggcaacgcgctggccctcgccatcatgcggcccggcgcactcgacgccgtcggagcaagcctcgcccaaggtcatggcatcgacgcgaacaacgagcacctgcccgtcgccgtgctcggctcggacgccgcctaccggctcggcgtcaacgagcccggcgaccgcatcctcatcgacaacgcatggtacggcgtcatcggcatcctgaaccccacgccgcaggctgaaaacctgaacgccgccgtcatcatcggcgagcaatgggcgctcggccggtaccccgaccaggccgacaccatcggacggatcagcgccatctacgtgcgcaccacgcccggcgacgccgaatgcacccgccgcacgctcgcccacgccgccaacccggccggcggcaacgtgtccgtcaccgcgtccgccgacctatccaaagcgcgcaacaccaccaacgattcactgaccacgctcggcctgatgatcggcgtgatcgcgctggccgagggcggcatgagcatcgccaacatgatgattgtcaccgtgatggaacgtcgcggcgaaatcggcctgagacgcgcgctcggcgccacgcccggcaacatccgcatgcaattcgtcaccgaagcggccctcctgtccacactcggcggattcgccggcatcgcgctcggcgccggcgctgccatcggcgtcgccgctagtgccggccagccgatcgccctcgactggacctccctgccgctcgcctgggccgccgccatcctggtcggcatcctcgccggcctctacccggcctcccgcgccgcccgtctcaccccgaccgaggccctgcgcggcgaataggggcgacggctggagtgaacgatcaccatgagtgcgcagcctcaatgtcacttttactgcacatgatgacatgtgcagtaaaagtgacatattggtgctgggcgggagagagcacgcgtggcgcgggcggggtgtggttcgcggctatcggctagtatggtgcggtcacgacagagggaggcatgctgtggccgatgtgatgcgggagctggaacggctgcgaccggtgtatgagacgggcgtcctgcggttgctgttgcgccagaacgcgatgctgtacgtgtcgctgctgcgttccatgttcgacccgctcaccggcgagctgccgcgcgagaccgtggaggagcggttcgcgcaaagtctgaacgctctggccgatgccggcgaatatgcgccgcgcgaggaccagaccttcgccgaggccgcccatcagatcctcgccgacctgacccgtgaaggcgaaggcgactacgcctggctcgccaactcgcatgatgcggccacacaccgattcctctaccgtttgacggcccgcgcccaccgcgccatcgaggcactgagcaggctcgaagacgaatcacgcgccctgtccggcgcgcaggccaacagcatcatcatggaaatcgaacacgcgcgcatgcagctgaccgccgaccccggcgagcgcatcaaactcctcaaccgtgaaatcaaggaacgcaagcacgagatcaaacgcatccaacagggcaagcagcacgccacgctgagcgaagcccaagtggaggacgtgatcgccgtgatccacaacacgctgcgcggcgtacccatcgacctgcgcgaactcgtgctcgacgagcgggacaacggcgacgccttgcgccggcgcatgcagaccggcgacatcagcgtggacgagaacctgacccgctaccacgacgaataccgccgctcgttcagcgaatcggacagcggccgccgcttcgaggacgccttccaggtgatcatcaccgacgagggccgccagcaaatcgacgaagccctgcgcgccatcgccaaaaccccgtatctggccggcgaatccggcgtgctgctcggccagatccgcgacgaactggcccgcatctacgacggcatcgaagccgtgcgccgccagatgcgcgtctccgacgaggcgatcagccggctcgtgcgccagcaaaccgacactcgctaccgtacgatgctcacccgcttgaaccgactgtacgcgcgcctcaacgcggatgcgaaaacccatatgggagacgcctcgcgcccgtacgacacggccaccgcggacgcgctgttcgcgccattgccgatgcgcccggccaaatccatgacccgcgccaccgcacccggcctgagcgacctcgccgccgaagccccgcaggcgactccggtggccgatctgcgggatatggtcaacagcggcggcccccgattcctgcgcatggtcagcctcatccggcgcaacccggtgaccgttgacaggtccgatgacaggtccaacgcaaccctcgtggacatcgccgccagcttcaaccggctgcccgaaagcgaacgccgcgaaagcgagatcgtcggcttcctgggcgggctgggagccgtaagcggcagcgccatcgccgacgagccgtccactgacggcgtcggcatcgacagcgacatcgccaccgagccggccccggcgcagcgcggcgataccgcgacttggcattgcgtatcgatcgacggcgagccccggaactggatcactagaccggtgctggccgacatggacgagctgaacatcattgtggaggaaggatgaccgtggccgaggaacacgaggaacatatgaacgccaacccgtacgccctgttcgaaggcgacaccggcgacatgccggccgaggcacgcatggccgccatcgccctcaaacgcgaccgctatatcagcgggcccacctacgacaccgtgctcgacaaccgcgacgccgtcgtacgctccctgaacaacgacctgctcgacttggtgatcaacgaacgctaccgcatcatgtacgccacgcccgtggccggcgacgacgtgaccctgcgctcgctcaaaacccgtgtcagcctcaaacgcgaggaggccgcgctgctcgccttcctgcgcatccgcgtcctcgaatacgagaacgtgcacgccgaccccgccgactggctcgtcagctttgaggagatccgcgccgcgctcgccaccggcgccggttacctggcagcccgcaatgacgaggaaggcgtggcaaagcagatcggcgccatcgtctccgcgatgatcacctacaggtatttggcgcgcctggacgacgaagccatgtaccagatcacgccgctcgtgcccgtggtgctcgaccgcgaactggccgacacctggctcgacgtcgcggaacacggcgacggcgacacggaagatggcgatgacgacgagaagggagccgaatgatgcaggcgacagacgtgcagatgatcgcggaccggtggatgctggaatcccgccgactcatcaactggggctcctatgagggctaccacgaattccgcccctccacggaccacaagctgccggtgaccctgctcgccggcgccagcgaatccggcaaatccacgctggtcgacgcgcagatctccctgctgtacccgaccggcacgccgttcaacaaggcctcgaactccggccgctccgaacgcagcgactacacctacctgcgcggcatggtcggcgtgggcagcaccgaaaccggcgacgagccgctctacctgcgcggtcgcgacgagaacggcgcgccgcaacccgtgtggggcgccatcgtggacacctatcgcaaccagaccaccggccaggtgctttcctgcgccaaattcctctacctgatgcccggcgacggccgcggcgacgtgcgccgccagtacgtggtctggggcaagcccgtggaccccaggcgcatggaccaataccgtgacgccccgttcacgccagcccagctcaaagccacctaccccgactgcctcacattccccagcgccgaagcgttccacacacacatctggagcgcaatgggcctgagcgaggccgcctgccgactgctgcacaagatccagtccgccgacgcgccctcccggctcgacgacatcttcaaacaaggcgtgctcggcgtgcccgaagccctggacctggcccgcaccacggtcgaggactacgaacgttacggcgagaacttccacgccatggacgagaagacccgccgcatggacacgctgcgcggcatccaacaggcctacggcgaatacgccgccgcacgcggcaaggcccgcgccttcgaaccggtcaagccggccgtcgacggcacggtgccggccgtgctgcgcgactgggcattggcccgcatgcgcggcgaagtcgccgtccaactgcccgccgaccgcgccgaacaacagaacagcgaggcggaagccaagctgctgcgccgccgaaccgaagacctgcgcacccgcctcgacatgatccgaggccagatgcagggtctggacggcggcaacctgacccgactcgaactcgaactcgaccaggcccgccgcaccctcgaagacatgcaagccaatcgaacacgaatcgaacaaacgttcgcatccatcggcgagacgctgcccggcaacgaacagtcctggaacgaacgccgcatcaacgccgtgaacttcaaacgcgaatacaacaaacgagacggcgaatgcgaggaagccctcaccgccgccatcaacgcacgggccggcgcacgcggcgacctcgaacgactgcaacgcgacttcgaccggcaacgctcccagcgcacccgcatctcccagcagatggacgaaacccgcgccatgctctgccgcgccaccggactcgcccccgccgaactgccgtacgtggccgaactcatggacgtgaacgaacacgaggaagactggcgtctcgccatgaacgtcgcctacgcgcccatcgcccagaccatcctcgtcgacaagcgccacgaacagggcttcgccgcaaaagtcagcaccatcgacccgcgcaccatgccccgacgcacctggcagttcgtggacaccgcacgccactacgacgacaccggcgcgcacgcgaacatactcaccggagaacaggacggcgactggctgtccggcaaactgcgctaccgcgacgactcgcccttcgccgactggctgcgctcgcagacccaggacgaacgattcgacgccctatgcgtcaccgccatcgacgacaccgaccgcaccaaccgtcaggtgcaggccgacggtcagatcaaatccggcgcacgcggccagcacggcaccaaagaccgcgcccaggtcatcggattcgtcaacgaaacctacctcaacgcgctcgcagcgcaggtcgacgccgcccgcaacgcgctcagccaagccgacaccgactacacggccgccaaaacacagtccgataacctccaccgcgaactcgaactggccaaccagctcgcctacacgtcctgggaacgcatcgacatcgccggcgcgcaacggaccatcacggacacgcaggacgccatcgcatccatcaaaaacgatcccaaactcgccgaactcgccaaacagcgcgacgaactgaacgccgaactcgaccgtgtggaacgccagcgcatcgaatccgaccaggccgcggcccgcgccggcagcgccgtcgaagcggcgctcatctggctgcgcgaccatgccgacaccggcacgacggacgccgccggtgccaccgccgacaatgacgatgacgccaccgccggcccactgccggacgaagtcacggcggcgctcgccgaatcctacgacaaccgattcgccggattggcggacgcggccatgcgcgcgcacatgatcatcggcgcgggcgtggcaggaacgcgggcgccgggggagagtttccccgaacgcaccatcgccggcatcggcaaggacatgacctcccgcatcaacctgctgaacggccaggccgacgccgcacgcaccggcgtcgaatcgaaaatgagcacctacatcgcgctctacgcggccgacgatgattcgctgaccgccagcgtggaggactaccggtactatctcgacgaactcgccagcctcacccagctggccgcggttgccgccaccgacgccgaataccggcgctgcctcgaacagctgctcaggagcttcctgaccatcaaacgcgccatcgacacggatgccagcgacatccacgaccagcttgaccgcatcaacgccatgctcaagggccaacagttcggccccaagcacggcagcctgtccctgcacgcggacgtgcgccgtcccgagcgcaccttctgggcgcagctcatccgcgtcatcggcaccctgaacgattggaaatccgccgacgtcaacgattccgacgcctcgcgcaaggctttcgcggcctgcgcgccgatggtcgggctgctgcgcgccgaactcgcgcaggtcaaggacacgaacggcgtgaaaagctacggcgcccgcaacctcgacccgcgctgccgctcgtccttctacgccatcgtgcatcatgccgacggtccggacgaacgcatcacctccaccggcggccgttcgggcggcgccttgcaggagctcacctcgttcgtatacggcgcggcgctcatctacctgcttggcggcggcctgaccagcgagccctcgtacaccacgctgttcctcgacgaggcgctcatcaaggccgacggccgttacacgcagcgcgccctcacggtgctgccgcgcctcggattccaggtcatcgtctccgccccggaaagcaagaccggtgaaatcctcgaggtctccaccaaggcctacgtgacctacaaggaccccgacaccggcctcacctccctgtgcgaggccgtgctgcatcagaatgacatggacgatgaatcatcgtcggatatattgaaggatgacggggttgccgaatgagcagtcccggcgtcgccggtattaagacgattcggttcgactcgacgatgttcgaaagcaggtgatgggaactatggccggcatgaaagacatcgctgcgatcaccacatgcgtgaagaaacatatgcgttcacatatgtacgacatcgaaccggcatggccatttcccgtgccggtgggattgccggaccaagcatttttggaaaccaatgcgattgcagtgcatgacaacaacaatgagatacggcaatgggcaagcaagaatggttgcgaaatcataaccaagcatcgcaccataggcacctctgtcgagttgatctccaaagtcgtcgttcctgacgaatcaatagccatgcgtgtggttggtcgtacgctggcggcggaatatcgcgaagcgcaccgtcgcacagattccactgacaggattcagcggcaaatggctgaatgagtcaaaaaccaatcgtcgtaaggccatttgccgactgctcggtgtcgaaacgttgggtctgtcaaaacggccgaccgaactgcggttccgttatctcgatccgggccacgacgattttggtaccgatcgtactgaacgcagcgcgaagattgctatgcgggagcctaagccgacgcccggccttcaatcggcggagcgacgtctttatgaacgactgtgtgctgacaaaaccatcgcttatcggcgtatcgaacaggaacgcattcccatgcgtgatgcagttgacgaattacgcaagcttggcatccccgtggagtccattgaagattttgtcccggttcgaacatcaatcgtttgacggacgtaccggggcagaatccgttgtcccggtttgtgatttcgggtgtttttcgcgaaccgggacatgttgtgttgccccggtatgggcgtcaatcgtttgatgcgagaatcgggacaacatggcgattctgagattggctttattccgccgtttccgttcgcgttttatgtggttcgtggaaactggaatgtcctggttctcgaaaacaggccaaaatcacgaaccgggacagcgggttttgccccgatgcggacgtcaaacgattgacatgtgaaccggggcaaatcagaggaggagaggtcttcgggatagagcttgactggggctgggcgcacggttgatgtcgcgtgggccggctcttgcgtttcggtccactgatggtccggaattttgcatactatggttcggttttccggcctgacacgccatcgaacaagcgttcgaatttggtcgtgtgttcgggtatccttgggacagatttggcgcgcgcataaccgtgcgcgcgggaacggtgaaatggaaggtggggtgtggctgtggcggcaacgcggactggcgcaaggcgcgcaacaagcgcaaagggcgcgaaaaccagcaagggcaagaacggtgaggtcatcgtcgaaaaggtgatgaccagcgactccttcctgagccgggaaatcaaaaaggcgccgctgatcgaacacgatggttcgctggtagctgatatctcgcacatcccgaacgatctcaagatcacgattcagggtgcgcgcgaacacaacctcaagaatgtcgacctggcgattccacgcaaccgtatggtcgtgttcaccggcctgtccggttccggcaaatcctcgctcgcatttgacaccctgttcgccgaaggccagcgacgctacgtcgaatccctgtccgcctacgcccgccagttcctgggtcagatggacaagcccgatgttgacttcatcgagggcctgagcccggccgtctccatcgatcagaagaccaccaaccgcaacccgcgttcgaccgtcggcaccatcaccgaaatctacgattacctgcgactcctcttcgcccgcaccggcatcccgcactgccccgaatgcggcgagcccgtcgcctcccagaccccgcagcagatcgtcgacacgctgctcggctacccggagcgcactcgattccagattctctcgcccgtggtcaagggccgcaagggcgagttcgtggacatgatcgagctgctgcgctccgacggctacgcccgcgcgctcatcgacggcgagatgacacagctgtccgacgacatcaaactcaccaagcagaagaagcacaccatcgaggtcgtggtcgaccgactcgtggtcaaggacggtatccgccaacgtttgactgattcggtggaaaccgccctcaagctcgccaacggcagcatcgtcatcgacttcgtggacgaggaggaaggcagcccggcccgccgccagccgttctccgaacaccgcagctgcccgaacgggcacacgctcgaactcgatgaggtcgagccgcgcaccttctccttcaacgccccctacggtgcctgccccgcctgcaccggtctcggcttcaaactggaaatcgacccggacctcatcatctccgacccggacaagtcactggccgacggcgtcatcgaaccgtggagcggcaccaagatgacctcccagtactacggccacatcctcgagggcttggccaaggaaatgggcttctccatgaagaccccttggaaggacctgccggacgacgtcaagcacgacatcctctacggccacgacttcaaggtcaacgtctcctaccgcaatcgctggggacgcctgcgtgaatactccaccggcttcgaaggcgtgatccgcacgctcatgcgacgccacgacgaaaccgattcgcagtccatgcgcgaatactacgagtcgtacatgcgcgaagtgccctgccaggtctgccacggacgtcgtctgaagcccgaggtgctctctgtcaccgtggacggcaaatccatcttcgacgtatgtgacatgcccgtggtacgcgaactcgcctggatcaacggcctgaaactcgaaggctcggcacagctgatcgccggcgaagtgctcaaggagatcaaggcccgactcggcttcctgaacgacgtcggcctcgactacctgaccctctcgcgcgcggccgccaccctgtccggcggagaagcgcagcgcatccgactcgccacgcagatcggctccggcctggtcggcgtcatgtacgtgctcgacgagccgtccatcggcctgcaccagcgtgacaacgaacgcctcatcgaaaccctgcaccacctgcgcgatctcggcaacacgctgatcgtcgtcgaacacgacgaggacacgatacgccgcgccgactgggtggtcgacatcggccccggcgccggcgaacacggcggcgaagtcatctactccggccccgccaagcacctcatcgaagccaagcgctccatcaccggcgactacatcgcccaccggcgagagatcgccgtgcccgccaagcgccgcaagatccacaagacccaggtgctcaaagtcgtgggtgcccgcgagaacaacctcaagaacatcgacgtgagcttcccgctcggcgtgctcaccgtggtcaccggcgtctccggctccggcaaatcctcgctggtcaacacgatcctctacccggtgctcgccgacaagctcaacggtgcacgcatcgtacccggccgccacaggcgcgtggaaggcgtggaccaggtgcgcaaggtgatccacgtcgaccagaacccgatcggccgcacgccgcgatccaaccccgccacctacaccggtgtgtgggacaagatccgcacccttttcgccaagactcccgaagcccaggtgcgcggctacggccccggccgcttcagtttcaacgtcaaaggcggccgatgcgaggcctgccacggcgacggcacgctgaagatcgaaatgaacttcctgcccgacgtctacgtggactgcgaggtctgccacggcaaacgatacaaccgcgagacccttgaagtcacgtacaacggcaagaccgtggccgacatcctcaacatgcccatcgaggaggccgccgacttcttcaaggcgtacaccggcatctcccgatacctgaagaccctcgtggacgtcggcctcggctacatccgactcggccagcccgcacccaccctgtccggcggcgaatcgcagcgcgtcaagcttgccaccgagctgcagcgccgatccgacggcaaaaccgtgtacatcctcgacgagccgaccactggcctgcacttcgaagacgtgaacaagctgctcaaggtgctgcagtccctggtggacaagggcaatacggtcatcgtcatcgaacataatctggatgtgatcaaggaggccgactggctgatcgatctcggtccggagggtggcgacggaggcggcaccatcgtcacgcagggcacgcccgaacaggttgccgaatgcgaatcctcatggaccggcaagttcctgaaatccatgctttagccttccattgcagctgacctcgggtgggttggggtggtatgttgctggacacgctccgggccgctcaggccaagtctttacggtccagcagcacataccaacccgcccaatccctgatgattggttttgcttaatagcgaggaggattatgacgaacgatattgagcggcatagtccggatgagtggcggaagaccgcggcggcgttaatgccggaaagcgtagctgtgggcgccggggaaacgacggcgaaggtgaatgcgaatggggcacctttgctgggggattctcgcgacctgttccgacccaagacctcggatattcccgccaaacccggtgtgtacaaatggcgcgacggggaagggcgcgtcatttatgtgggcaaggcgaagaacctgcgcaacaggctcaccaattatttccagccgctgtatctgctgcatccgcgcacgcagaccatggtgctgaccgcacgcagtctggagtggacggttgtcgccaccgaactggaatcactgacgttggaatacacgtggatcaaggaattcgacccacggttcaacgtgcagttccgcgacgacaagacctatccgtatctcgcggtcagcacgggggagcgaattccgcgcgtgtgggtcacgcggtcgcgcaaacggcgggatacccggtatttcggcccctatgccaaagtgtgggaattgcggcacagtcttgaccggttgctgcgcacgttcccggtacgcacctgcaccaccaacgtattccacaaggcgcaactgaccggacggccatgcctgttcgcctccatcggcaaatgctccgcaccctgcgtgaaccgtatcgaagcggacgaacaccggcggctgtgcgaacagctggtcggcgtgatgaccggacgactcggacggccatacatcgcccagttgacccgcgacatgaaagaggccagcgccgaactcgaattcgagaaagccgcccgactgcgcgaccagatccaaatgctggaaaccgtggtgcaacagaacgccgtcgtcttcgaccaggatgtggacgcggacgtgttcggcttcgccagcgacgagctcgaagcctcggtgcacgccttttatgtgcgcgccggctctattcgcggcgaacgcaactggagcgtcgaacgagttgaggacatcgatgacgccgacttgatggccgaccttctggtgcaggtgtattcggacgccgccggggacaatcacccccagtcggccgcgaccatctccaccaatcgcgaggccatcggctccacacagaccatcacggccacggacgctgtggcacgcgcccaggccacccgagaacgcaacacccgtcaggagaccaccggacgcgcggacctgctggcacccatcgcaccggtaccgcgcgaaatcatcgtgcccgtcgaaccggcccgccgcgaggaactcgaaggctggctgaccaatctgcgcgggggcgcggtgaccatccgcgtggcctcgcgaggcgacaagaagcagcttatggaccgcgccaacgagaacgccagccaagcactgcaacgcagcaagatgagccgcatctccgacatgggcgcacgcacccaggccatgaacgatgtggccaaggcattgggactcgcgcaagccccgctgcgcatcgaatgctacgacatttcgaacactgtgggcggtgccttccaagtggcctccatggtggtgttcgaagacgcgatcgccaagaaatccgaataccgacgcttcgccgtccgaggcaaggacggcaaaggcgcggtggatgatctgtccgcgctttacgagacgctcacccgccgcttcaggcacggcaacatcgccggcgactccggcgaaagcatcgacgcggaacagcgcgcggcctcggccgccggcaagatgaccactgccgtggcggcggagacaatcgttgcgaacggtaacgacaatggtgagggcggttccgacatcagtggcaaggggcacgcggtgccggtcggagtgcagaacgatgcacgggagtcctcgcccgacatcgtccagcagaacacaaaccggcatcactttgcctacacgccgaacctggtggtggtcgacggcggtaagccacaggtcatggccgccgccaaggcgcttgaggactgtggcgtgatcgacgtggccgtctgcggactggccaaacgcttggaagaggtgtgggtgccggacgacgactatccgatcatcctcaaacgccagtccgaaggcatgtatctgctgcagcgtgtacgcgacgaatcccaccgcttcgccatcacctaccaccgccaacagcggcgcaaaggcgccctgcgcagcgcgctcgacgagattcccggcatcggcgaaagctaccagaagcggctgctcaaccacttcggctcggtcaaagccatgcgcgaagccagtgtcgaggacttcgaaaaggtcaaaggcatcggccacgccaaagccaaagcgctgtacaacgcgctgcacgagcagtgagccggcccggtccagcagcccagagtgaattttcggttgcggggtctgtggttgacatattcgaagcaaagtgtcggctagcatggaaacagacatcaaggaggggatatggccaatcatcgttgcgctgtactcggcaaacccgtcgcgcactcattgtcacccgtgctccacaacgcggcttatcgttcgctgaaactcgacgattggctgtacgacaagcacgaggtgggggaagacgacctcgacgctttcctcaaaggccttggctcgacgtgggctggcctgagcctgaccatgccgttgaagaagaccatccaaccgtacggtgttccggaaaatctgtgggccaaggaactgaaggtggcgaataccgcggtattcgactggagtgtggctaccgatgatcccgcttggccgaacggcaagccgggcatcaagctgtacaacaccgatgtcatcggcatccaactcgccttcgaccacgccaatcgcgaactcggcgaacaccacaccgcatcgagaagcggcgccgcgctgatcctcggcaatggcaacaccgccacttcggcgttggccgcatgctgcatgatgcccgaaatcggccatatcatcgtcgccgcccgccaccctgggaaaaacaccgggcttaaaccagtggccgaaaagttcgtcaacgtgcataacccgtacagcgaaatcgaattaggcgacgatcaggccctgctcgaagcagcccgcaacgccacctatgtcatcaacacgattcccggacatgcggccgacaacgtcgcggatgccctcgccaatgccggaaccgagccattctccggactgctgctggacgtggtctacgatccacgccccaccaagctcatggaagtctggcgcgctcatggcggtcacaccatcggcggcgaagaaatgctgctgtaccaagctctcgtacaggtattgctgatgaccggtatctgggatgacgacccgcccagcgatgccgaccagcgtctgcaggacaccaccaccgaagacgaccagctggagatcgcgatgcgcaaagctcttgaggaggcgttgtaatgagtcaacagacaacaatccgcgataccggcgaggcggccgccacgaatgcgccggcgaattccgcgacatccacatcgactccggacaaccagccgaccccgcttgatgccttcgaggtgctgctcatcaccggtatgtccggcgcaggccgctctcatgccgctgactgcgtggaagacatgggatggtatgtggtcgacaacctgcctcccaaactgcttatcccgcttgtcgacatgatgaccacctccggttccggatcggggtcgggcgtccacaagcttgccgccgtcatcgacgtgcgctccagctatttcgacgagctggccgccgtgctcggccatctggatgatctcggcgtcaaaacccatattctgttcctcgacgccagcaacgaagtgctcatcaagcgctatgaatccgtgcgccgcccgcacccgctgcagcacggcaaccgactgatcgacggcatccttgaggaacgtcacctgctggaagacctcaaggagcgagccgactgggtcattgacaccagctccctgagcatccaccagctgtccaccaaactctacgagacgatgctcggttccggccccaccaccgtggcggtacacatcttcagcttcggcttcaaatacggcatgcccatcgacgccgatttcgtggccgatgtgcgttttctgcccaacccgttctgggttcccaacctgcgcgagcttaccgggcacgacaagccggtcgccgactacgtgctttccagcaagggagccaaggaatttctcgacgcttatgagaaagctatcgagattgcgttggaaggatacgcccaggaagacaagcactatgtaaccatcgccgtcggctgcaccggtggtcagcaccggtcggtggcgatgagcgaagagctggctcgccgcttacgcgcacatgggctcaacgtaaccgtttccgcgagagaacagcataagcgtcactcatcgtagcaggcgtcgagcggtcatcgggcaagcgttcggtgaccacactgcgagaaagcaaagcccataatacgtatcaaacgggttcgcttgtccaccagattaggtatcacagaaagccgatggcttccgaccgtatgacagcagataacggcacgaagcgcctgaagcattgagaagaacgggactgtaggaggtagatcttggctcttctggacgatgtcaaaagcgagttggcggcctttgaaggcgattcgccagccgcgatcaaggcccaagctgcggccatgatccgttttggcggcggtcttcgaccggtacagaatacatacgttatccaagccgtattcacctcgcttgacgttgcagaatggctgaagaacacgttgaggaacacgttcgggcatgaagccgaggtcaaccacctcacccgtcagaccccgaacggccctgtcgagacctacgtggtgctcgtcacccgcaacgtagtggccttggctttgcagaccggactggtcgaccgccgcaagcagcaggtccgtggactgccgtctgaagtggtcaacggatccatcgcccaaatcaaagcagcatggcgcggcgccttcatggcccgtggcttcctatccgatcccggtaaggccagcttcctggaaatcgcttgccccacggaagaggccgccatggccctgtgtggcgtggcccgtcgtctcggcatccaggccaagcatcgcacgctgcgcagctccgagcgcgtgaccctcaaggatcccgacgccatcgaacgcatgctcaagctcatgggcgccacccgttcggcccgcgaatggaccggcaagcgctccgacggcgaggcccgcggcaaggccaaccgtctggccaacttcgatgacgccaatatgcgccgttccgccaaggctgccgccgaagccagcgaaaaagtgcagcatgccttcgaagtgctcggcgataacattccggacaacctccgtcaggccggccagctgcgcatcgatcacgtggacaagagcctcgaggagcttggcaagatcgccgaaccgcaaatcaccaaggatgcgattgccggccgaattcgccgactgcttcagcttgccgagaaaacggagaaggctcgcgcagccgaaggcaagtaacccgacaacgacgtaacgaaacaccgcattcagtcagtaggcgaatgcggtgttttgttccggaatgcctgtaatatgcaaagtggcaaaattggccactttgacgtgcgattcgtcaaggaaaggatattcatgaagacactcaaggaccttggagatctcaagggcaagcgcgttctggttcgcgctgatttcaatgttccgctggacggcaccaccatcaccgatgacggtcgaatcaaggctgctctgccgaccatcaagaccctgcgcgaagaaggcgccaaggtcatcctcatggcccaccttggccgcccgaagggcaaggtcgttcctgagctgagcctggccccggttgccgcccgcctcggcgagctgctcggcaccaacgtgccgctggccaaggacacctacggcgaggacgctcaggccaaggtcgccgccatgaacgatggcgatgttgtgctgcttgagaacgttcgcttcaacccggaggagacctccaaggacgccgacgaacgcgccgcttacgccaagaagatcgccgccctcggcgaggccttcgtttccgatggcttcggcgtggtccaccgcgcccagggctccaactacgacgttgccgccgatctgccggccgccgcaggcctgctggtcgagaaggaagtcaaggccctgtccaaggccaccgagaacccggagcgtccgttcaccgtggtgctcggcggttccaaggtctcc

SEQ ID NO: 3838 - DNA, 7284 bp, Unknown
  R35_2m  MAG No. k141_10844
cggacggtgctctggccggcgtggacttggatcgcaagaccttccgcatccgcaagcgcgtcgagcatgaggtaggcgtctacttcgcttccctgtccgcccgtaccatcacgtacaagggcatgctcaccaccatgcagctcacccacttcttcgaggatctgaacgacgagcgcatgaaggccaccatcgccatcgtccactcccgcttctccaccaacaccttcccgagctggccgctggcccagccgttccgtctgctggcccacaatggcgagatcaacaccattcagggcaaccgcaactggctctccgcccgtgaaggtcgtctgagcagcgaactgctcggcgagttcgagccgctgctgcccatcaccactccgggctactccgattctggcaccttcgacgagtgcctcgaactactgcatctcgccggccgttccctgccgcacgccatctgcatgatgctgccgccggcttgggagaagaacacggatctcgatccggacgtgcgcgccttctacgagtacaacaacacgcttatcgagccgtgggatggcccggccgacatcgtcttcaccgacggcacccaggtcggcgccctgctcgaccgcaacggcttccgccccggccgctggcagctcaccgacgacggctacatcgtgctggcctccgaggccggcgttctgccggagatcgcgcaggagcacatcgtgtccaagggccgtcttgagcccggcaagatgttcctggtcgacaccgccgaaggccgcatcatccccgatgaagagatcaagaagaccctcgcctcccagcacccgtaccgcaagtgggtggaaggcaactcggtcgagatgagcgatctgccccgccgcgagcacgtgagccactccggacagtccgtccaacgccgtcagcgcgccttcggctacaccgaagaggatctgaagctgttgctcactccgatggccaacaccggtaaggaaccgctgggatccatgggtaacgatgcgcctatgcccgcactctccagccgcagccgcatgctgttcgactacttcacccagaagttcgcgcaggtcaccaacccgccgctggactgggagcgtgaggagatcgtcacctcgctcgaatccgccatcggccccgagccgaacctgctggccgattccgagctgcacgccaagaagatcctcatcccgctgcccgtggtcaactctgatgagatggcccagctcaagcgccttgacaaggcccgcatcctcggcggctactatcgcccgtacgtggtcaagggcctctaccaggtcgccggcggcggcaaggccctcgaagagcgacttgacgagatctttgccgaaatcgacgaggccatcgccgacggcaagaacttcatcgtgctctccgaccgtgaatccaaccacacgtggggcccgattccgtccctgctgctgacctccgccgtgcagcaccacctgctgcgccgccacacccgtacgcagatctccatggccgtcgaggccggcgacgtgcgcgagattcaccacgtcgcactgctgatcgcttatggtgccgcctgcgtgaacccgtacctggccttcgaatccgttgaggatttggcccgtaacggctacctcaaggtcgacgcggacaccgccgtgaagaacctcaccaaggcgctttccaccggtgtgctcaagatcatgtccaagatgggcgtctccaccatcatgagctaccgtggcgcacagctgttcgaggctgtgggcctgagccaggaagtcatcgacgaatacttcaccggcaccacctcccgtgtgggtggcgtgggccttgacgagatcgccgaagaagtggccatccgtcaccgcgtggcctacccgaaccagtggagcgcatccccgcaccgcaacctgcgcacgggcggcgactacaagtggcgtcgtaccggcgaggaccacctcaacgatcccgaggccatcttcctgctccagcagtcgacccaccgtggcgactaccagatgttcaagaagtattcgcaccacatcaacgacacgtcgaaccgactcatgaccctgcgtggcctgatgaagttcaacaacaaccgcaagccaatcgacatctccgaagtcgagccggcctccgagattgtcaagcgcttctccaccggtgccatgagctacggttccatctcacaggaagcgcacgagacgcttgccatcgccatgaattcgattggcgcacgctccaactccggtgagggcggcgaatccgacgatcgtatcaacgacccgcagcgctacagccgcatcaagcagatcgcgtccgctcgcttcggcgtgacctccgattacctcgtgcacgccaccgacctgcagatcaagctcgcccagggcgccaagcccggtgagggtggccacctgcccggtgccaaggtcccgccgtggatcgccaaggtccgtcacgccaccccgggcgtggagcttatctccccgccgccgcaccacgacatctactccatcgaggatctgaagcagctgatcaacgatgcgaagatggccaacccgaaggcacgtatccacgtcaagctcgtttccgagttcggcgtcggcaccatcgcggccggtgtggccaagtgccatgccgacgtggtgcttatctccggctatgacggcggtacgggtgcagccccgctcaacgccatcaagcacgccggcaccccgtgggagatcggcctgtccgaaacccagcagacgctgatcctgaacggcctgcgctcccgcatcgtcgtacagtgcgacggcgagctcaagaccggtcgtgacgtggtcatcgccgccctgcttggtgccgaggaattcggcttcgctactgcggccctgatcgtggaaggctgcgtcatgatgcgcgcctgccagaagaacacctgcccgcagggcattgccacccaggatcctgagctgcgcgcccgctttaagggcaagcccgagtacgtggtcaacttcttcatgttcatcgctgaggaggtgcgcgagatcctcgcccagctcggcttcaggactcttgaggaggccatcggccacgttgagtgtttggatcaggacgaggccatcaagcgctggaagtccggcggcatcgacctgaccaacgtgctcaagcaggccggcccggtacccggcacgatcctgcaccagaccatcgagcagaaccacgagctggagaaggcactggacaacaagctcatcgaacttgcccagccggccctcgaacacaaggaacccgtgcgcatcgaaatgccgattcgcaacgtcaaccgtacggtcggcaccatggtcggctacgagatcacccgccgttacggcgaggaaggtctgccggacgacaccatcgacatgaccctgcacggttccggaggccagtccatcggtgcgttcatcccgcgcggcgagaccatgcgcatctacggtgaagtcaacgactacgccggcaagggcctgtccggcggtcgcatgatcgtgcgcccggaagacaccgtcaccttcgacaagcacagcaacgtcatcgccggcaatgtcaccggtttcggcgccacttccggccagatgttcgtagccggtcgcgccggcgaacgtttcggcgttcgtaacggcggtgccacgttcgtggtcgaaggcgtgggcgaccacggctgcgagtacatgaccggcggcactgttgtggtgctcggccccaccggacgcaacttcggtgcaggcttctccggcggtaacacttatgtgcttgaccttgatatgaagaaggtcaacccgggtgccatcaagtccggtgcactgctcttcaagtcgcttgatgccgaaacctccaagctggtgtacgcactggtcaagcagcatgccgaagagaccggttcccagttcgccgcggccctgctggaggactggaacgaaaccgtcaagcggttcactcacgtggtgccgaagcagttcgtggccatgacgaaggccatggaagaagccaaggccaacaatgtagatttcaatgcgcccggcacctgggaaaaggtgtacgagcaggttatggaaggagcgcgctgacatgggcgacccgagaggattcctgaaggtccgtacccgccgagagttggctgaacgccccgttgaggagcgtatcaaggactggttcgacgttcacgccgaaaccggcctgcaaccgtggacccaaacgcaggcggcccgctgcatggattgtggcaccccgttctgcatgaccggatgcccgctgggtaacctgattcccgagtggaacgacttggtccgtcagggcaagtgggaagacgcctacaaccgtctgtccatgaccaacaacttccccgaagtcaccggccgcatctgcccggccctgtgcgagcaggcctgcgtgctcggcatccaccagccgccgaccatgatcaagcttgacgagcagaccatcatcgaccaggcatgggatttggactacgtcaagccgctgccgccgcagcgtctgaccgaccagacggtcgccgtcgtcggctccggccctgccggcctcgccgccgcacagcagctcacccgcgccggccacaccgtcgtcgtctacgagaaggacgacgccatcggtggtctgatgcgttacggcatcccgaacttcaagcttgagaagggtctgcttgaccgccgtgtcaagcagatggaggccgaaggcacccgcttccgcaccaacgtggaaatcggcaaggacatcacgtgggatgacctgcgtgaccgttacgacgccgtcgtagtggccatcggctcccgcgtgccgcgcgatatgaagattccgggccgcgagctcgacggcatccacttcgccctcgacttcctgcccgacgccacgcgccgtatcttcggcgtcaagccggtgcacgacatcaccgccaaggacaagcacgtcatcgtcatcggcggtggcgacaccggttccgactgcctcggcacctcgatccgtcagggtgcgaaggacgtcaccgtgctacagatcatgccgaaagagccgtcaagccgtccggacaacagcccgtggccgaccttcgcccgcacctaccagaagacctcctccatggaagagggcggcgagtacatctactccaccgactccgtgaacttcgagggcaccgaagaggagaaggccaaggtcaccatcgacaactcgaccaccgccgaaggcttcgtggccgatgagcgtggtcatgtcaccggcttgaaggtcgtctccgtggctcccggcgaaaatggtccgttcactcgccagcctggcaccgagcgcgtgctgcccgccgatctggtcctcatctccgtgggcttcctgcatccggacaccgagaccatcctcgaccagctgcccgtcgaactcgacaagcgtggcaacatcgctcgcaatgacaagttcgccacctcccaggatggcgtgttcgtgtgcggcgatgccggccgtggccagagcctcgtggtctgggccatcgccgaaggccgctcctgcgccgcagccgtggacgagtacctctccaaggaaaagagcgagctgccggccccgatcaaggccagccagcgtccgatgatgctgcctcgctgaatactgttccaaacagaaacatgaaaatcccttcttcatgaggggatttttgcgtttctgggattaattactgccttgagtcttcagtaatgtttatatttcgagaatattgcatacatggttaacatgaagctcctatggtgtctttcgtcgccaaaaagacgacgccagaatatttgggagagattcatgaacacacgtcatgtcacttcactggtcgcggccggtgcggcaatcgtcatgctgctcagcggctgcggatcgaccggtacctccaattccagcaatgcttcagattccaatatcatttccgtgtacggcagtgagccggcacacccactattccccggcaacaccactgaggccggtggcggcaaggttgtagaccagctgttcgcaggtctggtgacctacgatgcgaagggcggcatccacaacgaggtagcagacagcatcacctccagcgacaacgccacgcattacgtcatcaagctcaagagcggatggaagttcaccgacggcactccggtgaccgcgcactccttcgtaaacgcatggaattacaccgccaacagtgccaacaagcaggccagcgccagcttcttcagcacaatcgaaggctatgatgatctgcaaaagccggacgtggaccccaaggccacgctgagcggcctgaccgtcgttgacgacaacaccatcgatgtcaagctcagccagcccgactcggcattcccggtcaaggccggcagccacgcctacatgccgttgcccgaatccgcgttcaaggacccgaagaagttcggtcagcacccagtgagcaacggcccatacaagttcgtgtcctggcagcacaaccacagcatcgaaatggtgaagaaccctgactacaagggcaatcgtgtcgccaagaacgatggcctgaacttcaagatctatacctcgcccgattcggcatacgccgacctacgcggtggcaacctggacttcacgaacacgattcctgacaccgcacttacctccttccaatccgacaagtcgctgaaggcatacaacgagcccggtggcaatacgctcaccttcaccattcctgaatggctggaacacttcggccagaacgaggaaggcaacctgcgtcgtcaggccatttccatgtccatcgaccgcaagaccgtcgccgagaagatcttccacggcaccgccacgcccgccgtcgacttccttgcagccccaatcagcgcctactccaaggaactcaagggaaatgaagtactgaagtacaacccgtccaaggccaaggaactgtgggccaaggccaacgccatctccccgtggagcggtgagttcggcattgcatacaatgctgatggcactgcgaagaactgggttgaggcaatctgcaactacatcaagaacacgctggatatcgatgccaagagcatcccgatgtccacttccgacgaattcctgtccaatgtggattcaggcaagatgacctccgcataccgtagcggttggggccctgattatccatccgcggacaactatctggtacagctgtacgattccagttcggccgacggcaagggcggcaacagcggcaactacaagaaccccgagttcgatgccatgatggacaaggctctttccgcc

SEQ ID NO: 3839 - DNA, 6548 bp, Unknown
  R35_2m  MAG No. k141_11123
gcaagtaccgaacgattacgcaagaaaatcagtattaagagaggtttcgatggcggttcgtggagatatccgtaatgtggcgattgtggctcacgtcgatcacggcaagaccaccctggtcaatgccatgcttcagcagtcgcacgtgttttccgagcgtgaggaagtgccggatcgtgtgatggattccaacgatctggaacgcgagaagggtatcaccatcctcgccaagaacacggccgtggaatacgccggtccgctggccgccaagtacggccacccggagggcatcaccctcaacatcatcgatacccccggccacgccgacttcggcggcgaggtcgagcgcggcatctccatggtcgacggcgtcgtgctgctcgtggacgcctccgaaggcccgctgccgcagacccgattcgtgctgcgcaaggccctggaggccaagctgccggtcatcctgtgcgtgaacaaggtcgaccgccccgacgcccgtatcgaagaggtcgtcggcgaaacctccgacctgctgctcggcctggccgacgacgtgcagcacgagggcatcgacctgaacctcgaccagctgctggagatgccggtcatctactgcgccgccaaggccggctacgcctccgtgaaccagcccgccgacggtggcctgccggacaacgacaacctcgagccgctgttcgaggccatcatctccaccatcccggcccccgaatacgaggaaggcgccccgctgcaggctcacgtggccaacatcgactcctccgacttcctcggccgactcggtttggtccgtatctacaacggcacccttgagaagggcaagacctacggcctgtcccgtgtggacggctccctcgagaacttccgcgtctccgaactgctgcgcacgcagggcctcgagcgcaccccggtcgagtccgcgggccccggcgacatcgtggccgtcgccggcgtcaacgacatcatgatcggcgagaccatcgtcgaccccaacgacccgaagccgctgccgctcatccacgtggacgatccggccatctccatgaccttcggcaccaacgactccccgctggccggcaccgagggcaaggaccacaagctcaccgcccgcatgatcaaggatcgtctggaccgcgagctcatcggcaacgtctccatcaaggtgctgcccaccgaccgccccgacgcttgggaagtccagggccgtggcgagctggcgctggccgtgctcgccgagcagatgcgccgcgaaggctacgagctgaccgtcggccgcccgcaggtggtcaccaagaagatcgacggtgtggtcaacgagccgatggaaaataccaccatcgacgtgccggaagagtacatgggtaccgtcacccagctcatggccgaccgtaagggccgtatggacggcatgaccaaccacggctccggctgggttcgtctgcagttcaccgtgccgtcccgtggtctgatcggcttccgcacggctctgctgtccgccactcgcggcaccggcatttcctcctccatctccgctggctatgctccgtgggctggtgccatcaccattcgtcagaacggttccatggtttccgatcgtcagggtgtggccactccgtatgccatgcagcgtctgcaggcccgtggcaacttcttcgtcgaaccgcagtccccggtgtacgagggtcaggtcgtgggcgtgaacaacaagcccgacgagctggatgtgaacatcacgctggccaagcacatgaccaacatgcgttcctccaccgctgacgtgctcgaaaccctgaccccgccgatcaagatgagccttgaggagtccctggacttcgccaacgaggacgagtgcgtggaagtcaccccggagtccatccgcgtgcgcaagatcatcctcggccgtgaggactggtacaagtggcgcgccaagcagcgccgccagaacgccgcccagcagggtaagtgatctggtgcgactgtagccgaccattctctctggctcccctctctgaggggagccaagtttattcctcgccaagtcatatccccacctatactgaaacgcatgactgtgaagagcactactgaactgcgtccgtggtcgtatcgccagaacgcgctggtcaaatcgttgatcacgattgcggcgggcgtggcttccgcctttgtgggcacgttcgcccaccgtatgggtgcagaactgagtattccgtatggtctggtgctggcatttctgctgatcggcctatcgacatggtgcgcccgttcgcgcatgggcgcggtcggactggccctgcacctcatcgcctcctcgctgaccgcatggggcatggcactgaccaccacatccggcaaggcggtcatcgtcgccggattccaaggcgacatgccgttcttctcccagcatgccggctacatctggctgtacggcctgatactggtccaagtcgtcctgctcattcttcccgcccgctggttcgttattcccactcattctgaatcgcgcgcgtaactatatatggcggcacatttccgggaatgcgtcgcgtatcggcgggcgtaggggattacggccgctaccatagaaccttatggcacgcatgaaactgttttacttgggcccggaaggcaccttcacccatcaggcggcaatgacggccgccgaccagttcgccacactcggcgacttcgacctcaccgccctgcccgacgtgcccgcgatcatgcaggccgtacagtcgcgccaaggctggggcgtcatcgcatgggaaaacaacgtcgaaggctatgtggtcccgaatctcgatgcgctgatcgacgcccccgacgcggccggcttcgcccggatcagtgtggacgtggccttcaacgccttcaccgtgcgcggccacagcatctgcgactgcaccggcaaccccgtcagcgcccacccgcacggcctggcccaatgcacccggttcatcaccgaacaccatttgcagcccgaacccgcatcctccaacgccgccgcctgccgcgacctgaagcccggccgcgtggcgctcggccccagcatctgcggcgaactctacgatctcgacaccctcgccgaacatgtgcaggatttcgatggcgcgcacaccgaattccttgtcatcgccccgcgtgatgtggtccaggaattcaacgcccgcgcccaccgcaatgacgccggcgacttcgaaaccatcatcaccttcatcccgctggtcaccggccccggcgtgctcgccgacctgctggacgtcctgcgtgatgcggggctgaacatgaccagcttcatctcgcgcccgatcaaaggccacgacggaacctacagcttcatcgccacccttgacgccgccccctgggagccaagattccgcaccgcactggaagagatcgccggacacggcgactgggcaaaaaccttggccgtctacccacgccgcgaacgcccgaacccgccggtcgacgcctggatgctgcccgagggcggcgtccacatcaccaatcgtgcgtcggaaggctggcagtacgccgagggagcaaggaaggaactgctgtggtagacacagtcggaatcgtcggactcggattgattggcggctcgctcgcacgccgcctgaccgagcgcggtgtacgcgtcatcgcgtggaaccatcgctcgcacccctatgcccaggccgaagccgatggcattttctgcaagagcacgctctccgaactcatggatgccgagccggatgtggtcgtgctgtgcaatccgctcaaggcgatgccctcaatcctcgccgccctagccccgcttatgggcgaccatccgaacaccacgctcaccgacgtgggctcagtcaagggcatggtccgcgatcaggtcaaggctgccgcgctggggaagtgctacgtcggcgcccatccgatggccggcaacgaactgtccggctggcaggccgccgacccgcatctgtacgacggtgccctatgggccatcaccgtggacgagtccacggactaccgccgcttcctcgacgtcgccgcgatgatcaccaaggacgtcggcaaccgcgtcatcgtcgtggacgacgagacgcatgacaaggccgcggcgatgatctcccacatgccgcatgtggtgtccaccgcgctgatcaacgaactggtcgccaacccggaccgcaacatcgccgccgcgctggctgccggctgctggagggacatgacccgcgtgtccctgaccgacccggaccgcacgcgcgcgatggtcgaggaagactcgctgaacgtcgaagtgctgctgcgccgcatggcggcacgtctgaccgatatggccgaccaactgcacgctggtgccgacggcgagcaggatgtgatgggattcttcgccgaaggcgaccccttccgccggtacaaggccgccgtgacgcgagccggcatcaccgctgcacaagctggtacggccaccgcgcagcaagccgacacaactgccgccggattcccggaacgcgagctcgccgtccccgaagccggctggcagcagaccttgctgttctccgcacgccggggagaagccatcaccggtttcatccatccgcgtcaggccatcgtccaactgcgccccgccatgtaactgcgccccgccatgcagcccgtgtgcaggttcccctcgccgcccgtcacgaagaaggctgcgcgagggggatgaagttcccgcttgttttcgtgagaagaccgtgtggctccgctgttcgaaagacccaaaggagtaaggtagtctgtaccgtttttcgggaaacgcatcgaagtgaatgcggcggatggttaaggggatgatgacgtatgacgttaccaaggcagattccggccggtgcccgcgtggtggtgcgcatcaccgacggcattgacccggtcgaccaccgtatgaagttccgcgactatgtggggcatgtggtttcctgggatggatacacgttggagatggtgcgtgacgccgccgccaatggttcgcgcccggcccagaacgtgaccatccatcaggaacagattgccacattgaaacccgtgccggagcggcgcaacacgccaccccggccgtaacccaaggccataaagaattcggaggagaacgagagtgtcatctacgcagttcgacggcgatatcgactccttcgtctcctatctgaagtccaaccgcggcctgtcagcgaatacgctcaaagcgtatcgcgcggatctcacggcatgcctgcacctgttcgagctgcgcggcgtgaccgatctgaacgagatcacgctggatgatctgcgcagctggatggcggtggaatcgcgcgatcacgcccgcagcagcatggcccgcaaaaccgtggccgtgcgcgggttcttcgcgtgggcctatgagcatgggctgaccaccaccgacccggccgccacactgatgactccctcgattcccagcacgctgcccgcggtgctcaccgaatcccaggccgagcaattattggatgtcgctgaacatgccgttgcaacaaaccagtacaaggacgatgggggagcggcagccgcgtccggcagcggcagcggcaagacagctgataagtcggccgataccgtaaaccgcagtgaggcacccgcccgtgcagacaagcgcgacaacgcccgagtcaccgccgaatcgcagcgcaacgccgcgattctcgaactgctgtatgccaccggcatccgtgtcgccgaactggtgtcgatggatatcgccgacatcgacttctccaatcgcaccatcaaagtcaccggcaaaggcaacaagcaacgcgtggtgccgttcggactacccgcccagcgtgcgctggagacttggctggaacaggggcggccggtactggcccgtacggcaacggatgcagtcaagtcccgtgctgccaacgccctgttcctcggcgcacgaggcggccgtatcgaccaacgcatagcccgtgacatcgtgcacagagcggcccgagaggccggcgtgccggacatcagcccccatgcgttgcgtcattccgccgccacgcacatactggacggcggtgccgatttgagggaggtgcaggagatgctcgggcattcctccttgaaaactacacaacgctacacgcacgtctccatcgagcagctcaagaaccgttacggacaggcctttccgcgggcatgaccactatgtggacattggttaacaaactcagcaaagactgaacctagccggcaagaacccctgaattttacatgggtgtaacaaaaaatacactgcttgtctcccaagtgcgcaaaaatgacaggtaatcagcaacggggttggattgttcgagacatcgtgagatgcaagtctcacggtgacggggaatccagccccgtttgcatgaggcggggctgagacgtcctgcaacctaatgaataggagaaatcatatgaagaagaaagctcttgctttcgctgccatggcctgctccgtggccatgctgctgagcgcctgcggcggctccaacagcaacgctgcc

SEQ ID NO: 3840 - DNA, 18482 bp, Unknown
  R35_2m  MAG No. k141_11319
ggctgcttgccggcgatgatggcgttgatcttgttggtggacttgtagcacttctcggcgatggccagcagcatgttcgcatcggtggcgaagtagatgccgatgacgtggtcgttgtggaagcacttgttcagcaggacggaggtgacacccgggtcctggtgggagaagccgttgtggtcctgacgccaaacgtgggaggagaccagcaggttcatggaggcgatcggcttgcgccacgggatctcgcggacggtagcctcaagccacttggcgtgctggttcagcatggagtcgatcacgtggacgaaggactcgtaggagctccagatgccgtgacgaccggtcagcaggtaggcctcgaggaagccttccatctggtgctcggacagctgctcaacgacctggccggagacgtgcatgtgctcgtcgacctcgtcggagatgtagccggcatcccactgcttgttggtgacttcgtaggaagcctgcagacggttggaagcggtctcatccggtccgaagatgcggaagtcgcgcgggttgttcttgatgatgtcgcgagtgtagacacccagacgacgggtggcctcgagctggccccagccgtggccgtactcagccacttccttgacctcgtagtcctcgaggttcggcagcttcaggtcgtcgcgaatcacaccaccgttggcgttcgggttggcaccgatacgcagctcgcccttcggcatgaaggcaaggacgtcgtccttgacagcgccgttggcgtcgaacagctcttccggcttgtaggactcgagccagttcttgaggacctcgaagtgggcctcggtgtcgcgggcggaagccagcggcacctggtgagcgcgccaggagccctcggtcttcttgccgtcgatgtacttcgggcaggtccagcccttcggggtgcggaagatcagcatcgggtagaacggacggtgcacgttgtcggtctgagcggcggccttgatgtcgcagatctcgtcccagatggtctcccacagctcggcgaagcggcggtggatggacatgtggtcctcatcatcgaagccagcgacgaactcgtagggctcgtaacccatgccgtggaagaactcgtggagctcttcgtcggagatgcgggacaggatggtcgggttggcgatcttgtagccgttgaggtgcaggatcggcagcacgataccgtcggtgcgcgggttcacgagcttgttggactgccaaccggtagccagcgggccggtctcggcctcgccgtcgccgacgatggccgggacgaacaggctcgggttgtccatgatggcaccgtaagcgtgggacagagcgtaacccagctcaccaccctcgtggatggagcccggggtctccggagcgaagtgggacggaataccgcccgggtaagagaactgacggaagaacttctgcagaccagcttcgtccttggtgatcttcgggaaggtctcggtgtaggtgccgtccaggtaggactgggaggtaccggccgggccaccgtggcccgggcccatgatgatcacggtgttctggccgtggtcagcaatgaaacggttgatgtggccgatgaggaagttcaggccaggggtagtgccccagtggcccaccagacggtgcttcacatcttcgcgggtgaagggctccttcatcagcgggttggaacgcagataaatctggccgatggaaaggtagttggcaacgcgccagtacttgtcaacgccttcgagggcttcctcggaaaccggagcgttgagcttcttccaaggggtgccaataacaggactcgtcatgtgtactcctgtactcctgcacgtgatcgtgcgattgattatttctgttcggtcacggttcctgacccttgcggtgccaaggttttccgttcccaatcaatcgtcatggtacgaggacaacgcgacttttgaacgatttcttgcgggtgtgttcgaaattgttgcggaaatttcagtatttgtgcggttcaactgaccgtttgtcaacattagttttttcaacatactttttcagaacggcggaagcatgcggaaatctagcatctggctagaacagcgcacgttcgatttcccatgttcgaaatcggcgtgttgtccgactacaggcatgtagtttgttcgatttgcgcacatagtccctgcgtgtcggccttgtcgccttgaccagtgataatcaggggtgttcagcccacgtaaaattccaatgaacgttaggggaatatcaatggcaaacggtcctgtgcttgtcgtcgacttcggcgcccagtacgcccagctcatcgcccgccgcgtgcgcgaagcaggcgtgtactccgagctggtccctcattccatgccggtcgacgagatcctggccaaggatccgaaggcgattattctgtccggcggcccggcctccgtgttcgagcccggcgcgccgaccatagataccaaggtattcgaatccggtgttccggtgcttggtatctgctacggcttccaggtcatggcctatgagctcggcggcaaggtggataaggccgctctcggcgaatacggcaagacctcagccaccatcgacgacgccgacggcatcctcgccgactcccccgccgagcagaccacgtggatgagccacggtgtggcggtcgaacaggccccggccggcttcgaagtgctggcccacaccgaaggcgcgcccgtggccgccatggcggacgaatcccgcaagctctacggtgtgcagtggcacccggaagtcaagcactccccgcttggccagaagcttatcgaaaacttcctgcaccgttgcgccgcgctgcccaacgactgggacgcctcctcgattatcgaggatcaagtcaagaagatccgcgagaaggtcggcgacgccgaggtgatctgcggcctgtccggcggcgtggactccgccgtggccgccgctctggtgcacaaggccatcggtgaccagctcacctgcgtgttcgtggaccacggcctgctgcgcaagggcgaggtcgagcaggtcaagcacgacttcgttgccgccaccggcatcaagctcatcaccgtggacgcggccgacgacttccttgaggccctgaagggagtctccgagccggagcgcaagcgcaagatcatcggtgagaagttcatccgcacgttcgagaaggcccagcgccaagtgcttgaagaggccggcgcgcgcggcaaggaagtcaagttcctcgtgcagggcaccctctaccccgacgtcgtcgaatccggcggcggcgacggcgcggccaacatcaagtcccaccacaacgtcggcggcctgcccaaggacatcaagttccagctcatcgaaccgctgcgcactctgttcaaggatgaggtgcgcgccatcggcaccgagctcggtctgcccgacgaaatcgtctggcgtcagcctttcccgggcccgggtctgggcatccgcatcatcggcgagatcaccaaggagcgcctcgacctgctgcgcgaggccgacgccatcgcccgcgaggagctctccaaggccggtctcgaccgtgacatctggcagtgcccggtcgtgctgctcgccgacgttcactcggtgggcgtccaaggcgacgagcgcacctacggctcccccatcgtgctgcgtccggtgagctcggaggacgccatgaccgccgactggtctcgcgtgccctacgatgtgctcgccacgatctccacgcgcatcaccaacgagtgccgccagatcaaccgcgtcgtcctcgactgcacgtccaagccgccggccacaattgaatgggagtaattgctctctgtgacgaatgggattctccatcggggaatcccatttttgttgccgacgatgcccggtataattttttcgcttacgacgtcgtccggaaagggatgccgacctctttgcgccagggattcgacaacgaaaaatacatcgaactgcaagccgccaacatctcaacagcgtgaaccgacgcttgcactcggatgaaacgctgattgcattgtcaatcaccagcgccaccagtcctgtggccgctcgcgtcatcgacgggctcaaacagttgcagggctgcgacgcctttttctccgttatcatctcatccacggacgaggcgttgtatcgcaaactcggcatcaacgtgtgctgcgaaccgaagtacgaacgggtgagtctgtatcaccggtaaacgccaccgataagcgcggtatgccgcgaatcgtcaagccggtaatcatgcagcatgcggcctgacgattcgctgctgtcgcattgtctctcccctcgaccatgctgggcttgttttccgtttgttggagagaacgggggatgccatcagcactacggtgagagaaggattatccgtgaatcggttcgtgggtctagacggtattaagggactggcgctgatagccattgtgctgtaccactgcatgcagcaactgctgccaggcggattctacggagtcgacgtgttcttcaccgtctctggattcctgattgccgtcagtttgattcgttctctggcgaaaaccggatcgctgaatctcgtgcgatatatccccaagcgtgcagtacgtctctatccggcgctgtttctgctgattccggtcaccgtctccgtcggctggctgctcgatcacgacattctggtttccatccgcgatcaggtcatcaccgtgctgctgggctgctacaactggtacgccattgccggaggccaaagctatttcgaccaaatgaacccgcaggtgtttcgccatctgtggttcattggcgtgctcatgcagttctacgtcatcgtgccgttcatcgtctggctgatgtggaagctccgccagacgaaactgccctcactcatcccactgggactcgcggcgttcagcagtatcgccatgtgggtgatgtacgtgcccaagggcgaccccacccgcgtctacttcggcaccgatacccacagcatgggcctgatgctgggtgtggctctcgcctggtgggtcaccgctcctcagttgggccacgctcgtcagggagctgtgccgatgccccgcaccattagatcgagcgcttcggccgccacgtaccgggctccgttacctcagattcctgtaaagcatcgcatctggaatgcgacggcaccggtattggcattcctcagcctgattgccttggtcaccatgacggttatcggcaaacaggatgcattcgccttccgcggcggcatcatattgtccagcctgttgtccgtgctgctgattgccggtaccatctccgacgattcctggatgcaaagcctcatggtgttcaagccattggccgccctcggcaagtattcgtacggcatttacctgtggcactggccgttgtggattctttccagcgcccttgccccgaagatcttcaaggcagcagggccttggcctctcatcatgaccgcgttgctcaccgccattgcggtgatgatttcctggctgatggtggagaaaccggcggcaatgcactcggtgatatccgtcgtggtgccccttcgcacgaacaagaagaatcatgcggcccgggttattgccgttgacgttatcctggcgctgtcgttggtcggctgcgcgcagggcattactcatgcacctgcgaaaaccgccatgcagatccagctggagcaacaggccgcacaactggaacgcatacagaaaaccgaacacgtgctgctgcgccatgccgtgccggcaccgcccaagcccaagcatgagatgcccaccggcgatcagattaccgccataggcgattcggtgatgctggcctcatcacagggcctttcggaagtcttccccggcattcagaccgacgcgagcgtttcccgctccatcatggtcgcccccgaactcatcggcaatgatctgtccgccggcagtctgcggcaatgggtgctgatcggccttggcaccaattcggcaatcacccctgatcagctggaccagattcgtaatatgatcggccccgaccgcgtgctggtactggtcaatgcccacggagaccgtacgtggattccacctaccaaccaggtgcttgccgactatgcggccgcacatccggacaatgtggtgctggtggattggaatgccacagccaacgcgaacgcgcaggtgctcggctccgacggcatccacccgagcatggatagcgatatctatgcaaaggcggtcaaacaggccatcgaacaatggatcgcaagcggcaggtgaacggcaggcaacgctgagttgtccaaccggtcgtgaagaacggctatgctgaagactgcatcaacgagaccacacgttgggagacatggtgagcgcaatccttgaagggaagcccgataagaatcttattctcgttacgggaaggattcatccgaagttggctgaggatgtcgccgagcagctcggcatcgacgtccttgaaaccaccgcatacgatttcgccaacggcgagatgtacgtgcgctacaccgaatcggtgcgtggcgccgatgtgttcgtgctgcaaagccactacaaacccatcaacaaggcgatcatggagcagctcatcatgatcgacgcattgaagcgcgcctcggcccgttccattactgcggtctgcccgttgctcggctactcccgtcaggacaagaagcaccgcggccgcgagcccatctcctgccgtctggtgttcgacctgctgaagaccgccggtgccgaccgcatcatgtcggtcgatctgcatgccgcgcagtcccaaggcttcttcgacggcccggtcgatcatctggtggctatgccggtgctggtcgactacatccgtgatcgtttccaaggccatctcgacaacgtcgccgtcgtctcccccgacgccggccgcattcgcgtggccgagcagtgggcgcagcgtctcggcggcggtccgctcgctttcgtgcacaagactcgcgacatcacccgcccgaaccaggcggtcgccaaccgtgtggtcggcgacgtcgccggcaaggactgcgtgcttgtcgatgacctgatcgacaccgccggtaccatcgcgggcgcatgccacgtgctgcaggacgcgggagccaagtcggtgaccgtggtcgccacgcatggcgtgctctccggcccggccatcgagcggctcaagaactgcggtgcgcgcgaggtcgtgctgaccgacaccgtgccgattcccgaggaaaagcgctgggatggcttgaccgtcctgtcgatcgccccgctgctggccagcgccatccgcgccgtattcgaggacggctcggtcgccgaactgttcgacacctaccccgagcaccacggtcaaggcttcctgttcgcctgatcacgtgcgtgtttgttcaaggaaagcacacgatgcgagacgcgacatggcgtagtctttcggtaaataccgacagtatggtataaatgaacacttgtgggccgaaagcccacgactcccccatggtgtaatggcagcacacgggtctttggaaccctttgtcttggttcgagtccaggtgggggaacggctgacggccgctcgacatccgggcggccgtctattgttttgaggtgtttccaccctcaatagacattccgatcgaagggaatacgtcagttatggcattatccgcagccatcgtcctcgccgccggcgagggtacccgcatgcgttccaacaagccgaaggtgctgcatacttttgcaggcaagaccttcctgaacagggtcatggattcggtgaccgccctgaaccccgacacgctggccgtggtcgtgcacttccaggccgagcgcgtcgccgaagccgcccgctcctatgacgagcaggtcaccatcgtgaaccaggacgacattcccggtaccggtcgcgccgtgcagtgcgcaatggcacagctcaccgaggctggcaaggtcgatggcccggtgctgatcgccgcctccgacatgccgctgctcgacagcgagacgctgcaccgcctggtcgaattccacaccgcctccggcaacggcgccaccgtgctcaccaccatcctcgatgacccgaccggctacggccgcatcatccgcgatcgcgaaggcaacgtgctgcgcatcgtcgagcagaaggacgccaaccgcagcgaactcgccgtgcaggaagtgaacacctcggtctacgtgttcgaggcttccgtgcttaccgaggcaatcgccggactgaagtcgaacaacgcgcagggtgagttctatctgaccgacgcgctggaaaccgccaaggccgctggcaaggtcggcgcgttcgccgctccggatccgctcaccgtcgaaggcgtgaacgaccgcgtgcagctggccgcgctgtccaagacctacaaccgccgcgtctgcgagcgctggatgcgcgacggcgtgaccattcttgacccggaaaccacttggatcgaggacgatgtccagatcggccgcgacgccaccatcctgcccggttccttcctgcaaggccacacggtggtcggcgaggacaccatcgtcggcccgtacaccaccctcattgacgcaaccgtggacgaaggtgccgtggtcgagcgttcccgcgtgcaggaatcgcacatcggcgcacgcacgaacatcggcccgtggacctacctgcgcccgggcaacgagttcggcgaggatgccaaggccggcgcgttcgtcgaaatgaagaaggcgcacatcggcaacggcaccaaggtgccgcacctgagctacgtgggcgacgcccagctcggcgaccacaccaacatcggcggcggcaccatcaccgccaactatgacggtgtgcacaagaatcgcaccaccatcggctccggctgccatgtgggcgccggcaacctgttcgtggccccggtcgaggtcggcgacaacgtgaccaccggtgccggctccgtggtgcgccacgccgtgccgagcgacacgatggtctactccgagaacacgcagcacaacgtcgagggctggaagcccgcctgggagcgctgaaccatgcccgcacttcaggattccatcaacgccgtccgcgtggccgccgaggccgcagaccgtatcaaggccaccgacatcatggccttcgacgtagccgacctgctcggcatcaccgacatcatgatgatcgtcggcgcctccaacgagcgtcaggtactggccgtggccgaggaaatcgaaaaggacctgttccttaagtgctccggccgtcagccgcgctctcgcgagggcctgaccgagggccagtgggtgctgcttgactacggtgatttcgtgattcatgtcatgcacgaggaatcgcgcgaattctacgggctcgaacgactctggcgcgactgcccggccatcgatcttgaactcgcacacccggaaacggcggagcatgcggacgctgctgccgtcaccaccgcgtaacgtgcgaatcacataacgctgatattcgctgatattcgctgatattcgctgatactcgctgatattcgtgtgtcgggctgcctgttgccgaacgtcattgacggcaccaggcagccctcccttttccctgtttcctcactggaatcgaaaggatcgtcactatggccaatcatgttcgttccattttccttatccgtcatggacgcacttcctataacgccgctcacaagctccaaggccaggtcgacattccgctggacgccgtgggtgaatggcaggtcaagcagaccgccgcggccttgaaaagcctgtacgtcgatcgtcggccggaaatcaaccaccggttcattgtctgctccgatttgaagcgtgcgcacgccaccgcgcaggctttcgccgacgtattgggtggaatcgagcccgtcgatgatcatcgcgtccgtgaacgcagcttcggcgactgggatggccatgccgtggctgaactggccgaacgctaccctgaggacttccgttcctggatggagtctcggggcggtgaactgaagtatggtgccgaacccaaggaagccgtaggcaaacgcggtgtggaggctcttgaggactggtccacgcgtgccggagacgacacggacctgttcgtgttctcgcacggcgcatggatcgcgcagacattgcagaccctgttgggcatttccgcgatcgatccgaccttctccacggtggtctcattgcgcaatgcgcactgggtgcgcttggtgccgatggacaatcccgatggcactgtgcgctggcgtctgctggactacaatcacggtccggccatcgccgacaccgacgaatgggaacgcgaacgctgatcatgttcccgactcccctgctaatccaataggtccggtgcattcggaaccgttcaagcaataactgaatgactcaatgcctgaataatggcggaaacaagccaaaaagtgtcgccaaatcacacttttgtcatttggcgacacgccggcttttgccagaatcgacatctcgtcgtaatgtatacgaggtccgaacaacgggccaacaattgaaaacggggctatagcgcagctggtagcgcatctccatggcatggagagggtcgggggttcgaatccccctagctccacgacgaagccatcaaatcgggtgatatggtggtttctccgctggttcgtggcgggtcttgtgactcccatgaatcagatagcttcactcggggctatagcgcagctggtagcgcatctccatggcatggagagggtcgggggttcgaatccccctagctccacaatcaaggccggtgcttcacacaccggcctttttcgttttctatcctatcgggcgacttttgcgcaacattcccgggaatgcgtcgcaaaacagggactggagtgcatgcagtgcgatactttccccggaaagtatcgccaaggggacgctcttccgattggcgcgacaccggcgtgagcgataacagtaatcgccactacaatgaggtgtggtccctatcgtgttgatcatcaaaggagacaaaaacatcgtgaccgtcacccgtgtatatatcgccagccctgaaggcgccaatggccgcaacgtcgtcgcttacggcgtgctcaacgcattgacttccaagtacaagaccatggtgttccggccggccgtgtcgaaccatgacgaattcacccccatcctgctcgccgcctccaatgcgggactcggcgtgtccctgtccaccggcctcgacgtgcataaggtgcgcgccgacaaggacaccgcccgcggagacatcgtcggcgagttcaactacgccatggaggtctcccgcgcgaacgccgccctgatcgtcggcaccgacaaatcccacgtcaacgacccgaccacctacgagttcaacgcggacgtcgccgccgatctgaaggccggggtgttcctggccgtgtgcaccatggaccgatggccgcacgagctcgacgagaccgtcaagctgtccatcgagggcatgcgcgccgcgggcaatacggtgctcggcatcttcgtgaccggctgcgagccgcgccacgccttctccgtcaaggagaccctcgccaagtacggtctgccggtctggaccctgccgcaggtgcccttcaccgatgaatccaccaaggatctggcgctggagaccttccgcaagcacgctcccatcgacgaggtgctcgccgcgctcgatgtggacgtcaccgcgccggtcacgccgtacgccttccaattcgacctgctcggcaaggccaagagcaacaagaagaccatcgtgctgcccgaaggcgaggaggaccgcatcatcaaggcggccgactacctgcttgagcgcgagatcgtgaacctcatcatcgtgggcgacaaggacgccatcctggcccgcggcagggaactggggctgaacagtctggagcgcgcccgcttccaggctatggacgacgagaacgtgttgaagcccatggtggccaaactgtgcgagttgcgtgccaagaagggcatgaccgaggagcaggcccgcaagcaactgaccgacgccagctacttcggcaccatgctggtggtgctcggctatgccgacggcctggtttcgggttccgtgcattccaccgccaacaccgtgcgccccgccctgcaggtcatcaagaccaagccgggccagaaactggtctcgggcgcgttcctcatgtgcttcaaggaccatgtggccgtgttcgccgactgcgccatcaacctcaacccggacgccgagcagctttccgaaatcgcgttgcagtccgccgagaccgcacgtgccttcggcatcgacccgaaggtcggtatgctctcctactccaccctcggctccggcaagggcccggacgtggacgtggtcgaggaagccaccaagctgctcaaggagaaggctccggatctgccggtggtcggttccatccagttcgacgccgcctggtcccccaccgtggccgccaccaaggccaagggcaacgatgtggccggacacgtcaacgtgttcgtcttcccggacctgtgcgccggcaacatcggctacaaagccgtgcagcgctcctccggcgccttggccatcggcccggtgctgcagggtctcaacaggccggtaaacgacctgtcccgtggtgcgatggtgcaggacatcatcaacaccatcgccctcaccgccatcgaagcgcagtgagcccggcttagctcccgccagcgggagccactgtaatgcttattttgtagcaagcaacgagtaatctaatcaacggtaacccgtgtctcacgggaacattcaatcacaatggaggatgcccacaatggcgaaaaccgtccttgtcatcaattccggctccagctcgatcaagtaccagctggttgatctcgaatccggcgaaggcctcgcttccggcctcgtcgagaagatcggtgagccggtcgacggccactacaagcacgagtacaacggcgaaaagcacgagcttgaagagccgattcacgaccacgagcagggtctgaagcgcgtgctcggcttcttcgaggagtacggcccgaacctgtctgaggctggcattgtcgccgtcggccaccgtgtggtgcagggcggctccatcttcccgaagccggccctcgtgaccaacaagaccatcaaccaggtcaaggatctggctgtgctcgccccgctgcacaacggcccggaggccaagggtgccgaagtcatgcgctccctgctgccggacgttccgcagatcttcgtcttcgattcctccttcttcttccagctgccgaaggccgccagcacctacgcgctgaacaaggaaatcgccgatcagtaccacatccgccgctacggcgcccacggcacctcccacgagtacatctcctccgtggtgccggacgtcatcggcaagccggctgaaggcctgaagcagatcgttctgcacatcggcaacggcgcttccgcttccgctgaggtctccggcaagccggttgagacctccatgggtctgaccccgcttgagggcctgatgatgggtggccgtaccggtgacatcgacccggctgtggtcttccacctgatccgcaacgcccacatgaacgtggacgagctcgatgccctgttcaacaagcgttccggcatgatgggcatgaccggctatggcgatctgcgtgaggttcaccgtctggtgtccgaaggcaacgaggacgccaagctggctctggatgtctacgtgcaccgcatcgtcagctacatcggcaactacacctaccagatgggtggctgcgacgtgatcaccttcaccgctggtgtgggcgagaacgacgacgtggtccgcaagatggtgtgcgacaagctcgctccgttcggtgtcaagctggacgaggagaagaacgccacccgctccaaggaaccgcgcatcatctccactccggactcctccgtgatcatcgccgtgatcccgacgaacgaagaactggccatcgcccgcaagtccgccgcaatcgccgaggctggcaccgatacctacggcaacaccttcgccaagtaagtaaccgccgttaggcatctcactaatctctagttgcaacactatgggggctgattccgattggaatcagcccccattcgtatatggtcatgagaccactacccctgcgtcatactcccctcagtcgcctccggcggacagatccactcagagaggggatccaggccctataacttggctcccttctctgaggggagctgtccgcgtagcggactgaggggagttccaccagaacacaggaccccttactgcctcagcatgccactccacataccgacgaaatcaggcaaggtcttgcgcgtggtggccacgttgatgacctcgatatcgggaatacgcagccccagcatcgcggcgaacgtggccatacggtgatcagcataggtttccatcacggcaccgtgcaacgtctccgccggcaccggttcgatacgcaatccatcaggcaattcctcagccgctcccccaacacgacgaatctcgttgaccaatgcctccagacgattcgtttcgtggccgcgcaggtgaccaataccaaccatgtctgtcgacttatcagcaaacaccagaatcgccgccaacgagggcgcaatctccccggccgccgtcaaatcgaacgtacccagcccacgcacggtgccgtcaccggtcacctcgcaatagcgcacgccgccgatggtcgggaacgatacttcggcacccatctgctccagatatccgggcaacaggccgcccggctgggtggtggtttcaggccaatgaggcacccggaccgtgccgccggcgatcaatgccgcgccgaggaatggcgccgcgttcgacagatcgggctcaacggtcaccttgctcggcagttgcattgcgcgcggttcaaccgtccatgtgcgggcggattcgtcggcctcaaccgcaccgccggcaccggtcacatcggccacggtcatgcgaatgtgcggcaggctcggggtcttctcccccgtgtgcgcgaggtgcagaccgccaggcagtttggaactaatcagcaacaggccggagatgaactgggaagaaccggacgaatcgatgctgacctgcgcctgggcagccggcaaggttgcaggcggcgtaatagtgaacggcagacggccaacctcgccgtggtaatcaaccgttgcacccagctgttccaaaccgtcaagcaccggcttcatcggacgtgcataagcctgttcgtcgccatcaaaattcactgggccatctgcaaacagggcaaggccgggcacgaaacgcatcaccgtgccggccagtccgcagaacacattgacgttgccatggaatcggccggatacaggaggagtaaccgttacggtggtgtcggttgcggaatccacgtcgcagcggacaccgagggcttcgagtgcgcccatcataaggtccgtgtcgcgcgaacgcagcaggccaatcagagtaacgggcttgctgccgagggcggcgagaatcaggtagcggttggatagggacttgctgcccggcaccgttaccgtagcgttcaacggctgtgcggcgagcggggcaggccagagattcgtgagtcgttcagtcataaggccaaatctatcaaacaaattattcaccggtcggcagcgatgcgggattcgatctgctgatcaggtgcggaagacggctgctcaaaaccgccttcgatggcctgcgcgtgcaacaactgagcggccgcgcgatcggcctcgatggcggcgatctggcgcgagaacacgatgaaccagccgaggaacgccagaccagccaacgcctccacattggtgagggtgttgtgacccatcatcatattgacccagaatgcagcgcatacgagcgcggtcaggtcggaggccaccatcactgctttggacaggcgtggcgcaagccacggcaggagcacgaacagcagcagcatgacgaacggcaggcctttggcgcatatattgtgcaagagattgtgtggcgtgtaccgaaacacgccgatgccgatgaatgccaggccggccaccatcagcaggaaggacagaatggagatgcgcagcatgaaatgtgggatttcgtagccgcgattcggatctctgttggtgcggtcgtgccagaggcgctgtagccgttcggtggtcaccagttcggagatggcgaagtagctgacgatgatgatgcatgtgccggcaagaatcagcgtggagttgaacatacgggccgcaaacgtggttctgtcgccgagctgcgaaaagttgttgtgataccagtatgggtcgtcggtggtcatgccggcggtgaccacgccggagatgacgaagaacggcaacagactggcaatagttttggcgttcatcatctccgcctgtacaaaggtcatgtaccccaccacgccggcgaaggcggcgcagacgctggagatatagccggagaagatggcattgcccatcatgtcgttggccgcaccgatgagtgcaaaagacgacaggaaaatggtcgaggcatacaccaccgaaagggcgacgatttcgaaaatgcgacgaatcggtgcaaacaaaccatgtttgaggttcaatgaacgtgatttgcgcgcatagccaataatgaaggaaatgacgccgcatgccgccacgatgcccgaacataccatgaatcggcgttgcgtcagctgccagatggccggcgcgtattccatgtacaggttcatcgataccgcgccaacgacggcgcaaatcaagaaggagatgagtccggaggtttctgcacgctgatgacgtcccatgccgggcctcccctatctattcgatgccgcgttatctttcaacaacaaacaaaactccccccgaggacaacgctttactagcaagccagcgggatttggctgtcgccattctactgaaaatctgaaacactacaaaaaaaaacgattatgtacgggcttcttagcctttgcgactatcgttaccgccttgccgagtaccgttgttcatgcagaaagaaagcagtattggacacaatcgaatgagcgtgtcggtatcgttgaaaaagtaatgaatgacggttctatcggttcaacctttaagggacgaaccagccgcggcaccatggcgctgatgcatgactatgccgagctcatcaatgaattacgtccgacagcagagcaattcaccgagatcgagcaataccgggtcaaacgaattcaggcgttcttcaccagcaaaccattcaagctggagtccgacaactcgctttccgttgatgcggccgtggaacatctgctgcggcagacagcgcagcggcgaagggagaatccgggcaccatgtacgtcggcaccgtcctgcagcatctcgtcgcggcaaagctcaccatcgttgctccggaagtagaaatcaacggcgcgtccgttgctgatgatccaagtccgcggcttccaacggtgaggccgcggaccgtctcacaaaaccgtccgcggctccgccctcctgtttcgtcgcaactgactacaccgacgggttcgggcgcttcgtcacgaaaacgccattacgatgcaccgtatacgcgccgccgtcactgccccgttccgcccggaacaggacgatcggctcccctgcgatgtcgcgcagttcgacatccgatctgccacgtgtcagatagaagtcgaatatggcgtcgtcggattgacgcacggtgtgcagaacgtcagaggtcacgccgctggcgggcgaccgcaggttggcttccggctgccggccatcctgcggctgcgcggcaagccagcctcccacgaatcgcgtcagatcgctcacgcccagatcgcagccgaggaaatacgcctccccttcgccgtacgtgttgcgggtgatcgcggccatgccgtcaagctcccactcatccgcttcttcgccggcatacgaggcaagcacctgcacatgcggtccggcgacggtcacgtcaccgagcttgtcgatgacgcgatcgagccagtcgaaatcccaatggtcttcgatgggctggaggcgatctcagctgaagatggcaagggccacggtgttgacgccggcctggcccatcaggcggatgtcgtcatcccagatttcctccggccattagtcgggactatagtcgccaccgaaagcgatgccgcgtccgtccgcggtcagcagttttggccatgcgaagtcacgtcatgcacgcacggttatctcctttggcaggcggcgcagggccacggcccatatcggataccagctgatactagctgatagacactcctggccgatagtcgacacgccgccggttccggccccactgccggaaccgacatgggtatgttcatgaccgccgaccgcaggaacgaacaggcccgtccgccacggaccgcatcttgcggttcaggcggacgggccttatgggagggatgggaac

SEQ ID NO: 3841 - DNA, 2996 bp, Unknown
  R35_2m  MAG No. k141_11869
ctacctgcgcccggacgtcgccgaaaccccgctcacgcaggaagaggcgctcgccggtggcccgaagaccgaggccggcatgttcgtggcaccgcgaatcctgggaagcgaggagtaatcgatgagcaacgaaaccgcaactctcgtcaaactgtctgctgccgagcaggccgctgccatcaagaagggcgacgtcacctctcgtgagctcgtcgaagcccacctcaaggtgatcgaagccgccgagccgtccatcaaggccttcctgaaggtttccggcgatgtggctctcgagcaggccgacgccttcgacgccaagtccgccgaagacaaggccgccctgcctgagctggctggtgtgccgatcgccatcaaggacatgatcgtcaccaagggcattgagaccaccgccgcctccaagatcctcgaaggctgggtgccgccgtacgacgccaccgtcatcgaaaagctcaaggccgccggcatgccgattctcggcaagaccaacctcgacgaattcgcccagggctcctccaccgagcactccgcctaccagaccacccacaacccgtgggataccgagcgcgtgcccggcggttccggtggcggctccgcctccgcagtcgccgcattcgaggcaccgatcgccctcggcaccgacaccggtggctcgattcgccagcccggcgccctgaccggcaccgtgggcgtcaaacccacctacggcggcgtctcccgtttcggagccatcgccatggcctcctcgctcgaccagatcggcccggtctcccgcaccgtgctcgactccgcactgctgcaggagatcatcggtggccacgacaagcgtgactccacctccatccccgaaggcccgcgcccgatggtcgccgccgcccgcgaaggcgccaagcgcgatctgaagggcatgaaggtcggcctcatcaaggaactcggcggcgacggcttccagcccggcgtcgaggcccgcttcaacgaggccgtcgacaagctcaaggagatgggtgccgaggtcgttgaggtctcggttccgcacatcggctactcgctgggcgcctactacatcatcatgccgtccgaggtcagctccaacctggcccgttacgatggcatgcgctacggcctgcgcgtgatgccgccgaccggcgtgcctcagaccgccgccaacatgatggcctacacccgtgaggccggcttcggcgacgaggtcaagcgccgtatcatcctcggtacctacgccctgtccgccggctactacgacgcctggtacggttcggcccagaaggtccgcacgctgatcatccgggacttccacaacgccttcgagaaggccgacgtactcgtggcccccaccagcccgtccaccgccttcaagttcggcgagaagatggacgacccgctggccatgtacatgaacgacatcgccaccattccggccaacctcgccggcgtgcctgccatgtccatcccggccggcctgtccgacgacggcctgcccgtcggcttccagttcatcgccccgcagcagcgcgacgaagtcatgtacaagccggctgcggccctcgaagccgcgctggaagacagctggaacggcccgatctggaacgacctcaagaccccgtggcttgacggcctgggcaagtgagcatcggaaggaaagaaacaacatcatggctgaaaaactgatgaagtacgccgatgccaccaagaagtacgatgtggtcttcggtctggaaacccatgtggagctgtccacgaacaccaagctgttctgcccggcccacatcgagttcggcagcgagccgaacaccgagctgaccccggtgagccttggcctgccgggctccctgccggtgatcaacaagaccgccgtcgattacgcgatcaagctgggcctggccctgcactgcgaaatcgccgagtggagccagttcgcccgcaagaactacttctacccggacatgccgcgtgactaccagatctcgcagtacgacaagcccaccaacggcaatggctacctggacgtcgaactggaggacggcaccgtcttccgcgtgccgatcgagcgcgcccacatcgaggacgacgccggcaagaacacccacgtgggtggcgccgacggccgtatcgaaggcgccgatcattcgctggtcgactacaaccgtgccggcgtgccgctgatcgagatcgtcaccaagccgatcgagggcgcgggcgatcgcgctcccgaaatcgccggtgcctacatgcgcgccatccgcgacatcgtgcgcgcgctgaacatctcccatgcccgcatggagcagggcaacatgcgcgccgacgtgaacgtctcgctgcgtccgagcccggacgccccctacggcacccgttccgaaaccaagaacgtgaactcgttccgcggcatcgagaagaccatccagtacgagatccgccgccaggccgcccgtctggacgacggcaaggagattctgcaggagacccgccactgggatgaggcttcgcagaccaccgccggcggccgtctgaagtccgatgccgacgactaccgctacttcccggaccccgacctcgtcatgctccacatcaccaaggagcacatcgaggagatgaaggcccagatgccggaaatgccgcgtgagcgccgcaaccgcctcaagtctgagtggggcctgagtgatctgcagatgcgcgacatcctcaacgccgacgccctcgacctgattgaggaaaccgtcaaggccggtgccaaggccgccggtgcccgcaagtggtggctgggcgagctttcccgcgaagccaacgccaagggtatgtccctcgaagagctgccgatcaccccggccgatgtggccgaggtcgagaagctcatcgcctccggcaagctcaacgacaagctcgccaagcagaccgtcgaaggcgtgcttaagggcgaaggcactccggatgaagtcgtcaagaagcacgactacaagatc

SEQ ID NO: 3842 - DNA, 15447 bp, Unknown
  R35_2m  MAG No. k141_12175
cgcgtcgggcaacgcggcatcctgtgaaacgcgaaccaagcgacggcgtaagccgtgtgagtcttggagctggcctcggcaacgaggccatgcagatgacttcgctctagcgacaagctaaaacaaagtcatctacaacggagccaagaaaatgaggcgtatggcctatattggtgtctatgagaagcccacgcgaggattttgaggcggcaggcaagcgactgccttgggatgctgctgctcgcaatgcagcgctgtccgccaccgcgccagtctctgacgtcaaggcatccgccaatggcgccgacaatgccagcaatgccagcaatgctgaacattccgatgacatgcccaccgtgccgattcccgcacgcaaggctgccacgacgttcgacaccccctccaagcgtgagcgcatcgaggtcaagccgccgatcacccgattcatacgtcgtgccatcacccgcgtgttcggcgtatggtcacacatctccactcaggtggtgcgccaatggggctggtatccgcgagtggaaccctatgtgggttatggcaccggcgattactcgcgcctgatctgccgcacggtatacgcccccaagcacgcgcaatccggcgaactgatccgcggcatccgcggcatgcttgccgtatccgcgccgcgcacccacgtgcaggccagcattgatgacacgccgctcaacaccgtgcagatcggcgtctccgaggtctatgacaaggtggaccgcacgcgcgatctcggcagcgaatacgccatctccgattccgccggatacctcgacctcgtggccgagcatcgtctggtgcccggcatccatcgcgtctcctacagcgtggccaaccgcaaacccgtgagcgccaacctgtacaccatccccgccagtgccaaagtcggcatcatctccgatgtggacgacaccatcatgatcacacaggccccggtgccatggaaggccgcgtacaacctgctgttcctcgaccccaagaagaaagcctccgtgccgggcatgagcgtgctgttcacccgcatcgccgacttgttccccggcgcaccgttcttctatctttcgacatcgccctggaatgtggagagttcgatccgcaacttcatcactgaccatggttttcccgaaggcccgctgctgctgcgcgacctcgacccgaggcccaagaccttcgtgcccaccggcccccagcacaaacttgagtttgccgaacaacttatggccgacttcccggacatgaagttcattctggtgggcgatgacgggcagaaggacccgaccacgtacgccaccatcgcccgcagatatcccggacgtgtactggcgatcgtcattcgtgagttgagcccgcgcgaatcaaccggattggcgtcggtgacgggactcacctcgacccagccgactccggtaaccgatgtaccagtattcaccggcaccaccggctcgaacattctgaagaccatgctgccgtatctgaagacggtgttgcgataagcgcggcgtgatgaacgccgaatgcgtcccggtgtggtgcctcgcctataatcgcgtggtatgactgacgagagcacaaacgccgcggccgcgatgccgccttacgccaagcgcgagccgaagcgccgcgaattccacggtgacgttttcgacgacgattacgagtggatgcgagacaaagactccgatgatgtgcgcagctacgtagctgccgaaaaccagtactgcgagcgtcgcatggcgcatctggcggatttccggcatacgttgtttgaagagctgaaatcgcatgtggaagagaccgatatgtctgttcccacgcgcatcaacgattactggtacttcacccgcacgcagcagggcaaacagtatggcgtgcaatgccgcatccccgtgcgcgatgccgatgactgggacccgccggtcgtggatccgcaaggcgcgcccggctccatgcccggtgaacaggtcgtttttgatgcgaacaaggaatccgaggggcatgacttcttccggctcggcggcttggatctgagcaaggacggccgttggatgctgtacggcgtggatgttgcgggagacgaacgatatgatttccgcatccgcgaccttgccgggctggagaccggggagccggtcagcgaactgcccgaacagttcaccggcattggcagcgcatgcttcacgccggacggccaatgggtgttctgggtggaattggacgattcctggcggccgctcgccgtgtggcggcatcgtgttggcacggcggtcgaatcggatgtgtgcgtgtaccgagaaaccgatgaacggttctgggtgggcgtcggcatcagttttgatgagcgcaatatcgtgatcggcaccggttccaaaaccaccaccgaagtgctgatgctgccggtggccacgcctgaaggcgaattccaagccttcattccacgtcagaacgatattgaatatgatgtgagctttgcctgttttgaaggcgcgggggagaacggtgcggatgtgccgctcgccgtggtctatcacaacgccgccaatccgaatttcgaaatcgacgtcattgacatgcgtggccatgagccgccgtaccgactcggcgaaggcgtgtgcatcgccgccgggtcgccgtacggctgtgaacatggtgagccggataagccgattaccgaggcatacttcaacgccgccaatccggcgatattgcagggtgcccacggtctgggcatcgaaggcatcgcgttgcatcgcaactttgtgtccctgagctaccgtgccgacggccagccgcacgtggcatacatgaccaagagcgcggccgccgccgacttcctggccggacggccgtggcggtttacggaactgctgccgcctgccctggaggacgactgggacatggttgccgccgatcgcgaaaacttcaccggcgatcatggcgaaatcttgtggaccgaagatgaggcccccacggatcacacgtcatcttccgatggtgccagcgacgaccacctgcccggtgagacccggcgcttgtacaccatcggcgtcggcggcaacccatcgtatgaggcgccgcgcatgcgctactcgttcgccagctacacccgcccgggcgagctgcacgaaatcgatcccgccaccggtgaagatgcgctgctgaagcgagccaccgtgttgggcgacttcaatccacgcgattacatggaacgccgtgtgtggattaccgcgcgcgacggcgaacgcattcctgtttccctcgtctggcaccgcgattgcccggcgcaggattcgccgatgttcattaccggatatggtgcatacgagatttcctccgatccggggttctcggtctctcgtctgagcatgttggatcgcggtgtgctgtacgccgtgccgcacattcgcggtggcggcgaaatgggacgcgcctggtatgaacaggggcgcagactgaacaagaagcattcctttgaggacttcgtggacgccacacgcgcgctgcagaaggcgcatttggctgatgcttggcgcaccgtggccaacggcggatccgctggcggcctgctgatgggcgcgattgccaatatggcgcccgaatgctacgccggtgttgaggcggatgtgccgttcgtggacgcgttgacctccattcttgacccggacttgccgttgaccgtcaccgaatgggacgaatggggagacccgttgcatgaccctgaggtgtatcagtacatgaagtcgtacacgccatacgagaatgtgccggtggccgtactcgagggcggcgacgacgaggctgccggtgacggcagtgctgatggggctgccgccggcgcgctcgccgccgcgcaattcccgagaatcttcattaccacctcgatgaacgacacccgcgtgctgtacgtcgagccgctcaaatggctggcccgtctgcagtccgccggcgtggacgcggtggctaagatcgaggtcgaggccggtcacggcggtctatccgggcgttacaagcaatgggaagaggtttcctatgagaacgcttggtgcatggatgtgatggggctcgctcattaggtcatttcgtcgttcattaggtcggtgtcctcttctatgtgagactgaaatgccgccatttcagtccctgaaatgaacccacaccgacctaatgaacactaaaatgacctaatgaatgtctcgacacgatacgcatgttggttgtgtccactagctgagcgggttcgggccggcaggtggtcgcgcgagtaggctccttgaactatggcaaagacatataaaatcgccgttattcccggcgacggtattggcaaggaagtcactccgtgggctcagaaggctttggaaaaggccgctgaaggcgtagctgacttcgagtatgagaacttcgacttgggtgccgagcgttatctgcgcgatggtgcgatcctgcccgaggacgaagaggagcgcatcaaggccaacgacgcgattctgctcggcgccgtgggcgatccgcgcatcaaggccggcattctggaacgcggcctgctgctgaagctgcgcttcgacctcgaccagtacgtgaacctgcgcccctccaagctgtacaagggcgtcacctcgccgctcgccaaccccggcgacatcgacttcgtggtggtgcgtgaaggcaccgaaggtctgtactgcggcgccggcggcgcggtgcgccgcaacaccccgcaggaggtggccaccgaggtgtccatcaacaccgcatacggtgtggagcgtgtggtgcgttacgccttcaagctcgctatgaagcgcaagaagcacgtcaccctggtgcacaagaagaacgtgctcgtcaacgccggtgatatgtggcaacgcatcgtcgacaaggtcggcgaggaataccctgaggtcacccacgactaccagcacatcgatgcggccaccatcttcctggtctccgacccgagccgtttcgatgtgattctcactgacaacctcttcggcgacattctgaccgatgaggccggctccgtggtgggcggcgtgggctactccgcctccggctgcatcaacgcctccgacgagttcccgtccatgttcgagccgattcacggttccgctccggacatcgccggtcagaacaaggccaacccgaccgccgccatcctctccgccgccatgctgctcgagcatctcggctttgatgatgcggccaagaagattcacaccgccgtcgaagcggacatcgaggagctcggctccaccgtgcgctccaccgaccaggtcggcaaggacattctggcccgcatgtgatgtcccacttggctcccctccagaggggagccaagtttatactgagttgcatgcaaatgcgacatggggaatgcaaaaccgttggcggcaaactagtcgccgtgaccgtatccgtcgatgatgacggcaccgcacagtcatgccatatcagcggtgatttctttattgaatcagtttcggatgccgaatctcatgctttgttgcgtgacctggaacaggctctaattagcgatgattcattgcggtccgtattggacgctcaccctagttgccgaattatcggcacagatgaaattgccatcaaaaccgcatacagccgagccgtaagcagcaacttgcccccgctggcgggggctcctgcgcagcgggtgggggtggtcagccccgatgcatcgaacaccccggcatccatcaatacacaaaccaagcagcccgacaaaagctctgaataccgggagcgctggaacgccctcagacctcaactcaccgtgatccacgaccatccgcgtactccggacgagcaaatggccattgacgagacctgggcgcgtgaagtcgcagcaggaacacgacagccgaccatacggttctgggagtgggcgggcccggctgtggtcatcggccgtttccaatcggcccaggacgaggtgaatctggacattgccgagcagctcggtttcgacgtggtgcgccgttgcacgggtggtggcgcgatgtttatcgaaccgggcaacaccattacctattctctgtatgcaccgctcgatttcgttcagggcgtaagcatcgaagaatcctaccggctctgtgactggtggctggtcgaagcgctgcgcgaacttggcttggatgtgcggttcgcgggcctcaatgatatcgcctcgcagtacggcaagatcgggggagcggcgcaacggcgcttccccgtaggctcaggcggcgcggtgctgcaccatgtgaccatggcatatgacatcgatgcggccaagatgagccgtgtgctcaacaccagtcgcgagaagatgtcagacaaagcggtgaaatcagcagtcaaacgcgtggacccgatgaaaagccagacgggtctcagccgcgaacacatcgtcgaacaccttattgactggtttgcggcgtgatttcaccgatggccgtatgcgattttgccggtggccgtgcgtggttttgtcatgggcgagcgcggtaaccgcgacagtgccgtttttcgcggtaacacattcgtcagcatgtcgtacggctatcggatcgcgccacacatgaagtgacgaatgatggcatgcttctgacgaaacctgtggggcgcgttacaatatgacggatggccgacgacggtcgtaggacaataaggatggtgcgatgagcttggaaacgccaaacgcttttgctgacgaggagaacatcctgctgcatacggcattgttcaagcaggtatcgccagccgaagccgaggagctgctgccgcatttgaagcgtgcgaccttcgataagggcgactatatcttctccgaaggcgataccgatcagcgcatgtatctactggagcaggggcgcgtcaagctgattcgcacttcttccgatgaccgcgtgcagctgctgtccatccacgcgccgggcgaagtgcttggcgagattccggtattcgaccctcatggtggcccgcgcaccgcgtccgcggtgtccatgagccatggcacgcgcgtggtctggctggagcatgatgccctgttcgcatggcttgatgagcatccgcgtgtggccatcgacatgttgcaggtcatggccaaccgccagcgcggcaacaacgaacgcatctccgacttggtattcatggatgtgccggcgcgtctggccaagacattgctcaacttgggctcacgtttcggcgagccggtggaacagggcctcaaagtgccgcatgacctgactcaggaagagctggcccaactggtgggctccagtcgtgagaccgtgaacaaggcgttgatggacttttccaaccgcggatggatcgcacgtgacggtcgatcgatcatcatcttccagccaggcatgctgattcgacgctcgcggcgctgaccgttcggctgacttccagccaatgttacgctagtgcggttcttgtgatgatatgttcacggaagctgactgcgagcccggttggtagggcaccccatttagaatggggcccatgcccaaaaagaagtccctcactctccaacgtgtgcttgttctcctcttggcctatatcatgcttgccgtctgcggtggcgtggcggccagcgtgttgtttgtaccgggtgtggtcggtgccaataaagccgccaaagcggtgattccgtcgctcaaggtagaaaacgtggacttcgacgtgaccggtctgccccagaagtcgacgatgtacgcgcgagacggttccaccgttatcgcgacgttctacaaccaaaaccgtatcgtcgtgccgctgaagaagatttccaaaaccatgcagcaggcagtggtggcgcgcgaggaccgtcgattctggactcacgccggcgtcgacgtgcaaggcgtgatgcgtgcgttcgtgcagacctacctcgtcaaaggctcccagcagggtggttcgtcgctgacccagcagtacgtcaagaacgtgctgctcatgcaggcgatcgaggacgacgacccgatcgcccagtaccatgccaccgaagacaccgtcgcccgtaagattcgcgagatgctgatctccgtgcagatggagaagaagtattccaaggccgagattctgcagggctatctgaacatcgcccagttcggcaacaacctgtatggcgtggaaaccgcagcccagcgctacttcagcgtgtccgccgccgatttgaacgtggtgcagtccgccaccatcgcggctatcaccaagaacccgagccagtacgatccgctggtcgaggagaaccagaaggaaagcgagaaccagcgcaacatcgtgctcaagctgatgctgcaggaggggtacatcacccagaagcagtacaccgaagccgtgaacacgccgctgaaggacacgctgaaggtgcaggccgtgaacgtcggctgccaggacaccggcgactacgcatacttctgtgatttcgtggtgcatcgcatccagaactccgaagaattcggcaagactcgtgcggagcgtaacaagctgctgcaggagggtggcctgaagatcgtcaccacgttggatgtggaagcgaattccacgatgatggagaccgcgcgtaataccattccaccggacgatcccagcggcatggaaatagccatggccgcagtcaaaccgggaaccggcgaggtgctgagctttggcctgaatcgttactatgacgccactccggcagccgcgaacgatccgaccaagtcgggccagaactatgccgtcgatctggtggacggcggcggctccggttggaccattggttcgtcttggaagccgatcaacctgattgcgtggatggaggcgggtcattcgatcaacgacaacctacagaccaccacgacgtaccccacgaccgacttcgcctgcaacaactacaagggcggtgccgattcgtggaacgtgtcgaacgccatgggcgccggcacggtgaacccggaaagcccgttcctcggtctggtgcgatcgcacaacaccacccaggcctccatgggcgccatcctcaaactgtgcaaggtggcggacaccgcgaccaaactgggataccatgacgccgccacgggtgagaccatcgacaaaacccaggtgtatacaccatccatgatgatcggctcggtgaatgtgtccccgctgaccatggcgagcatcttcgccgtatacgcctcgaatggtgtgcaatgcaacccgattgccatcagcaaggtgaccgataaggacggcaacgatctcaaggttccatccgcgaactgccatcaggcggtggataaggacatcatccaaacactcgcttataccctgaaccaaggtacggtgcggccggatggtgccggttggtcattcagattggctgacgggcgtaagtcgtttggtaagaccggtaccagtgaggatcttgcggtgtccggtggatcgttcattcctaatcagattgcggcgttcgctgtggtcggcgatgcacagaacccgtacaccaaccgtatttccaacattgccatcaacggccggtacaacagctattgggatggttcgacaatcgcagctccggccgttaccaacttcttcaatagctacatttccaagaagaaaataccgattgacaacgattacggccagcccgtctcgaagtacaccacgactggcaagtacctgggcattggcggacgaacgttcagcgtgccgcagaccactacgaatggcaacagccaatcgcagacgaccaccaatggtcaatcccagtcgcagtctcagtcgcagaacactgggcaaaacaacacccaaacccagggcaccaattcagagcggtcgaatgatggccagtgattggtgattggcgtttgacatttggtgattgcaggccggctgagtctacgtaacatagtcgactgcgatacccaaattacgtagtttgcgggcgttacctgtttcaggtgacgcccgttttacaatacttaatgacaacgccagcgcgttcatcgaatattcgccatgaacgcgcattggaaaggggaacgatgagcgacgacgatctgacgcatgagaattttgattttcgtggattcgacgtgccggatctcaaagcggtgacgctggcttcgtcttcggacggcgaacagtccaagcagccgaagaccaagcacgaggatgcatcgaggaaccgtaggcacggtaagaagaagtcaaaatccgacgcacggtccaagaagcgggccggcgcgggcaagacgagcgaatcgttcgatgattatgaggattatgaggaaagggaagctgtgagcaaggcagataagaaagccagcaaggaccgtccgggactgtttgcgccaatgacgctgcgcgaagtgaccgtgcgtaatcgtatttggttgccgccgatgtgcacgtattcgtcgttcgcctgcgatggtaggcccacgccgttccactaccagcattacgtgtctcgtgcgttcggcggattcggcatggtgatcgtcgaatccaccgccgtggctcctgaagggcgtatcacgccgtgcgatctgggcctgtgggaagacgggcagattgatgcttggcgctggatcgtggacggtattcgcgaggcgggtgcggtgcctgccatccagctcaaccatgcggggcgtaaggcttcgaccggttgcttcgccgttggttacgacggtcagagtgtgccggaggaggcgggcggctggcccaccatggcaccgtctgaaatcgcgttcggcgggctgcgtacgccgcgcgcgctgtccgtggatgagattcatggtctggtcggtgcgttcgccgcggcggcgggccgtgcggtggccgccggcttccaggctattcagattcatgctgcgcatggctatctgatttctcagttccttgacccgctgagcaatgagcgtgatgacgaatatggtggcgatttgaccggtcgctctcgtttcctggtcgaggttgtggatgccgtgcgcggggccgtccccgagggcgtgccggttctggtgcgcatttcggccacggattgggccgctggcggttgggatttggaccagaccattgcactatccaaggtgctgaaggagcatggcgtcgatgtgatggacgtgtccactggcggcatcatgtcgggagtgtcgattccggtcaagccgaactatcaggtgccgttcgccgagcaggtcaagtccaaggccgatattccggtgaccgcggtgggtcttatcaccaagccgaagcaggcggccaagattttggcccgtggcgaagccgatgccgtggaaattggccgcgccgcattgcgcgatccgtactggccgttgcgtgcggccaacaagctgggcataccgtccacagaggtcccctacgccccgcaatacgtggccggtgcgtactgaatcctcatggggcggtgactttcccatggggcggtaaaaccctcatggggcggtaaaaccctcatggggcggtaaaaccctcatggggcggtaaaaccctcatggggcggtaacccaaaacggcggtattctgcggaatgtgaaatttggctaaccgccccatgggacaatcaccgccccatgagggttttaccgccccatgggtaatagggcaatatgtgagttcactccacgtccacgccgacggcgtcggagacgtgctcgaatccgtcgcggcgcagcagctgggccagaccgcgcttcaacacggtgatctgctgcgggcctcggtacatcagcgagctgatgaacatgaccaggctggagccggaacgaatcttcgcataggcttgctcgggggtaaagacgccaccgatgccggcgatggcgaaccggtcgccatactccttatacaccttgcgaatcagctcggtgctggcgttggtgcacgggccgccggacaggccgccctcccaatcgcgcggaatctcgaggccggtgcggtccttctgcagattggcgatggacagcccctgcacattgtgctcggccagcacatcgagcagctccttgtactcgccccacggcttgttcaacggcatcttgaccagcgtgggctgcgggcggtcgatcttgtcgagcgccgtaaacagacggtcgagcgcttccggagtcgcggtgaacggttcgccgacgcgcgtgttcgggcaggagacgttgacctccaccatcgcggtgcggccggcggcgcggcgcatcgaaatgcagtaatcctcaatgccttcgtccaaatcgccgcactggtcgtcgttggtgcgggcgatcgacacggacagctgcatctggcgggcctgagtccaagccttctcggcgcgctcgatgaccttgtccgaaccgatgttggcgaggccgacgtgcaccatcatcgaatcgtattcaggcagacggtggaaccacggcttggcgttgcccgggcagggacgcgaggtggtggagcctacggtttcaaaaccgaagccggcatggtccagcaccacgggcatgtcgcagttcttgtcgaggccggcggacaggccgaacgggttggtgaaatcgacgcccatcacattcgtttccagaatggggtcggtgtagtcgagcatcagctgctcggcgagcagcagcggcgggacgttcttgacgacgtggcagaactcgatcatctgatcgtgtgcctcatcggggcggtggttgaacacgaagttcggtttgatgatgtgcttgtagccgaaggtgaacagatcggtggtggctttgttgacggcgtcgtgccagaagctttcagaaacgtaagtcataccgcctattgtctcacgcttgggctggtgcggctaggcgattcctgcctaggcgaattggggaaggggctaccgcgtgtcgaggcgcacgcaggcgtcggctcggcagaagatacatgaatcgggatgcaccaggtatcaggcgtgactcgccgctgagcaacgcgctcgggagagtcgtcggtcgtgagtcatcgcgctagtggtcgctgcgagaatatcggttcgcacaatgtgcgattttgcgcggttttgtggaaatgaacacctgaattgcccggaattttcgagagattgtccccaaaacgctcaagccggtttggtttgtgagcttttgtgtgcgataatgttcacatgatttcgtcacaacgtcagcacctcatcttgagcaggttgcgcacgcgcggggcagtgcgcattacggcgctatcgaaggaactgggtgtgtcagcgatgaccatccgccgcgatatcgccgaacttgccgacaagggactgctgaagcgcgtccatggcggcgcggtgactaccagtaccttgctcagcgaacccctgttctctgtcaagtcccagatggatctcggcctgaaggacgccatcgcccaggaagccatcaaatatgtggctcccggcgatgtgatcgccatcggcggcggcaccacggcctatgtcttcgcccagcatctgctcgaatcgcagcagtccagcggcatcaccatcctcaccaattcgattcccgtggccgaactggtccaggccctcgaatccaaggacgtggaggtgatcgtcaccggcggcgtgatcacccgatcgaactcgcttgtcggtccgatcgcggacaaggtcgtcgcctcgctgcgtgtcaacaccgtattcctcggcacccactcggtgtcgattccccgtggcttcctgatgccgaattcgctggaagccgcaaccgatatggcgatgatggacatcgccgatcgtaccatagttttgaccgatcacaccaagtggagctgcacatcgctgtcgctgtttgcgcgcttcgaccaggtggacacggtcattactgacgacgggctcgatcccgactccgccgccaaaaccaaggatttggtaaaggaactcgtgctggcccaccagagcgagatcattgaggaaagtgagtaaacccatggctgatttcgccaactacacccccggggagtatgcgaaggagcacatccgcatcacgccgacgacgcttgccgacggtcgtgacttcttctacctggacgacgaccccgagttcgtctccggtgccaagacccgcgagctcaaggacccgcgcccgctggactaccgtttcgccccgcacctggacgccgacggcaacgaagtgccgtacgccgccccgcagatgcgccgcgacccgctgaccggcgactggatcccgatggccaccgcccgcatgaaccgcccgatcaccgccggccccggcgctaccgccaagggcaacccgctggccgcccgcaagcccggtgacccgtaccaggacggcgaagtgccggacatcgactacaacgtcgtcgtgttcgagaaccgcttcccctccatggtgcgcgtgcccggcgtctccgaggacgtgacctacgttgacggcaacccgctgtgggagaagaagctcgccgccggccgctgcgaagtcatctgcttcgacccgaacgaggacggcctgccggccgatctgccggtctcccgcctgcgcaccgtggttgaggcttgggccttccgtaccgccgaaatctccaagatggaaggcatcgagcagatcttcccgttcgagaaccacggccaggaaatcggcgtctccctcgcccacccgcacggccaggtctactgctacccgttcatcgccccgaagatggagaaggaactccagcacaccgaggcctaccacgagaagaccggcggcaacctgcttaaggacatcatgaacgccgagctcgaagccggcgaacgcatcgtgatgcgcaaccacagctgggtcgcctacgtgccggccgccgcccgttggcccctcgaggtccacgtggctccggtgcgcgacgtgctcaccctcgaccagctcaacgacgaagagcgttgggaccttgcctccatgtactcgcacctcctgaagcgcggcaacgccttcttcgacaagggcgacggcaagggcatggatctgccgtacatcgccgcctggcaccaggccccgatccacgacgcccgccgcgagaactaccgcctgaacctgcagttcttctccttccgtcgtgccgccaacaagatcaagtacctcgctggctccgaatccggcatggccgcctggatctccgacaccacgccggaactcatcgccaagcgcttccacgagctcggctccatcgacatcgccgactgatagaaagaaaacatcaatgactgctgttgaattcattgagccgctgacccatgaggaaggcgtctcgcaagccaccaagctgttcgtcgatacctacggcgctgcgcccgagggcgtgtgggctgctccgggccgtgtgaacctgatcggtgagcacaccgattacaacgccggcctgtgcctgccgatcgctctgccgcaccgcactttcatcgccctgaagccgcgcgaa

SEQ ID NO: 3843 - DNA, 78525 bp, Unknown
  R35_2m  MAG No. k141_12243
caagccgaccacgaaacaggacgcccagccctctacgacaacgctatcgacaccgactacacccactcaatcggcattcaaaaaggccaaatctaacccccgcgacacgccgagccagacacacattttgacccttaaccccaaaaacatggcgtccgtcctcgttgtccctttttcgacgctccccggttctgaaatggctccgctggcatatagcaggctctccgtcaaggtcgtctttccagcgtctacatgggcaagaattccaatattgattattttcatgtgattgtcctccctttacagccccaaagggcataaaaatccccagcagtaaaatacttttaccactggggattataagttgcggacatacacatatacagcatacacctgtttgtgattgctgtttttggggatatgtcaaaattgataaggcaaaagtattcttaaattgggtacaaaaaactaagcccctacaaaaggagctatcataatcctttgttcccactatttgattatagttttatttaagaatacgttgccgcatattttttactccttttctggattaaatcattgtatcacatcagttttaggaaagcaagtacctaaaagaaattggcctttcgctgtttggtgtgggtgggtctgtcaggtggtgacggtgctgaggtcgagtttgccgcaggtcaggtagatcatggtgctgaagtagcccatgttcttgaatccgcgggctcgggtcttgacgttctggatgacgctgttgagtccttcgaggatcgcgttggtgtaggggtggtcgaagtaggcgaggatgtcccgccagtggcggcgtatctggcgggcgaactctttcatgggttcgagtcgggagcgcgtcatccacgagcacagacgcttgagggccgtctcggcctcggctcgatcggcgctggtgtcgtagatgtcctggagggtctcgcgcatctgacaggcgcgtccggttttcaatcgtcgccgttgcaggctgcgcttggtttccaattgcaggccggtcaggttcgattcgttcctcaaccacaggtacttggtccgcttgagcagcgcgttgccgcgggcctcctgtttgcggaccttgtcgacggcctcgttggcgtgtttgatcacgtggaacttgtcgatgattctcgccgcgttgggcagccgctcgcggatgcccttggcgaaccccaggctcatgtcgcaggtaaccagacgcacccggtcgggatcgccgttgtgatccatgaaatcccgcgcgaaccgtttgatcgtggtcgagtccttgcccgggaccacgcagattacgttgcgctccaccaggtcggcgaccacggtgatgtaccggtggcccttccggctggtctcgtcgatgcctatggcctccacgcccgtgtagtcctcgtaaagcctcgcctcgtccacgtaatggcggatgaaccgccacaggcgggtgtcatgttcgccgacctgctcggcgatgtccgcgaccggctggcttttggccagctccacgaccatcgcctcgaacaggagcgtgaacccgcttcccggcctcgcccacggcaccgggaccgcgtgcacgccgtgggcggggcacgtcacgcgcggcacgcccgcgtgaatgaacgccttgtactggaagaagttcagatgccgccacacgcgctccctcgcgtcatgcaccggacacgcggcctcgccgcaccccggttccgggcagggaaccgcgaacccgccgcgaacccgatcgcgatatgcagttcccgtctgccgtcctcctcgtcacggaactccacgcccgacaccctccacgggtcaggcagttgcagggcggcggtgaacaacgacgtggtatccatacccccaaactacccgaccagcaccaccaccccccccgacccactcacccacaccaaacagcgaaaggccaaacgagataacggaatcagtttcagccctcggaatccatcacagtacgccccttgccgaagagatggtcgacagtattagtgttgtgcatgaagtagttttaggatcagacacattacggacaagataatgaatggaataaaagaaaccttaggtttaatttctgaagccatcagcactatgacggaaagcagcaacgactggccctacactttggtggcagctcttctccttctgactgttgttgctcattgtgccatcaagatatcgactttgattggaggcaacgcatattcaagacagcagaagcgtctttcaagactgtcatctcttcgccaggcaaaggagaatcatcctgatgtgcttcttgaagctgaaatcgacgcagagacagcaaaagtgaacagatacgatgcatggtgccgttggcgacaagagaaaacacaaaaacatcggaatgaactaatcgagaataaaacgtctcgaagaagagccagcttcttttttactcttttttctcttctgctccttcttatcctatgggcaatacccttcttgctcaaattctcgggattgctttcccctgagaaaagcagcattttaagcaatattaaaaaggaagacttactaggcgtgggtttcctcctcgcttttcttatcctgccgataatctggattcctgtatatatcgttgcttaccgttcataccgggccgtcaaagaagcaaataacccaatatcgatatggggtttttcctggatgtcgatatccatgttgttctcggcaacgattgcagtgtcaattgagacagccacgaaatatactgccaaactcttagccagggagctaatgctggtggcaatcgctgccctgtttgttcctttgagccttgccgtgggatatgccatcgattacataatcgatagatggagattcgccaatcgtccagactcggaagatcattatcatgattcgttctgttctcccacactttgccgcatgttggctggctctaattttgtattctggctatgtatttccatcttatttgaagtggtttatttcgaatcggctatagataatatctgcgtattagtgcttgtcattatcctaagccttgtggttttcttctcaatcgtagtttctctcatttgtattatttcttttatccgcgaggatgagtttgcactgcacggccatcatgtgatcttccatgatggacagaaaagcaagctcaaaataataaacgagcacagaataataagctatggtctttcggcgaaaagcgcgtaccatcagccttcaagtcggaagaagggactcatctttgaaggatggaatacgcaagaagacggtcatggcgtaagcataagaaacgcggatgattttgacgcgatggtcccaaaagacaaatgcggggaaatcaaactatatgcccagtggaaggaaccatcttctcctggtccgaccagcggtatcagatcagcggcgaaataggataaggaccgccgccgacacccgtaggggccaagggtgagcatctcacatcgtatacggagaccctcacccctgcgtatggccgaccgtgtatccccgaccatgaatgttgcaacacttagacaccatggaacatgcacgatcggatagagactacggaccggctaccggaaccggtaaaagtcgaaagaacgaaatcgattctgctttcattcttttacgccctatgcacgccaagcgccataacaatgtttgcgatgaacttgtcatacgtcagtgccgacgaaggctcataggccacaccgtcctcgggattcgcaaacacgagccagacggcctgatacaagctctttcgacggagtcggtcacagagcaacaaaaaacgatcgaggtacgacgccccctcgaaatcagggtcaatcggaaaatgcgctgaccgcaccccacgtccgacaatccgactgtccggacaatcgtgaactatcatcacatagcccatgaccggtggaatactgctggaaccaagcagattctcatcgaacgccgtatgcgcgtcaaatgccgagccgattgattcctccgcgcggttgttggcgttgttcccgaaggaactgttaatgctcttcaattcgatagcgcttacgagttcgccgttgtcaagcgccagcaagtcccagttcttggtgggacggaaccagcccggtaatgtgcacatgcgtccttggtcatagacctcatcaggatggaaacccgcattaatgagatcgtcacgaatgatagctgcaatcggatccaggtgctttccagacgtgatcccctgacgtgctccctgatcggaatgccctgctgcagcctgtgcctcgcgggcgcgttcgattgaatcgtacatgccgagaatcgcggcctcgatgtcagatctcattccatggcctccttataagccgcttcggcgaatttcgttgccaaagccctgtccttctcgttaaaagcgcgcgaaagccccaatttgttcgtgtcacttatttggctatattccggtatatgcaccaagcgcaggtactgtgcctgaaagcgcaacgtccctccacgcatcttgacaccaagcgcatcgacgaaacgacgcgtcgtatcggccataagcaggccgccgagaacctccaaatcccactcatcggaagtgatccaatagcagttgtgatgcggatactttccatgcgacagaatcggatcgggctgagccgccatatccggtataagtagaaggtcccggtcaagcagtccaggtgtgagcttgtcgatagtgcggtaccaggcagctttattctttttcgcgacataccgtctcgacagccgttccttgtttgtttccaaataggttttgagtcgtggatattcgtcgaggttgaccaaagttccgtcgtcgttccacgggtttacaagccagcgatgcctatcgtcgttcccacgacgatggtcacgcatgtagaaaatcggcaccatacgatcaggctccgccaaatcattgtcttcagtaaggaacacatcatcacaaccagtggcgataccgataccgagtttcacgccggcctcttcgagtttcggcaacctttcacacgcctgcgagacgaatctcactaggtcatgattaccgagcggatacatcctatcaccggccggcttatcaatctcgaatgcttcgaatcgctcaccaaccagctccggctcgtcgtccatcagccaatcgaggaccgtggtggcgtcggcctcgttgaattccggagcgcaattcacgaatttcagatgatcggacgccgggcccttgcgaaccgtcgtgaccgcgggataggcatcgacctcgtcgtcgaacgcgtcgacgccgtgcatgcgcacgagggatacaaggtcacaatccgtgcccatgcgagatctcaacaacgtgccgtatttgttctgcagccatcggtcggcgcagatgaagcatagcgttccgccatccctcaacgcatcgaggcctctgtcgaagaagctcacgtacaggtcgcatcccgtcgttaccgaagagagccgcttaacgtaaagcgcccgcttcccccggtctatttcggtggcccggacgtatggcggattcccgacaataaaatcagcggcagggacgtcatcaagaatgaaatcgccgtgtacgatccactgctcgcaaagctcccgagcctggatcgcggggcatcctcttttcatcaatgactcgacggcggccttccttgccgtctcgatcgacgcggagtctatgtcataggcgcggatcgcattccccagcgacgtccaacctttgccaacggcaattgcatcatcggccagacgtgcggcaatcacggtcaggaaagctccgcacccgcaagatggttcgacgatcaccttatccgaaatgccggtgcccggcacatagccggccacgtcgagaatcaggttgacaacccattttttcgtatagacaacaccgtggtgcgcagatgccataatcctcctgaaatcagatacccctcagtatcacctattagaaaccgacaacgagtatcggcacgacccgtgaaacgctgttctcagccgaccaaacaccaggccccagcatcccctccatgggcgggaggctgtccctcagcatggctgcgcgggcggagcagaaaagttctccgcgcggcgtcgcattcgaattcagatatagtttcagttccgaacatcacgccactccctttctccctgattctcatttcgtggcccagggccttcggcctaatgacccatatggcgcccaggacctttgtgatcaatcccggcactcttgccatccccgtcttgccgagcaagattcttccgcagcgtgtcgccgaatctgtccagcagatccgttttgctgcgaatggcgtccggcttccgacgcaatccctcgaccagatcgatgaacgcgtgttcctcctgttccacgcagtcgaggaacacagaacagaacgccacgggatcgccgtccacctgccaggtctccagactgcgggcatagtcgcgcttggcgtcatacttgatcgccacgggacgatagccgtgcttcagcagcatgaaattgagcagctggcggccggtccgcccgttgccgtccatgaacgggtggatgttctcgaacatcgcatggaagccggcggccctgagcagcggatgagcgccgctcgcgtccagcccgtcgatcagggcccgcaggtcgtcgcggatctccagcgggtcggcggtcttgacgcgggtcgcggtgatcctcgccagataaccgtaggggcggaacgtgccgcgggcgaacggctggaggtccagcgccgtcacctcatggacgcgccggaccagttcctcatccagtctcctcccctcccgggcgtattcgcgtacgtaggccatgccgtccgcgacgccgcgcgcggcgaacacgtaccgtgccggcgaatctgacgggacgaactcgccctccaaaaccagggacgtgtcctccagggtcagcgtggatccctctatggcgtttgaattgtaggtgtagcgcaccagccagtcgcggtcgtaatccgccagcgccatgtcctcgacgccgtccagggggtccagtgcgcgggcacggtccttcagcgcgtcgatccgtcgtagacgttcggcgattcccggctcgtgttcaaggccgagcagttcctcgggcagttcctgtatgcgctgcgatagctcgggattggccatcatgtccctcttttcgtgttccggttgcaaagttcattattccagccgcggttcgttccgtcctgcggcctgcatgtcatagggaggcgcgccggccgtcccgggtcgattcgaacgccgcggccacttcttccgataccggcatgcgcatcgtcacccggccggtttcctgcgcggcggcacgtttcatggctcggcgttcggccctggtgggccgttcgagaatccactcggcgaacgcgcggataaggatggacgcgacgatcacgccgatggatccccagaagcacgggacgaagtccggctttgtatggtcggtccagaaccaggcgatcaacgcgaggatcaacgccaggccggcggacagggcggcgagcttgtggaacacgagggcgagcgtgcggatgggatgcgtgaccagtcccaccgccagcgcgacgacgacgagcagtgcgacgaagccggcggcgatgacggcgacgcccaggtatatcgcgagcatgtaaagtccgaacatgatcggccttccttccctctcctattccgtttcttcgggcagataggtgtagtcgacggcgacgccctccgcctcaagcagcacggctgcctcgcgcacggcggcggcgcggcgcttcacggattcctcggcccggacccagtcgggcagctcctcgggcaggtcggagacgcgggagaacgagagcacggcccgctcatctcccctgtgccgttccacgatggccacgacggcgcgcctgtgctcggcgagatagtgttcgagcatctcccgcattatccccgatggttggatccggtatttctccgactcgtatttcttgaccatgtccacggtgaggttcgcaagcacggccgcgtcgtgctgggtcatgccgatgcgttcgcgcgtcgcgcgcatccacgccttggcctcgctccaatcctcttttaccatggcccctcctggatataagaaagccggatccgcctgcgcgaaccgtgattatacttttagtataatcgaggttttctacagggcggacccggcgtttcccggggcgcggccgtggccgcgccccggtttcgtcactcggtcggcatcgatggattatcgtcggccgtggccttgcgctgctggtcgagcatctgctgctggatcaggacgctgttggtctgggccgtgtactgcttctgggccatgtccatgctttcctggtggcgttgtccctcgacgtcggcgaagacgagccgctggatgttctgcgcgagctgcatgagcttgtccttttcgaggatggacaccttgacgctgttcctgccgccggcctggttgacgaagtcgagctgcgcgctcatcgtgttcgccaggttcgcggccgcgagcaggaggaacaggatccccacaagcgcgctgctcgaaaggaacgagagtccggcgacgaggaagacggcgccccagacgaagctaccgaggttgaacttcgtgttcgtgtccacggacgcgatgttgcgcagcgggatcgtctgcgtggacgagccgagcgggatcacgcccagcagggtgttcggactcttgtacatcacgcgcatgttgctcgcggcgacgctggtcttgagccagaagagcaccacggacgggctgaaccggtcgccgatgacgtcggtctcccccgtcgcgtaggtgaattcggtcatggtctgttgtgtctccgtcatttctttttcctttccttgttgttattgccgaagtcgaaggtgacgcccttgtccttgtcgatgacgagcgcggcgtcaaacgtgccgcccttcctcgaggtgaagcccttgaagctgaccttccggccgtcgagcagcctgcgcatggtcgtgtcggtgatggtcttgccggccacggtcgtccaggcgcgccagccgcatccctccgtggtcctccatgtaccgtcggattgtttctcgcgccggttggtggagcattggaacaccttgcccgttttgacgacgggcttgccgcagcgcgggcagccgccgaacgattccgtgttccgcgtcttcgcctgcacatggtcctgccggacggtggtctgcgcgtcggccggtatgcgcgcggcgaggtcgcggaactccgtttcgacctgcgaggcgtccgcctgtccgtgttcgacctccgagaggcgtcgttccatgtcggcggtcaatgccacgtccttgagcttcggggcgaccacgtcgatcagggaacggccctggtccgtggagcgcagctgcttgcccttgcggtccacgtatccggtgcggatcagcttctcgatcacgtcggcgcgcgtggccggggtgccgatgcctcccgagtgggattcgtcgtcgtccaatgcggccttgaggtccttgtcctccacccagcggctggcgtgttccatcgcggcgagcagcgtcgcctcgctgaacggcttcggcggtttcgtctttccctcggacaatgtcgcgccgcattgcgggacgggcgcgatggagaccccggcgacgaggttcgcggggatgatgttgcccgcagtctcgtcattgtcgtcctgatcttcctgtggcccgtcatgttcgatggcgtgccagccgagggagacgggctggtcggaacggctggtgaaacggcattcgccttcggacaggaggcggccttcgtccggatgcttttcgcaccaatgcgggtcgatgttcgcgacgacgttcgtcacgtcgtgcacgtagtcgtcgcccacggcctcccacatgcggcgagcaacacggacgagcacgaggcgttcgtcgtcgccgagttcgtcgagcgccgccttgtcggcctgcatggtgggaaggatggcggtgtggccggccaccttcgcgtcgttcacggttagttcgagtcgcggccgttcaggtttcgcgtccggttcgatgaagccggtgacgaggcggtcgccttcggtgaggccgcgcagcgtgtccaggtcgtcgtgcgtgatgtactgcgagtcggtgcgtggatacgtcgccagttttttctcatacagggattgcaaggcggtcagggtgcgggcggcggtcaggccgtgcagccggctcatgtccttctgcaatccggtcaggtcgtacaggcggggcggcgcgtcgtgctgctgcttgcgttcggccttgaagatcgagaaggcgaagtcgtccgagttgacgatccgcagcagcgtctcggcgtcctcccgcttgtccaagcgttcgccggccagcttccatccgcccatcggggcgacgaccttccagtacggtcgggccacgtggccggctatctgccggtcgcggtccacgatcatcgcgagcgtgggcgtctgcacgcggccgacggtgaacctcgcgttgtagacgaggctgtaggcgcgcgacgcgttcatgccgatgagccagtcggccttcgcgcggatcatcgccgaatcggcgagcccctggtattccgtctcgtccttcatggacgcgagggcgtcgcggatggcgtcctcctccaggctcgcgacccacaggcgtcgcatcggcttggagactcctacatgcgtcacgatccgacggaagatggcctcgccctcacggtcggggtcgcatgcgtcgacaagcatgtcgacgtcgccgcggcgcatcagtcccgcgacgaccttgtactggcggtctgcgcccttgtcccggctgaccttccattgccagtcgggtgtcgggtcgatgggcagcgtgtcgaggctccactttccccagtcgtggttcttgtattcgtcgggcgcggccaggtcgacgaggtgtccttgcgcccaggtgaccaggtcgtcgccgacctgcacatagccgtcatgcttttccatgtgcccgccgaccgcctgggcgatggcctggccgaccgaatgcttctcggcgatgatcagtcgcatctcacatcacgtccgatcatcagtagttgccggacgcccatgcgggccgtccgtcgtccgaggtgtcgggttcggctgcgggctcctgcggggcgggctcgtcgtccgcctcctggacgtcggatccggtcgtctccggatccgtcgcggcgtcggccgccggcgcgacggtgggttcggcggagacggtttttcttccggccggcgcggcgacgagttcgcccttcgcgtcgaacgcgatgttcttctccgttccggtcatcgccagcttgtccgcgatcattgttcggctcatgccggggaacgcctcctcgaattgcctcgccgcgtcgcgcagcgcctgcgcgcttttgcggaaattgtcgaggcggttgtcgaacttcttcgccgccgtctccttgcgtttgaacgactcgcgttcgtcgcgcaggaagtcgtccacgtaatcggatgccatggtccgtttcctttccagtcttgttttcatcggttcccggttttgatccggctggaaccatggtcacgcgattggacacgcgccggtttggacagtcgggctccgccaggatcacacgcttgtgatcctggcttcgccggaaacggagcgcggccctgggccgcgcgctatcttcaccgacccttccgggatttccaggcgtcgacgcctggaatggggaacggtcggccggccatggttcatcatcacagccccgcgcccgcgtcttcggaactgcgtgttccatgctccgctccgggagggtttcgcccgattatcccgaagcgggcacggcccacgcgtcctccaccgcgcggcgggaccgcgaggctgccccatgtccggcgaaaggaaaacaggaacgccggcgggacactaaggagtggaaccatgcagatggaaccgatggaattgcagcacgtcgtcttcgagaccgacgggggacgaatcgacgcgatgtggagcgacgtgcgtctccacgagcacgacatcaccgacggatggcactgctacgccgtcaggggcggcgacggtggatggccgccatgcagcatcgagaaaacagtatgggtcaaccacgcgggcgacatcatcacgcccgacgacctcgacccgatgctcgaaaggaacgggtggatgctcgtcatcagggactggtggttcaccgacgaaccgttcgggcgcgcggaatgaaaggagacatggacatgaaggagaagaacagggccgaggaatggttccgggccaaacacgacgagctcgccgaaacggcgcaggtcaacctcgccgcgcacgacttggaaaccggacaggatgcctaccatctggacagcctccactatgcgaccgccgaacagatggaggccatatgcccgacgggcatcgacttcgaccggtacgcgactctggcgaacggcagcgtcggatacgacgaggccgacgcgcattgggacgacgcggcatggtgggacgaacaggcgcgagccatgtgggacgaggtcgacgacatccctgacgacggcctctactggacaagcgtcgaagactaaaacgtcatcgccgttcccggccaagtgacgccccggggccgatgccgcccgcgtcatgcgggcggcgcctccggcggccagaggacgactaccgtcctctggactccacgcgccgggaacggttcccggacccgacagggcgtcgccgtggcacggaggccacgtctcgccgacgggaaacggagcacggcaccaatgccgcgcgcatcccgaggattttcttttgaccggccggctgacgccttgatcatagcggcacgcggaacccgtcaacgcccgcgcagcgaaacccgtggtttcgacgcgttctcatgacggaacccgctaccaccgctagcgctttcgcttgaccatccggtcaaaagaaaaatatcctagaatggaagacaacgaaaacaaggaggcggacatgccggtcatcagcatgttcttcggaatcatcatcaccatgaacgcggacgaccatgttccgccgcacatccacgccagataccaaggccacgaagcgtccttcaccttcgatggcaacctgctcaagggagacctaccgcgcaagcagcgcaaactggtcgaggcatgggtgctgctgcatgccgaagagctggaagccgactgggagctggccttcaacctcgagcacccgttcagaatcgacccgctacgctgacaaggaggcaacggacatgaccatcgactattcaatcaaagtgacccaatgcgagcccatgcccggctacaagctcaaggtcacctgctccgacggcgcgaccggaatcttcgacatgtcccgatacgtcgaccgcggcatgttcaaaccgctcaaggacccgcagacgttcgaccgcgtgcgactcgcgttcggcgtgccctcatggcccggagacatcgacatcgccgcggaacgcgtccgctccgacatgcaaatcatctagaagcccacgcgcccctgccccgaccgtcatcaagactgccggggctttttcatgcccgtatgcatgacggacatgacgcgccaccaacgacccaccggccccgcgattttttcgcggggccttctcgtttccctgctccaagtgtccaaacccatcgccgtttccacgacggacgattggcgtaagacaccggccgtgccctcaaggccatgggcgaaaggagcaaggagtgaacgcgatcatccttcacggcattccgcaatcatgccgtgcgaaatcgctcccaatcaatgaaattgatatgggagtagcaagtgacgtgaacgtatatacgttcactcgattcgcaccgcgaatcggcttgctcgggagacccagaccccatggccgagcaagctctccagaccgcttcgcggcatcacggacgtgccgtccgcacacctccacgggaggtgcgaaatgagctgggcgaacaagcgccgacgcaccgtgcagaagctcgtcacgttcactcccgacgagtgggaacgcgtcaattcgctgcacaaaaaggtgaacaagtacacgacaagataccgttcgttcaccgtgttcgcacgcaaaatgctgaccgatggcgagatccgcgtcaccgagatcaggccgctgacagaccccgagccgctcgccagagagatcggccgcatcggcgtgaacgtcaaccagatcgcccactgggccaacgcgaacgagcacatcaccgccgagcaggtggccgagctccgcgcgtcgttcgaccgcatcgagcgtctgctcggcgacctgttcgccaacaaacgcaccgccgggaaggacgtgtgagcatggccgtggtcaagctcggcaagcccgtgaaatcgaatctcggcggccccaacggggcgatggcgtacatcatcgaccccgccaagaccgacggcggaagactggtcagctccaactacgagcggaccggaacggactacgacgcgctggctgatccaatgctcgaagacaacgagaactcacccaaaggcatccaaaagaacagccgtctggcgtaccacatcaagctgagcttcagtcccgatgaccccgtgacgcccgagcgggtgcacgaactcggtgtggagtttgcgcaccgcatcaccagtgatgaatacaagttcgtggtcgccacacacaccgaccgccaccacctgcacgaccacatcatggtgtgcgccgcctcccgatacgggaagcatctgaaggcggaactacccaaggacatcatcgaacagtggcgcgtcatcgccaacgagatcagcgagagggaggggctaagcgtcatcttcaaccccgccaccgagcgggtcgcacgcaaaatgcgcggcgacgaaaccacgccgaacgaagacccgacgacacaggcacgcgaccccaaacatgtcgaagagacttccgaaccgggcacggcggcgacggcgcgaacgacgcgacgggccgaaaacgaggagccgatggagcgtcgctacggcatgtcgatggaggagatctacgcgtccgcgaagggcctgggcgtcaaggaccagctccgcatgctgatcgacctgaccctggccggcgcggagaacttcgaggactggaggaacatgctcgacgtgcagggcgtggacgtgacggtccgaggacagcacttcacgttcaccatgaaggacaccggcttcaaggtccgagacacgaaactcggctcggcgtacgacatgacgaacatcatggccggactgcaaagcacgcccgtcatccccatcacgttcaaccgtcggctcgtcgccaaacagaccaggaagacggtcaccgtgtggctgcccggcacccaccggaagaaaaagatcacgttcgacgcgaagcgtctcgtggacgacggcggatccacgctgcgcgcgttcctgcccctccaccgcgaccagatcatcctcgacccgtccaaccggtacgccggcaagaccaccacccacggcctctaccagtggttcggcgagcccacaagccggctcgaaccactggcctcgcccgaacggctgcccctgcgctacggggtaagccccacccagcagcgctactaccaggcacaggcgcgacgcctcgaccggctcgccggcgaggcgaaggcgctgaacgcggcgatccgctggaccaggctcgcgggcggcgacagcgccaagggactcaagctgctgcgcggaaaggtccgcgaatcgcacgacgaactccaggccgccgtcatcgcgttgcatgacgcgatccaacagggagacctcgacctcgtggccgagacgcgcggcgagatggaacgtcgcgaggccctgtgcgaccggtacgagggcgagctggccgccatcgaacgggagatccacacgacccgcgaccgcgagcaaacggagaccgagcagcgcgaacagcatcagcacaagcgtggacggtccatctgaaccgtcccaggaaacaccaaccgacaacagaaaggaaaccgcaatgccaatcgaggaacaggctgaggagaagatccagaacgccgtccagaccatcatcaccggaggcgcgaagctcatgctcagaatccccaagggcgtggccatggcgctgctccgttccggcatgaagctcaccaagaccggcgtgcacgccgcgggcgaggccgtcaagaacaagatcgacagcggcgagatgtccgagaaacgattgcaaaggaagaaggacggcgacctgcacgagctgcaactcgacgactcgaccatgcgcgaggtacagcacagcctcaagaccgccggcatcgactaccacctcgaacgcaccgaccaaggccagttcatcctgcacttcgccggcaaggacgaagaccatgtccgccacgcagtgcaacgcgcgttcaaaggcatgggcctggacgtcaccgacgacgacttcaccgtcgagcagacggaacagacccgaaacgagccagaacccccggcgcgggagaccccggccgaaccagccatgaagcccatgccgacgcagcgcatcgcctgggacttcgtggacccggaggtcatggagatggccgcgaacagcctcgccgcccggcatcccgaactctcatgggacgagctcatgggcgacacaacatgcgacgagcaggccggccgcgacttcgcggaccggatcatcggcaaggccgccgccgacccgagcctgcgcgacgagctcgacaccatcctgcgcgacgactacgggcagggcgcgcaaacccaggagcagacacgcaggcagacgatcgagccgaaccgggagaagccggcaccggagccggaaagcgaaccggaacccgcgccggacgaagcccggacaccggccacgcgacagcagacgcaggccagggcagacaatcccaggccggccggcaaggagcggaaaccgaagccgatccggtcgaaaaaggcactgctcgaacggttcaagacccggctcaacgagaacctcgccgaacaaaagaaccacatgccacccacccagaacagggaccgcacgccccgcaagggccgctgaaaggaaaccataatgaaccagcaggaacaggcgacgcaacacgccgcgatcttccaggacaccatcaacggaaccaacgacccgaccccatggccggtgaccatgtgggcctcgtccggcgacacgatatggacggccggcactgcaaggacggccggcgaggactcggtgggcatgatctacgatcccggcgacaccatcgtgcaccggaacacaatcgccggcgacgtgacccgcgccaccgaatccttcgccatcagaccggcggacgggcagagcccgatggacgcgatgctcgcgggcatcgaacaatggaaccaccgccatcccgaccggtgggacaccgtggccacgccgggccagtaccgcatgacggatccgacgacgggccggcagctccctatgggatggagcgccagcctcgccgccgccgcgtccgcggcgggacggctcgaccccgacctgctccaggccagcctcatgcagaacgcggtcgagcacgagccgcgcccctgcgtgttcttcctggaggataacgggtacgacctcatggtcttctcctggcatcggaaccagcagggactgttcgacgcgatgagcttcaaacacctgcaatacgacgacctgagcatgcaggtcaccaccatcagccacagcgaggacatgagcgagtccttccccgccaagaccatgagcgacggcgaactgctcacacaaagccgcgtctaccgggacgaataccagcactggcgcgaacaggacggcggacccgtcgcccagggcatgaccggccgcgtcatgcgcagcggactgctcaaaccgggactggagcagaagccgctgctgaatctgaacgacggtcgacgcgccccggactgggacgagttcaccgaccaggccgccatatccatcctccagggccaacccatctcgccgacgcccgcgctcccccagcaggagcagccggagcgggacaccgaccccacagccgtgacacagacgccggcccggacggccgcggcgacgaagcaggtctggccgaacgcgtgggtggcgaacaggctcgcgcacacctatatattgcatgcgaaggacggacgcgactggccgaagatgatcgtcggactcccccgcggcaccgccatcgatggcaaggacctgaccggctgggcgaccgacatgttcatgagcgcgaagaaccagaggcagaagaacgagggacgggccgtcaacatcaggttcagacccggcaccccggtcgagctgttcaccggccgcggagcggaacgccgcaccatgcaggtcgacccgcagacgctcgtccaggcggtcatcgacgcgcagaaacgcaaccgcgacgccgagaagacgctcgacacggcatcggtggagctcgcctcgaagaccgtggaggaatcctggccgcagatcgaacgcatgcagggccggttcacggaataccagcgtgccggcacgtacaagccgtccgtcgcaatgaaatgggcgcgcagactcgtcgaccggaccgccggagaggacgagggacggtggaccaaccgccaacgccgccaggccgccagactgctcatccaggaactcaccggcacgcaggatccgacgcaggccaggagcaaaacaacggatcgtccgaccgtcgaacagtacgtgccggaaggcggcaaaacgcccgacgccataggcgatgagacacccgcgccgccacggaaaacagagacggacatggcgacgaaacagcggcaagaccccatcgttcccgcctcgcaatccccggccgccggtccggaacgacggcacacggacctgaagtcaacgctcgaccggttccgcaccaggctcaagaagaacctcgacggactcaacgcagacccgcccaccgccggcaccgatcgtaaccgcgggcagcggaaaaccttataagaaaggagagaaccatggtgagaaaacgcctatacgcgaagcagaccgcctcggtcgaatacgagcagatcgacctgttcagccttctcgaggaggagcagcgacaggtcgacaggacggcggaacaggtgcgcggatacgagataacggtgggccacgccgcggtgcaacgactccgcgcacgcggcgcggacgacgagacgacagccgccgtggcggccgaataccgggagaaccggctccgtggactcggccgacgggacgcgcggatcgccgccgagaacaagctcggcgtcggtgccgccacgcccggcgaaaccacgccgcaacctgtggtaaaacgtttcacacaatcctccggcacggaaaacaacactgaagaaaggaacaatgatggacgagatgacatggaccgacccgcagctcaaggcgcgctacgagaggaacctcaaggcgatggaacagcgccgggcggcgcatccggaactgttcaacaagtgggcgctgccgtacaaggtgttcacccgcagcagcctgcacgggatccagaacatgcgcatcaactggctgatggacaaccatccgcagcggttcagggagatgatgatggccaacgtgctcgaggagcatctgcgggacatcgagaggcggacgagggaacgccaggcgcagatcatggaccagctgatggagtccaggcacctgctcaaccggacggactgcctgaaggcggcaccccagatgaccgacctggaccggctcaacgggatgaacgaggcgcaagcggagtcgatgagcatggcgatccacgagatcgtggaaagcttctagcatccctcgactcgcaacgcgcgcgttcgccccgcgaacgcgccgaagcgaacatcgccgccattcggacactcaagacgctcgatgggaacggcgacgagcctctctccgcggagcagacggacacgctgcgcggatactcgggatggggcggatgcgcggacgcattctccgacaagcccgaatgggccgacctgaacgccgagatccgcgaactgctcgacgacgatgagtacacgcaggcgcgcgcctccacactgaccgcctactacacgcccggaccagtggtcaaggccatgtgggacgcgctcgacatcgggtccgcgcccatccaggtgctggaacccgggtgcggcaccggcaatttcatggccggcatccccgaaaacatcaaagcgaacgtgtcgggcgtggaactcgatccgatcagcgcgcgcatcgcggccgcactgaacccggacgccacgatcctcaacgcggacctcgcggactgcaccatccatccgggattcgacctgaccatcggcaacgtgccctattcgggcgacatcagcctcgactaccggaccacggacggcggcacatcccgcctccccctgcacgactacttcatcgaacgctcggtggacgcgctgcggcccggcggcgtcgccatgctgctgaccagcagatacacgctcgacaaacgctccgagaccatgcgcgccgacctcgcgagaaaggccgagctcgtcggcgcagtgcgcctgccgtcctcgacgttcgcccgccaggccggcaccgaggccgtcaccgacgtgctcgttctgcgcagacgcgaacggacgctcgaccgcacgcccgacgaggcgtggatccactccaatccggtcgccgtgcccggataccaggacgtgaccgtcaacgtcaaccaggcggtcgccaacgacatgaccgcgcacgcggtaggcgacatcagaccggtgatcggacggttcggcggcgacttcgacgtcgtcttccagggcgacgcggaacaggtcggcgaacgactccaagaactgctctccacacagatcacccacggcccggcgctgtcgctgggcgaggcggaaccggccggacgggcggagatcacggtccggccggaccatgtggcaccgttcgaatactccgtcgaccagcgcggagtggtctggtacggcgacggcaccaccgtcaccgagatagcccacggccagggcgacgaggcgcgacgcctgcgcggcatgatccgcctgcgagacctggcgcgcgagctccaacggctcgaactcgaccccgcccgcgtagacgacccggacgtggaagccaagcgcgccgaactcgaccgggcatacgaccggttcacgagcgagttcggacgactgtgcgaccgcgccaaccaacgcgcctacagcggcgaggaatccggctgccatctcgtcatggcgttggaggagaccgacgaaaagggaaggttcgccggcaaggcgaaatgcctctcgcaacggaccatcagcccggtgccgcccatgcccgaccatgccgacagcctggacgacgcgctggacatcagtctcgaccgcgccggcggggtcgacctggaactcatcgcgcgcctggccgacaccaccgtcgaggaggccgagaccggtctgggcgaccgcatcatccgtgacccggacaccggcgaggtcatgcccgccgaggactacctcgccggagacgtggggacgaagctcgaccacgtcacggccatggccgaacacctcagacgccgggcggcacgcgaggccatgacggagttcgcggcatccacctacgcgacatcggaggacatgcccgccatagagcaggcacgcgaatggatcgacaccgcgggaacggacgtgtggcgcagcctcacggacccgtacgccgccgaatcctacagggatccgacgccggtcatcgaacgcatcaacgacggacggcacggatggaccatgggctggaaccgcaacccggaactcgtcctcgccctcgtctggcgggcggtggaggaactgcccgagcgccactcacgcgtcaccctcgaacgatccgacaccggagagcggaagccgtggcacgcgccggcatggcaccgatcgcacggcaccagcccactgtgggacgcattgtgctggacatggcgcgacggcgacgcgccacagcactacgcgccgatcctcgccgaccggcgcatgcccgtcagggacctcgccctgttcgtccacaagatcgcccacaccgaccggctcgaaaccgccgacaagaccgcgatcctctccaacctgttcgagagctattcggcccacgacaagcatggcagcacgatatggacggacacgaccatcggcgcgatggtacgccgtctcatgcccggcaccgacgaccccacgcggctcgccgaacggctcgccaccgacatgtcggtcagcgaatggatctggggcatcgcccgcgacctgcccgaccttcgccagggagcggcacacgacgcctacggcgcgccgccacgtgccatcgacgcgcgccccgacgactaccaggcgttccgcgcacgccgcgaggaacagctcggacaatggcgggagcagccggagcacgccgaggccgcgcgcgccgaccagacggacgcggaacggctcgaacacgtggccgatctgctggaacgcgtacagcccaccccgctggagaccgagcagatcaaggcgccgctgggggccccgtggatccccgccagggacgtccacgacttcatgatggagacgttcaacgtgcgcggccacgggctcacgcccggcaagctctcccagtactcggtcgactggatcccccagctcggacaatggcgcgtcggctactcgggcggcggcgacatcgactacaaggcagcaaggacgtacggcaccgaggaccgcaacccgttccaactgctggaggcgtgcctggacaacgcgcagatcaccgtcaccaaggactctcccacggagaccacggcgtccggcaagcccaaacgggtcaaggaccagaaggccacgatggccgccatcgagaaggccaacgcgatccgcgacgcgtggaaccaatgggtgttcaaggaccccgaccgcgcgcaaaggctcaccgccctgtacaaccgcagattcaacggcatgcggccccgccacgtcgacggatcctacctgaccacgcccggcatcacccacggcgtcgccctgcgtccgcatcagaaggacgcggtggcccgcgccctgcgcagcgacgagggcaccctcatcgcgcacgtcgtcggagccggcaagacgttcgagggcgtcacactctcccacgaggcgaaacgtctcggcaaggcgtccaagccgatgctcgtggtccccaaccacctcgtggaccagtgggccggcgacgtgctcaggctctatccggccagccgaatcctcgtcatggacaaggacgcgcaacgcaaccccgaatcggtgagacgcttctggggccgggtcgccaacggcgactgggatgcggtgatcgtgccggagagccggttcagccagctgcacgtcagcaaggaacgacggctgaggaacatgcgcgcccgcgtcgacgagttcgcccaggccgtcgaggccgccgccaaggccaggggcgacaaggaccccaccgtcaaacggctggaggcggcgcgcaaaagcgccgagaccgccatgcagcgcctgcgagacggcaaggagtcgcgcgacgacaaggcactggcgggcatcaagttcgaatcgcttggcgtggacatgctcatcgtcgacgaggcccaccacttcaagaacctcggcgtgcccgtcgcctccgccgacctgggcatgcaactgtcgtccgccgcgaaatgcgaggacctgctcgacaaatgcgaatggctgcgcgaggccgggcacggaggcaacatcgcgttcatgaccggcacgccggtctccaactccatgagcgagctgtacaacatgcagcgctacctcgcgcccggaaccctcaaggcccagggcctcgacacgttcgccgcatgggctggcgcctacggccaggtagtacccaccgtggaactgaagcccgaaggcaacggattccaggtcaagcaaaggttcgcgcgcttccagaacctgcccgaactgatgaacgcggtgaagcagttcaccgacatgatcaccaacgacgacatccagctgccgctgcccgaactggagcaggtgcccgtccccgtgcccatcaccgaccgccagaagaaggagatggaggaactgtccgacagggccgacctcgtgcgcgacggcgacgtgccgccggaggtcgacaacctcctgcggatcactggcgacgggcgaaagatcgccctcgaccccaagctcctcaaaggccacgagaacgaccgccccctggagaacggcaagatccaggcatgcgccgagaacgtcgcccggatctggcaggaggagacgccacgcctgggcacgcagctcatcttctgcgactcgagcacgcccgcgtcgggcggatggaacgcctaccaggacctcaaggaccgcctcatccaattgggcgtgcccgccgagcagatagcgttcgtgcacgacgccggcgacaaccccgccagacgcgagcaactgttcgccaaagtcagatccggcgagatccgcgtgctgatgggaagcacccagaagctcggcaccggcaccaacgtgcaggaacgcctcgccgcgatccacgacctcgactgcccatggaggcccgccgacctggaacagcgcctcggccgaatccaacgccagggcaacacgtacgaccacgtgcgcgactaccggtacgtgaccgagggcacgttcgacgcgtacagctaccagaccgtggaacgcaagcagcgcttcatcagccagctcatgagctcgaagagccccgcccgcgaggccgcggacctcgacgccgacgtggtgaccctcgccaacatcaaggcgctggccaccggcgaccccgacatccaacgccgcatgacattggagaacgagatcaaccagctgaagctcctgcgcgcctcatgggcgcagcagaaggccgacacccgcagggacatcaaccagcagctccagccacgcatcgaggggatccgccaggcgatccgcgagaagaccgacgacaagccgctcgcgtccaaggccctgaacatccaccagaccgcacgcatgaacggcaagtgggagggcatgaccatcaacggccggccggtcggcgaccggcagaccgcatgcaggctcctccaccaggccgcccaccaggcgcacgacggggacacgatcgccgaatacgacggactgcccgtcatcgcacgcagggcggccaccactggacggatcaccctggccgtcaaggccgtccacgagcacgaatccggtaccgagatgcccggaccctacctgaccggaccttccagcatcgtcagccagctcgaccggatcgtcaagaacatggccaccgaccccggcaagctcacggaacggctggcggacgccgaaagggaactcgccgccgcgcaggagacgctggccgaaccattcgcccacgaggacgagtaccggcaaaaacaggcagaactcgaacggctgacgtccaaacccgacgaaccccgggagacggaaagtagagaccaggaaaccaaggaaaggagcgcaggaatgccattgacaacggaaaacgccagacgactgctcgaacaggaccacgacgtcaccgaagtcacccagggcggcaacgccatgggccactacctcgaagcgaggctcacggacggacgcgccgtgcagatcgacttccacgacaaccccgcatggaaagacacggaccgtctggccggccggatcgaggtgtcctacgccaaccggccacaggcggaatggcaatacgacgacaacgacatggccgaccgcgaacacaccgtcatcgacccggccgacccagccgccgggaaaacactcgccaaggcggtggagggctgggaacgcgcgggcggcctacacacggcccgcgcagccgggacgagccatctggccgcgaaccagccgccggaggaatacgcctaccggtggcggaagcccggggaccccgacaggcacatcgcatacctgagcaccgccttcgaccgcgaccaggcgatgaaggcgagggagaacgccggatacgtcgtgacgaaggtcgatgaggatccggccgtgctctacgagcagcaccgcaaggcgtcctgcatgcgcgcgagccacatcctggaacgatacgaatcccccgaccaggacgcagtcagaatcctccacggcatcgtgggcgaggtcaacgcgcacgaccccgagaacgacatcgccacctacctcgcctacccatccgacaaggtggtccagatcgccggagacggcctcacctccgcggacatcgcggagaaacgcgagatgggcggatgggacccgcgaaaggacccgctcatgcgcatcaacgcgcagggcgactggacgggcatcacccaacaacaggccgaccagatcgtctgggacaaccgcgatgagatcctcacccgcgcgtcatacgacagtgaactgtccacgtggacgctccaccagcttgaccagttgaaggagccccagccggcccaaagcctggaccgtgaccggccggaaccggatcacaaggcgcccgcacaggccgattccacgacgaagcgtcacgggccaagactgtagtcctctccagccacggggtggcgcgctttccgcgccaccccgcattcattccatacgaaggagcagaagacacgcatgacaacagaaacaaacgaccagccggaacccatcatctggttcgagggcacactcatcagcagcccacggcaaaacagaagcgcggaagactggctgcttgaaaccatggccatgggaacagccacgaggaaaatcaccatccacgccagcggcagggagcattcggagaacatccgcgaccacgcgcgcaagggatcccgcctcatggtcaaaggcaccgcgggcgacgaaggatcaggcatcgacatcgaagccacaagcctcgcgttcgatcccagccatgacgaaccggacgggaatcgatgacacggaccaccaccgtcagcggcatcagaccggacaaggccggcgacggcgaatggatcgacatcaacggccacgtcggccgactcatgtccacgctcatggcagacggccggccattcagcatcgacgtcacgccgggcggcatgaccaccgtcacgcccctcccacccccgaaggacgcggaagcggccggcggcgacgcccaggccgaaacggagccggccgacgggaggatcaccagcaggaagacgctgtacgaccggttccgcgccaggctcaaggagaacctcgccgaaagaaaacaatagaaaggaacaatcatggaacaagcaagaggaatcatcgtcaagacactgaccatcctcgcgggattctggatcgccgacctcgcggccgcccgcgtccaggccggcctcgccgccggcgaaagcatcgaacggatcatggacggcatgacgaccatgctccagcatccgctcgccctgggattcgaccggaccagcctcctatgcggactgggcggcgcgtgcgccgtcggcctgttccacctctaccggtggagcatgaaacgcaactggcgcgacggcgaggaatacggctccgcacgctggtccaccagccgggagatggccccatacaccgacaacgacacccgtcagaacctccagatgacggccaccgagggcctgagcctcgacgccccggccacgcgccgcaacctcaacaccgccgtgatcggcggatccggatccggcaagaccgccacccacgtcatccccaacatcctcaagggcagcatgaactacgcctgcaccgacccgaagggcgagctctacgcgaagaccggcggagacttggagaagatgggctatacggtcaaacagctcgacctggtggacctgaccagcgagacgaaattcaaccccatgcgctacatcgaccccacgaaacccgacgtggcgatcatgcgcctggtcaccaacatcatggacaacaccaacggctccacacccaaggagcaccagaccgacgacttctggaccaaatccgaacgcagcctgctgaccgcgctcaccgcgttcgtctactacctgcccgacgacatcctcaaggactgcctgcacatcgacgccggccagaccctcaacgcggtcgccgacatgcgcgacctgctcgaagccagcgaacaggacgagaccaaggaaagccaggtcgacgccgtcgcccggaccgccactgaaatatacgaggagacccgcgccgaatgggaacgcgaggacgcggaccacgacgacccggacctgcgcgaggcatggcgtctcgcccagggcctgaagttcgcggcccgccagtaccggcccttcacccagggcgcgggagagaccaagaagggcatcatcatcagcctcggcgtgcgtctcgccccattgacagtcggcccggtccgggagatcctctccgacgacaacctcggtatcgaccggatcggcggatacgcggacgagcacaagggcggatacaggcatcccaacgggaagacggccatcttcctcgccctgcccgacgaggacccgacattcaactttttggccgcgatcttctaccaatgcctgttcgacagcatcatccgccgctgccgcacctaccccggcgaatgcctcgccacgccattgcactgcttcctcgatgagttcgccaacgtgggacgcatccccaacttcgacaagctcatcgccacgatccgctcgcgcaaggtcagcgtcagtatcatcctccagaccatcgcccagctcaagacgatgtacaaggactcgtgggagaccatcgtaggcaactgtgactcggtgctgttcctcggcggcaacgagcagtccaccactgaatggctcagcaagctgctcggcaaggagaccatcgacatctgtaccaccagcgactcgaagggcgtgtccggcagccataccaccaactaccagcgcaccggacgagaactcctcacacccgacgagctcgcgcaattggacaacgacaaatgcatctacaacctgcgaggactgcacccgttcctcagccgcaaggcatggcccggaaccaccatcgccagaccgaaatccacgctcaggcactccaaagaatggaaggcagcggcatgaagccaatcacaaccccggatcgctgccgggcaagccggtgcccccgtctgatggcgtgggcacggaccatcccggcgaggctccgcccgtattggtggaggacgacgagcctcccgaagacgggcgtcgtccggatccggaaccggaaccggaacttccttgggaatatgagggcgtttgccgctgtggagctgattgggattgcgatgcctgggcctgctgctgcgcggcggcagccgcggctgcttcctgttctgccttggccttcgcctccgcgtcggccttttccttcgccgtcttcgattcgttgacctctttcacggctttcgcgatcgcgtccacgtcacgggtcttgaccaccttcagcagggtctcccgggtcttgtcgtccgccaccttgccgtcggtctgcttgtacagcgcgttcgcgtcgtccacggtcttgtcgagtttgctgtcggtgacggccttggccgcggtcttgaggtcggtgagacggttcttgagctctttggtcgttctgcgcagcgccgcagtggtcctgtccacgtcggatgtgacggcgtcgggcgcgcaggaacccttgatggtggacgtctttgcgtccaggagccgattcaacgcatcaagcgtcttgggatccgcgacttggccgcgactggtgtccttcaatagtctggaggctttggccgtggtcctgtccaggtcggactggatggtcttgcgtgtcgcttcggccgagtcgcatgcgctgattgcggtctcatgcgcctcttgccgcatggcggcggcacggcggtttttgatttgcagtcccatccaggacacggcgatgaggctcgcggtcatgacgatcgcgacgagcgctttcccgaccgggaagacgcggcgcaccttcagatcgtcggggtcggccgagtaggtgacggccgaccccgacgattctgcttccggtattggagggatgtccgccgtatccgattccaagtcggcgattcgttcgagtgcggcaaaatcgtcgtcggcgtccttcagggccttctccgcggaatcgtcgggaggagactgctccgccggcgcagacacgggttcctgccccggctcgtcttccggcggcagcggcgcggatggtatggcgacgcgacggcggccgcgcatggacgcgggcggcagcggcgcggcaccggccgtgtcaaagccttgctcctgcgcggtatgccaccattcggcgagctccggccacgcgtgtggatgttcggcgattaggcgcatccatggacgccaaccgggctcgttggccatggcgtacagctggtcgaccgtaagcttggggctgagaatcggctcacccgtcttcctgtcgatcctggtcattcctctccgccctcgtctttgatgaggactggctgatcctgttcgtttgccttcatcacttttgttcctctggtttgccttcatgcacccggtatccgtcttccaatgggcccttgaccgccgcgcatcgccagccgtcgtcagtgagcgtgtagtcaagcacccaggatgcctccagcccggtggatacggcgcatgtcgccacccgccgccccgtggacacggggaagccggtgaactcggtctcgggcaatggctgcggggctatggatgatgccggtatgtcgaggccggcggcatccggcgtgaagtattcgccttcgagttggcctcgttcgccgcccatgtagacgccgagcgctttcggcgcgaggtcggcgcacggatcatcctccgtcggcgtcgccggctcggtctcttcgtctccagccgttttttgtccgggttcggttttcgttcgcggccgggcgacggtgctttgcgtgtcctccgcggttccgttgccggcgcatatcaccgcgacgtttcctcccaggatgaggagcgcgaccgcaaatcccgtcgcggcgatgatcctgttcctctttggttccatgcttggttttcctttcagtggatgtagcggacgccatttccggctgcggccagttgggaggcgctgatttcgcgtgtggatacgacgccgaggccaagcgcgttggactcgctgatcaggatcgacccgtccccgcggacctcctcgaccatggcgacatgcccgtagtcggcggacgcgcccaatactcccggttggaacacgatgacgctgccggcggatggggagccgtccaccgtgtagccggccgacgccgcggaacctgcccatgtggcggcgttgccccaccctggtatcggttttcctatgtcggctcttctggtcgcggcccaccaggtgcactgcccccatgggtatctcgtgtccggcgtgatgccggccgtggacacgatgccgccggagaccgtcagtttcggttcgagggagccgaccgtgccaccctcggcggtccccgttgcggtgtatttggtcgctgcgagttccttgatccgccgcacatagttgatggtttcctcgaagggcggcaccatgccgtatctgagcacgctgccgaggccggcgttgtacgccgcgagggtcagctccaacgtgtcgccggtcagtttcccggacttcttggccgtctcgacctgcgaggcgagattgcacatgtagttgccctggctccagatcgcgtcgtgcgggttccagatgtcggccttgccgtctccgtcgccgtccttgcccgcggacgcccaggtggacggcatgaactgtgcgatgccctgcgctccggcggagctgccggccttcggattccaattggactcctggtcgatctgggcggcgatgatgctcggcgtgacgacctggcagatggatccggcgcggatcacgtcggcctcgtattccgcgggaacgcccgagaccgtggattcgctggcgttggatccgaggaacgcgcccatgacggccaggagcacgccgagcaccgcgagcatggccgcgatgacgggcaggatgggaaggctgatggaggcggctcccgcgatgacgcgggacgcggccatgcgcacgaagttcgcggcgacgcgggcggcacgcacggcggcctgtccggtggcttgaacgtcgcgcgccgccttgacgggcgcgcggcggtgccgccagatgaatttggccgacgagttgacacctttcacgccagcgcgtgccgctttgaaggtcaggtcgcgtgtggcgcttcccagcttggacgcgaaatcgtcgtcagccacggtgagcctcgcgccggcttcgtccatccagcccatgccggtggatcccatccgtttgacgctacggccggcgttcccaaggcccgcgcctatgtgcttgccgatccgcttgctcgctttgcctttcgcggcgaacttgccgatcttctcgctgggcttcgcctcggacagcgccttgggtttgccggccgtcttgcgcattcccttgcccgaccgcagggcgcgtttgccacggttcatgatgcgccgcgccttgccggccgtccagcccacgccgtgcatggtggaggacatgccgtacatgccggcgcgtcccgccatctcggcggcggtgtggcccatggaatcggcgatgtcggcccggtccgagccgaattgcgcggcgctggacaccacgccggtggccgcgcgtccgatgcgggcgcgtgtgcctccggcgtggtgggcttgggttccgctcatgcgtttactttccttcctggaaggtcgtggagtacagccggtagaggtcgccgcccgcggggatgcgcccgtcgaacggcacgtaggcgctgccgatcttcatgagtccctggccgggcagcacgccggtgaagtactggcgctgctcctcgctcagggtcagcagctcgcacaacgcgtccgcgtcggtgctgttctggctcaggagcatgaggaaatcgctgttggacagcatctctcgcgcgtcctggaggtcgaggatctcctcgacgttctgcgtgatgccggtcacgccgagcccgtatttgcgggcgcgcttgtagatgtccttgaactgggcggcggcgtactggttggagaagaagcggtggaactcgtcgacgtacagccaggtgcgccgcccgttggccttgttgcggatgacgcggttccacacctggtcgatgacgaccatcatgccgaacgtgcgcagctcgccggacaggccggacacgtcgaacacggtgaaccggttggacaggtccacgttggtctggccgttgaagccgctcatggagccggtgatgtacgggttgagcgcgtcggcgaggtaccggctcacctggtcgccgcccgcctgcaattcgtcgtgcaggtcctgcaatgtgggctggaccactcccccgccctggttgcggtaacgcgtgtacaggttgctgacgcactggtcgacgagtcccttctggagcgggtcgaggccgtcgatgccgccgatgagcgcgccgatcatggagaccacgttgttggtcttgtccttgacggggtcggaggccgaatcgtcctccaggacgatgtccatcgggttgacacgcgtgccggtgccggcgctgatctggatgatctgtccgccgaacgcggccgcgagggcgaggtattcgcgttccgggtcgatgacgatcacctcgtcgtcacggttgaggaacatgccggcgatctcctgtttgacggtgaaggatttgccgccgccggacgtgccgagcacgaatccgttggagttcatgtggctgcgccggtccgcgaggatcgggttgccgctccgggcgttcgacccgtagaacaggccgtgcggctcgaacacctcctgcgtggtgaacgggatgaggatggccgcgctgttcgtggtcagggtccgcttcatgggcagggggttgttgcccagcggcagctcggccgtcagtccctccatctgcatgaacttgaggctctcggccgtgcaggactgcgcgttgaccttggccttcacgttcctgcacgcgacctccagctcctcctggcttgccgcggacacgccgatcacgatgatcgagtccacgagcctctggttggtggagcgcagctcgtcgcgcagctggccaagctgttcctgctggtcggcgaggtcgtcgggaaggtcgtcggggtcgaggccctgcttgcggttcttgcgccgctggtccatgatctgcatcttgacctcggcgttcttgcggcgcacgagcgtcatgctttcgccgcggtccatgggcgccaggtggatgctcacgtcgacgcgggcgcgcaggccggtcaggtcgttgaccagctggtcggacagttccggcggcagactggacacccacatggtgcggtgcaggtatttcgagtccagggattcgatgtccagctggatgggatttcgcgcgtcgatgctccacgggcacacgaggtccttggtgtcgggcttgccgggctgatgctcgaaccggcgttcgtcgaaccggaactcctcgccgggccggagcacctcggccatgaggcgcagccggtgctcgcggtcgagtcgggtggccttgcatgcgtcgatggagcgcatctggctgacgaggttgttgcacaacgcgttgagggtcgcgacggcggcctgctcgtcgctttcgcggacggtgacggtcagggtcttgacggtgctggtgttgcggctgacggattcgagtttgccttgggcgaggcggttgtagtcgagccggtagtggtcgaggctgtcgccggtctcgcccatcatcacgtcggcgaggatctcgcgtacgccgcgtgagcgcgtgtaggaggcgatctgcacgttttgcccggcctcgaagctgttgatgagcttggcccaccggtcgatgatctccatctgatgggattccgggctcagctggtagttgatgtcctggaagaggatggtggcgctccaccgtccgtcgcccaggctggcgatcccgttgcgcagcatcgcgtcgtagccgatgagctgcttgacgcccttcggcagacgcgtcgccttctttctccgcgccttcgccctggcttcggcatcgtcttcgtccggcgcgacctggggtttcttctttccgaacattcctcacctttccttgatcgttggtttcgcgccggtgcggtatggtctgcccggaccgtcgagcagatagacctcgcgctgcgtgtagtggcgcaggatgtatttcaggtatttctcgggcatgaggccctttggcctcacccatccccatatggccacgggcaggccgggcgggaagatcaggtacatggcgaggttggggtccatgcccagcccgagccacagtccgacgtatcctcccccgcacacgatggcgaggatgacggcggcgaggcactgcctccagctcatccccatgaacaccttcgactcgatggtggtcagttccctgtagacgggcatctgcaacgccatgatgtttgcttcctttcgtggattgcgttgtgtttcattcgccgccgaagagcttcttggcgacggagttggccgccatgacgatgccgatgagcatgacgctcgccaggagcaggccggtaaagttgtccatcacccagccggagaggctgtcgccgtccttgaacttgctcgggttgagcgtgccgcccacgagcgtgcggtacatgaggatcgccagatacagggtcgcgcattggaacaccagagacgcgtactgtttgaagtagttgatgccccactggcgggtctcctcctgggcgatgaaagcgatcggcagcgggttgaacgcggtgagcatgtatatctgcacgaagcgcaggaggatgacgacggtgacgacgatggtcgcgcccttggagacgaggaacgggatgagcagcaggatcaggcacggtatctggcccatccagccggcggagtctatggcgtcgcgcatgctgtcgccaaggccgaggcccgacgacgcgccggtggtgggtgccgccgaatggatgccgccgagcacgctgtcgccgatctcgtcgatggcctggagcatgagctcgctgtgctgggccgcggtgaacacgagcgtgagcttgaacatcgccatggcgacgagcttgacgcccagctctcggtcgccgtccgcccgggtgctgaccctggcgagttccaggacgcacatgatcgccagtatcgtgctggctatgggtttgaccgccgagcgggcgacggtcaggctcagctggtacatgcccgcgttgtattcggcgggggtcttcagcaggtcggccacgaggtcgtcgccgacgccggaccctatcgagttgaggataccgacgatgaaatcgaccatgcgtggcctcccgtctacagggcgatgttggagaacagggccgcggccgcgatgatcaggccgccgccgacgacctgccagacgcccgactgggtggcggggccgttctggtccttcagtcctccggccagggtgatgacgccccacacggcccacaggccgccgccgatgatggcgaactggctgaagagctgcaacgcgctggtgacgacgctgccgctgtctgccgcgatggtgattccgtacatgatgttttcctttcgatgttttggatgacatgaccacggtatggccgtcgagaaggctccggtttggacgttcccgacgaacccgaagaggctcggacgatggtatggaaaagggcccgccgaccgttcgccggtggggccgggtcccgccgccgcgcgccgggtttcgagtgccatggttcccgtccggcgttccgcgggccgcggaacatggaaacggacggcatcatgcgaaaggaagacggaccgatccgccacaaggagattttcaaggagtcggacggtccggtgcgcaagggaaaggggtggccggccggatccgacctcattggatccggcctgccaccccgttctggtttccatggtgcgcgggaaggggttcccgcggcgtgcccccgccgggagtcgaacccggcgccgtcacaaaggagaaaacaaagacggtaccggtgggggcttgggcgcgtccgggaaggaaaggatctgggcgcgcccgtgggccgtgcggcggatcatggggaacggtccgccgcacgggcccggggtcaggttcgtcggatcactcctccgagccctcggtgtcggccggggccttcgccttgcggcggcgggagacggccatgagggccgcacctccgccgagcacgacgaccgcggccagcgcgatcagcgcgatgcccgcgccagtctgggcgagggtcctgcggtagccgttccagtcgtcggtggcggactccaccttggtgtccgagcagtagtccttgccgtcgatggtcacgacgtcatcggacttgttctcggtctcggcctcgggcttggagccggactcgtcgtccgaggtgccgtcaccgaacggggccgacgtgtcgaccggacattcggtcaacggggtgccggtgaccttggctcggtcggtgtgggtcttggtgacgcccttgagcgtgccggtgacctcgacgctttcgccgggcttgagcaccttggtgtcccagtcggccgggtacttgaggtccacgacctcgccgtcgccgacgatggtggagtcctcgagcttgatgtccttggtgcggaacaccgcgccctgcttcgtgtcgggatcggtcttgctcgtgttcgtgatggtgaacacgatctccgtgtcgccggagacggtcaaagcgtccttcgaattgtcgcggtcgccgttcggccagccggacttgcgatcccacttctggacgtcgatgctcggggtcatgtccggggtgcgggtccacacgacgttggattcgaggtccttgccgttgtagtgctccgtgaactgattctcgtggcggtcggtcacggcgaggcgcttgcactggatgtaggcgcgccagccggcctcatgggagtcgtcggacacaacggccctgtagcggtcggtcgcttcgatggtgacgacattgcggccgtcgacggtggccgcggagagggtgaagaggtcgccgccgagcttcgagctgtcgaaaccggagccggcgatcctgtcgcccttggacgcgagggcctcgccgcctgaaagcaggtcgcgggtcgcgtacacggcccactggccggtgtattcgtcgaaggccggatcgagggagtcgacgatgtcccacttgtcgacctgcgggtaggcgcggttggccggcaggatggagctgtcgagctggtagaggaagctgcggcccttgtagatgctcttgccgttggcggatgcgccgccgaccttcacggtcacgtccttggccgggttgatgggcttcagggggttcgtgacctcgttggtgtccttgcggatcttgttgagcacctgcgtggccttgttcttcacggtgtagccgtcggtgaccttgatgacggtcatcggcatggtcacggtgtacgtgtggccgaggagcgtctggtcgatggcgggccgggtgagcgggtcatgctcgtcggactcgctgtaggccttgaggtcttccggctgtgggtcgcccttgacggtctcgcccgtcgcggggatctcggtgtccaccagcttggcgtaggcgtagagcacgccgtccttgtcctggatgttgaacttgtcggtgacgtccttgccggtctcgtcggtgatctccacgttggtggcgtcgagtttcaggtactcgtcgtcgtagtcgtcggtcatgccgagcctccagaccttgtaggcctggttgtcctgcctggcgtcgagggtgacgcggtagtagatctcgtctcccagcagggcggtcttgccgtcgatgctgatcgtcgggtccttctgcgtgtccttcttgacggggtcgagcttcggcgggatgttgaacacctcgttgctcggggtcagcgagttgttgagggtcagcacccacttgttgccgaccttgtggtcggtgggggcgtcgtcggcgacggttccctcgaagcggacctggaggcgggggctggtgccggcgcgccactggctgatcgtctcctggtcggtgacggtcagggtgaacatgtgcttggaatcatcccacgtggtcgtgtacttcttcttggacaccggcttgccggtgttcaggtccatcatctccagggtctgcttgtccggtttcagataggcgtcgtaggagtcggtgaagctcacggacttgacctcgtaggcgaggtcggccggcagttgcggctgggtgttgagctggtattcgaccttctggccgggctggacgactttgccgtccacgctctcctggtcgccgccctggctcgcctcggacacgacgtccttcttgaccggcgggatgtagccgcagatctgcggttcgttggtcggctcggtgtggttgttcacggtctcggagccgccgttggtcaggttcttgccgttcggggcggtgcagaaggtgagttcgtcgcccgcctgcttgccgaagtccttgcggacctgggccgcgcccttgccgtccgcgaagttgatcctgccggggatgaggagcgtgacctgcttcgggttcttcagtttcttcaatcccttgaggtaggaggccttggcggtggcggtggccttggtgccctggacggtgatgtcgaactggtcggtcacgtccttgccggtgttgacgatgtcgctcacgctgctttcgcggtcggtgccggccgtggcctcgtacacgcggatgttcttggtgtcggcgtcgaaaatgtagtcggcggcagtccagtcatcggtgagggtgaactgtttcggcgcctggatcaggttcctgccgacggtgccgttgacgacgctgccgaccttgtcgccgtcgaggtaggtgtgggagtcgccgccggtcttgttggtctcctgcgggtcgatgacggcctgccattcgccgtcctgctcgaagatccagctcttgtcggggttcggctgccaggtgtcgaattccttgctgccggcgtcggcctcgggttcctggttccacttgccggtcgcgtggtccttgaccttcttgaagtccttcggcttgctgacggtgacattgaagctgaactcgtactggtggtccaagggcatctcgcccttgtcggccgtgcgcaccgccgagacggtgtccgtcttgcggtcccaggtgatggtgaactcgttggacgcgtcgcggtcgttgtcggtcttgtcgacgagcttgtagtcgtcgacggtgtagtcgacgccgttggctgtgatcttgtccttgaacgtcatctcgtagccgcccttgccggtgccgtaggtgatgacggtgcggttggtcatgctgtcggcgctcacgccctcgtcgatggtcttggtcggcggggtcggcggttcggcgctcacgttccaggtctcggccgggtccttgtcggtcgtgtcgacggccgcgttcatcctgccctgcttggcgacctggatatcgatccagtactggccttcctgccagtggctcatgccgaagtcggctggcgtggcgaggttctcgagctgggtgtcgccgttgttggcgaaggtgatcggcttgctgaccgtcttggctgcgacgtagccgttcttctggccctcgtagtggatgatggccgtgccgttcaggttctctttgatgctgctgccgttgttgctcgcgtgcagggtgtcgccgatcgggtcggtggagccgaccttcaggttggtcctctgcttgtgcgtggtggtgacggtcaggtcgtagttcggtggggcgggctggtatttgtcgagcgcgatgatgacgatgctggccgtgctggacacgtaccgttccatgagcttgtccacactcgtggacggatcgtcatcaaacgcggtagaggtcttatagtgacgagttccagcgtagttgtaatcgcctggtgcgatgtacttgttccagttgtccaaccatatactcacgtcggcgatgccggatccgttccatacgctggtggtggacccgttgccggagaccgcgccgaccgcgacgacgcggcagtcgccgtcgccctcgcccggatggcgctggtggaaaccggcgacgcaccggctgttcgcgtcggccagcgcggcggcggccttgccggacgagtcgtccatcctcacgcctgcgttggccatggcgcggctcacgctgttgatgtcggtcgccaggccccatgaaccggacgcgtcgtccttgtactgccagaactgcgttgccgcgccgctgccgccggtgccgggcctgttgccgcccccgccaccggcgtatgcggtgcccgcggtcagaccgccggccagggtggcaacggccgtcagcaacgccaacgtcttccgtttattattggtgtaacccaatgttcctctcctttcagagattctgcacttgactgtgtcggggcgggaattgcgatccccgaccgataccattgcaacccggtttcacggactccggtttggacattcgcgcaggagacaggaaagggccgtcccacggatgttcgtggaacggccctgaaagagaaacggagtcgaccggcttaatgttggattgggatggagcaatcctccaaactacaggcacctggatcaccgtgtccgccgctggtcggccccgaccagcctgacccaccggacgacgagccgcccgtcgaaccagaggatgcgcctgccgaaccgacgtttgtgtaggagcggcccgaactcgtgccggtgttcgtataggacggcgtgtacgactgggcctgccgttgcgactgtgcggccgcagcggcggcctgggccgcggcctcctgttcggccttggccttcgcctccgcgtcggccttctccttcgccgccttcgattcgttcaccgtcttcacggccttgccgatggcatccgcgtcacgctttttgatggcgtccagcaggcttgcgcgggtcttgtcgtcctgcaccttcccggaggtcgcgtcgtagagcgcctgcgcgtcgtccacggtcttgtcgagtttggacgattcgaccgccttcacggccttggacagcgtcttcgcatgcgtcttgtaccatgccgcgttcgccgtgatggcctttgcggcctcctgcacgccggtcctcgaatccgccttgcaggaaacggtcttcggaatcgtggccttcatcgtcttggacagggcgtccagcatcttcgcgtccttcacgcttttcctatcggtcttcgccgcgtccgccgcggacccgttcagaagcgtgttccagtcgttcgtcgcggtgcgcaggcgttcggatgcggccgcgcaatccgccctggcctcggccatgaggcggtccgcgtgcgccttccaggcgatgcctcccgccgtgagcagtgcgagtacgacgacggtgatgacgatggcccttctgcgatgcggcttctttgttttcttttccgtggactcggccgaaacttcgatggtctcatcttcgatggccttttctttttctgtcatttgttctccttgttcataggttcacagcttatcgaatcggcggagccgtctgcatcgttcctccggcgcgtgccgcgcatggacgcgccggagggccgcatcgagatccaaatgaaaagattcgggacgaggaaaagcagcgggacggcccgatggacgacggtctgggccgagtccatcggagcgaaggacgccacgaggacgagagcgtaggcgacgacgcacaggcggcacaggccgcgaaggctgctggatccagcgcgccgggcgacggtttcggccatcacgcccatcactccgcacaatgccacgcgagagatgcagaccagcagtccgaggagcatgatgcggttcatcgttcccctccaaagcccaggtacgtttcgagggcggcatcgatcacttcctggatccgcatgtcgtgctcggcggcgaaggtcttgagcctgcgccgggtcgaggcgcgcaggctcacgctggtcttcacccagccctccgcgtcgttcggtttcacggtcttccggtttttcggtatttcggtttccgccgattccggtcttccggtatccgccggtgccggccggccgccggtgagcagcgcggtcaggtcgcgcggacggggcgtcaagttcatgttcctcacaggtcctcccccttgagctgtcgcatggtctgcttgagttcgccggacaggtcgcggtattcgtgcaggcgggacccgcgggggcgggtggatttcgcgttgaggatgtcctggcgtttcgggatcagcgtctcgaagcacgcgatgtccgcggcgtcgatccaggctagggcgtcgcggagggcggtcgtgttggcctcggtgcggcacaggaggatcgcggcggggacgccgcgccggtcgcacaggtccttcaccccggcggcctggtcgaggtcgatgcggctggggctcgacgggatgaccacgaggtccgcgttgttcaccgattcgtccaatgcgcggccgtatggggcggagtcgatcagcacccagtcgacggggtcgtcgagacggccgttgatcccgtgcaggtgcgcgatgtcggccggcgcggcggacatcacgtcgaacggcagcgggtcgtccagctcggcggccctgtaccaccagtccttcgcgtcgccctgcacgtccgcgtcggcgacgagcacatgctgctcgccccgggactggtccacgagggcgcaggccaggaacacggcgctggtggtcttcatgctgccgcccttgccggtcgccaacgcgatcaccatcggctcgcggttcttcttgtcgttcatcggtttctccttatttcggtatgtcggtatccggtttttcggcattctggttagttggtttttcggtatttcggtttatgccgcgtcccacgcggatcgcgacgggaagcggtcagaagaggctgccctggaccaggcccttcggcacgggttcggtcggaaggaacagcggatcgttggtcgcgtattcgcggcgcgagcgttggcggcgtttggcccgtcgccagtagtcgcggccatcacggcgcatgcgttcggcccagtccggatgttcggccagccagtcacggacccgactccgtgggatccggtgcaggccgccgtcggcgatgtggaggtcacgggcgatcagtcgggcgagggtccagcggctcggatagtcgagcccgccgtacacggccttgtccttccagccgttgacgagagcgcggctgatgcagtcgaggcgcatggggcacgcggcacacagcatgcggcccttgccgcgcatccgttcgtcgaccaggtcccggccatcgtcgtcggtcgtcgtgttccacatgcgatccgccatggccgggtcggccgcggcgattctcgcgcaggccggcatcatgtcccgcccgttcatggccgccgtccttgcgtcatcggcgtcttgcgggcatggaggcgtcctatggcggtttcgccgggattgcgggcggcccatgcccgggcgtattggatcagcagaccgacggccttgggatggccgaggcgcttgttgcgccagtagacggcatgcagctgccagatcaggtccgcgtgcccgtcgagctgcgggttggcgaggaggaattcgttgaaacccgcctcggaacagtcgatgcgcgtgatcatgccgtcgcctcccctccggccgtcgcgtcctggccgtccaattcggccagcgtcttcacggcccagtcgggcagccatggcgcagcatccggctccgtggactcggccggcggaaccgtctgcgcgtgtgcgtcgccgtctgtgcggccggctgcgaggatcatgtcgtcgttgagttcgtcccagtgtctggcgagggcccggccggtgcggatgcgtttgggccaccaatcgccgttcatggcaaagccgatcgcgtcgaccatcacgagggtgggccattgcgctccctggtcgacgagcctgcggtacaggccgatgatggccttgcggtcggctttggtcggtgagggcgtggccaggccgagcatcgagcgctgctcgccgagcgaggcgaggacccgtccggccgcttcggcgatctcggtgtcgtcctcgtcgagttgttcgtttttattcttttcggcggcggccgccccgcttgcggggagatgccccgtaggggcagaggggaaggagggtttactaggagggtttacctggagggttttatccttatatatacagctctgcgagatttgcagtgctgggggtgcggcatttgcagtgctgggggtgcagctctcgcagtgctggccctgcgggatttgcagtgccggttccggccctttttccagccctgcgagatttgcagtgctgggaatcggcttcgttccagcgttttccggcagcacgtccttggattcgccgttttccatgatggtggaggcggcggggtccacggtattgcccatggtcttcgggtcgtgttccgccgtgtgcgtctccttgatccattcgagggtcgacgggtcggattcgaccgcgaggtcccacacgatctggcagtactggggcagacggttcctgccgcccttgccgaggcgcgcgtaccgttggtcgccacggcggatgaagccgcgttcctggagagtcttcaacgcggtgcgcacggtccgttccgagagttcggtgacgttgacgatggtcgcgatcttcggataggctgcggtgccatcgtcgtccgcgcggtccgcgaggtagacgagcacggccttcgcgctggcgttgcccacatggcatttgaaggcccatgacagtgcgatgttgctcacggacgctcctcctcacgctgctgggcggcacggcgttcgtcggccaatctggcggacatctcgtcgccgagacgtgccgcccggcacagggccagcgtcatcagccatgagaacgcgacgaacacgatcaatacgattgcaagccagttcacgcgagtctcccttccatggacgggtgcgccatcatcgacgccaggcggcgggaatcgacggagcccggaccgttgtggcgggcgaatgccaccacgaccgggaacgtccaaaccgacgcctggaaatcccggttacactcgggaaacacagagcaagacatgcggaatgctttagtaaagtcgttcatgtgtgatcactactccaagacaatgcattgggcggccacggaccgggatccggcaagatacgggatccgcggccgctcggaatattggttgcaccgcccgtccccgacgttccagcatcgggaacgggcgttttttcttttagttgcagagaaagagagaaaatcgaatgggatcagaccatcgcaccacctccctcgccgtcgacgggccacgcgccgccgcaacggatggcgaggcaaaggcaatcaagagcctgctcatcagggacatcaaagacttcgatcaaagcgtcccagcagtcgtcagacacgacgatggaacgatcaggcctacgtacataggcgtatggggacaggaccgtctgataggcgcggccctcatccagccagccctttgcgtagccgagacgctcatataccgcaccgggacgagcggggtccatgccgcacagatacgagaggctttcgccgagcatgcagccatcatcgaagggatcgcggtcgtcagaaagcatcggcgcgaaggcttcggatcgcagatcaaggcgttctgcgactcctgggcggcagaccacggcgctgagctgatactcagtatccccaccaatgagggcgcgcgcctgctcaacgagaaagccggatacacggtcgtaccgcccgacggatatctcaccatcaaggtatttgacgctcagggacagcctcttcacattccctacgccgaccagcggacccaggacagaggcactagcatgtgggcgtacaagctcgtagggcaacgcacacagcacttcgagattggcgttctcgccgcctcctgaagttccgaagaccataccgtcgatgaatgttcccgacgggtcgcgggagaagacgagtcttccggcttcgtcgctcatgctgtcctcccctcggtcagcagcaggtttgccaccacccgttcgcgggcggagagctgtgcatcgacctcccggaaggcatgcgtgtaggcatgcgtggggcggagccaggtgtcggccaggccgcgggtctcgccgcggcgcagggcgcgcacggcgcaggccgggcagagctccaaaatctccgtgtcgcccgggacgcagtagttgcgccagccgttacgggcgaaataagcgtcgcgggcggccgaatcgtagtcgtcccagaacgtgccccagaccactgtgtggcatccatcgcacaccgtgacgcaatcccaccggctgtccggccattcggactgttcgtagattccaccagccatcacgcaacctcctcacgatcggcatcagacgaaatgccaagaacaaaatcagacgacaagccgaacttgtcatggaagaacagcaaatcccgctgctgccagggagtctcaccattcaactttttacaaacagtcgcagccgatgaccccatggaggcggcaagtttgcgataggaaatcccctgtgcttttagccattccttcatgtcggatgttcctttcgcgtcctgttgtttcttcataactaacaatatagcgtttcctttgacgaaacgcaaatcgatggatacacttgttgttatctattaagaaacacgcataacagaggactaacaatgaccacatcagccccagcaacagccaagaaaaacgtcgacactgaagtgcaatatgcagagtctgtaattgcctggaacgtcaaaatgcttttgactgcacaaaacaaatcacagagtgctcttgccgcttttctaggcatacagcggccgaccatgactaacaaaatgaaggggcgaattgcatggtcagtggcggatttggtcaaatctgccgattttctcggaaccaccgccgaggcactcatggatgattcattgatgtcgcaattaaaaactggatataccgaatcgaccaagcctaagtatggagtgtttgccgagaaaccaggtgctctggtaggtgccggctcccccaggttccttgtcagtcccttcaaccccgacgccccggtcgagggtggaatctcaggtgcagctaaaggtgccttggccggtttcgtgccgttcggggtcccgtccggctcgggttccccgtccagcccctcgaagcatgacgggattggggtttccggccggtctcaagcccatgagacacttgggaccatgactaccatcatcatgcatacctccgagggcgacatcaccatcaacctgttcgacgacaaggccccgaacaccgtggccaacttcctgggcctcgccaccggcgagaaggaatgggcggacccgtacaccggccagccttcccatggcaagttctacaacggcctgaccttccaccgtatcatcaagcagttcatgattcagggcggttgcccgctgggcaccggtaccggcggccctggctacgagttcgacgatgagatcgacccgagcctgaagttcgacaagccatacctgctggctatggccaacgccggtctgcgtcgcggcatggacggcaaggtccatggcaccaacggctcccagttcttcatcaccaccgtgccgaccccgtggctggacggtcaccacaccatcttcggcgaggtcgccgatgacgactccaagaaggtcgtcgataagctcgaagcactggacaccgatccgatggatcgcccgctcgagccggccgtaattctgtccgtgaacgtggccgagtaagaccgacacatatacagcaaaggtcctgattggtattccagtcaggaccttttcgtattcttggctccctctctgaggggagctggcgccgcagacgtctgaggggagttccgcaagcccgcgctgctcccctcagtcagcttcgctgacagcccctcccggaggggagccaagcaacggcctacttcatcttgcgcagtcgaggttcggcggattccttggcaccggtgatgcggtacacgtcgaacacgccatcaatcttgcgcacggctgccagcaacgagttgagatgctgcggatcggccatttcgaagctgaactggctggtggccacgcgatcggaaccggtggcgatcgtaccggaaatgatgttcacgccatggtcggaaagcacacgtgtcacgtccgaaagcaggtttcgtcgatccagcgcctcgacctgaatcttgaccatgaacaggcccttggtgctggtccattcgacttcgaccacacgctcaggctgcttgtttttcagatcgatcatgttctggcagtcggtgcggtgcacggatacgccctgattacgggtgatgaagccgatgatattgtcaccgggcaccggcatgcagcaacgggccagcttgatccacacatcgcccacgcccttgacggataccccggtggagctgctggaagtcttgcgctccacgggcttgagcggcagagcctcctgctcgacctcctcatcgacctcgtcggccccggcatccttgaccagatgcgagatgacgttctgcgtggagatctgcccatcaccgatggcggcgaacacagcgtcggcgttcgggaaattgaggtcgtcggccacaccgatcaatgcctcggtggtcagcagcgcattgaccggcaagttacgtttgcgcatagcgcgggtcagttcgtcgcggccttcctcaatagcctcggtacgacgttccttcgagaaccactggcggatcttgtttcgtgccttcgggctcttgacgaagctcagccagtcgcgcgaaggaccggcggtatcggacttggaagtcaggatctccacggtgtcgccgttgtcgagcgtggtgtcaagcggcaccaaacgtccgttgacacgtgcgcccatcgtgcgatgacccacttcggtgtgcacggcatacgcgaagtcgacgggcgtggcatgagcgggcagggatacgatcttgcctttcggcgtgaacacgtagacttcggacgagccgagatcctccttgagcgaacccagaaactcgttggagtcgggggtttcgctggtccaatcggcaagctgctgaatccatttgagattgtcggcttcggaaagctcctggttcttctcgtcacgcctgcggtcggacttgtccggcgagctcagggcgcggccggcctggccgttttccttgtatttccagtgcgcggcgatgccgaactcggcgcggcggtgcatgtcccaggtgcgaatctggatttccaccggcttgccaccggggcccaccaccgtggtgtgcagcgactggtacatgttgagcttcggcatggcgatgtagtccttgaaccggccgggaaccgggttccaccgcgcatgcacggcaccaagcgccgcatagcaatcctgaatggtgtcgacgatgatgcgcacaccgaccaaatcgtagatgttcgcgaaatcatggccgcgcacgatcatcttctgataaatcgagaagtagtccttcgggcgtccggtgacgtatgccttgatgttctgctcgtcgagatcctcgttgatctccgccagaatctgcttcaggtacacatcgcgctggccggctcggcgagccaccagcaccacgatctcgttgtagatcttcgggtagagcaccttgaagctcagttcctcgagctccgtcttgatggcgttcataccgagtcggttggccaaaggcgcgtacacgtcgagggtttcacgcgccttcttctgggcggacgtggtcttcacatagcgccaggtgcgggcgttgtgtacacggtcggcgagcttgaccaccaaggtgcgcacgtcgcggctcatggccaccacaagtttgcgaatggtttcggcttgggcggagtcgcccacttcaagctggctgagcttggtgacgccatcgaccagaccggccacggtgtcgccgaactcggcacggcattgatccaacgtgtagtcggtgtcctccaccgtatcatgcagcagaccggccgccaccacaatcggccccatgcccagatccgcgagaatctgggaaacggccaacggatggatgatgtatggttcgcccgacttgcgccgttgcgtgcaatgctggatgacggcgcgccggtacgcgcggtcgaggatggacaaatcctcaccgggatggtgggacttgcacactttcttgattggatccagcggattgagcggatcggcactgatctcacaacccaacttacgggcggcgtactgctcgccatcaatctctgccatgccagtcacctccctcgtcatgaagttcattgtaaccgcgaaccggagccttatgcatgcacctgttcgccatcattggttccgcaaccgtcgttgccgtcatcaccttggtcattcaaccggcccaatccggtcaggacgccactcccgtcgaaccgaacccacgttcggcgcgatcggatccgggcagggtttcagccgggatgaaccgggcctcaacataccgctgaatcaccaattgagcgatgcgatcgcccggatggaagacggcggtgcgttccggatcgaggttgatcagcggcaccttgatctcgccacggtagccggcatcaacggtgccaggcgcgttgagcacggtgacgccctgcttggcggccagcccggaacgcggatgcaccaacgccacgtagcccgcaggtagggcgatggccacgccggtgggcaccagtacccgttcaaaaggcttcagcgtcacatcgacggtggtgatgaggtcggcaccagcatcgcccgcgtgggcatagtgcagctgggccggatgttcggggtcgaggctcttgaccaggacctcggtggattcgggctcgttgtaggtctcgtcgaacgccatcaggcggcgcactcctcacacaccggctggccatcctcgtccgtgtaggcgagctggctacgatgcttgaccaggaagcactgcgagcagatgaactcgtcaccctgcatggggatgacggtcaccgaggaatcctcgttgctcaaatcggcgcccggcagttcgtagtcttcggcgatggcgttctcatcgtcgtcgatgtcgctcgaggcgttctgcgaggacttccccagcgcctgcagcgattcctcgtcctcatccttattgcggggggaatcataatcctgagccatcatggtcctttcgtcgtctttggttcgtaagtcgatatatatagcacggtcagcgccgtactcgcccataggatacacgatttgaaatactcgtaaagttcgacacgtggggcatacttaaaagaagtaatgtctttgcgacggaaagtggtgcgaatatgccagatgatcggcttgaaaaagcccgtttcgtacgcgtgagcaagacgggggacctcgtattctccattggcggcagggaaatggccgtgagcgtggacgacacgctcgaacgggcgattcttgaggccaagcaggtcagaagcgagatgcgacaggccccccagccgcatcagcagtccactttgccgatttcccagatacagtcgctgattcgcgccggtgccgatccggcccgtgtcgcggagaaatatcatctgagcgaaacgctggtacgtcgtttctccatggccgtggagaccgagaaacagtacgccatcgaacaattccttgccgtggcggcacccaaagacagcagggtgcgcaccatcagcgaactggtggaacgcacgctggcctctgctggaatcggcatggaatcagtgacctggaaatccacccggcgcggacttgagccttggcgcatcgtggcgatattcacttccgcgggccgtgagatccatgccgaatggacgtggaatatgcacgacaattccgtgatgagcctgaacaatgccgctcgaaaactgctcggcgaacagaatccggaatcagccacggattccaaactcaagccgacgattcctgaactgcccggcgactccgtacgttccgcgcgtatcgagcgcgctgtgtctgcttgggcggcgcctacgccttcgattccggccgcacggcctgccgcgatccggccctccgtcacttccacaggttccatgcccccggtggacctatccacgtccatctcaccggccacgaaccaggctcatgacgctacggcccccagcccggtctcttcgcagaccgccggatctgtttcgtcatctgccgcaggattgcagcaatcgtctgccacggcaccagagcagggttctgacaatatttcggacgagaccgtacggcgtggccccaatgcacagctggtagccaccgagcaggagcgggcggccgaatccgccgccaccaaacacgaggcaccagccaaaccggccaagcgtaaatcaggacgttcggccgtaccaagctgggacgagattctgttcggagactgaatttccgaatcaggccatatcgatcaggcagggaatatccatttccaatgccgtttgggagccatgcacgctcggcaggtgggtggctttgtctccttgcgtacgcgaatcgacgagggtcacggctcccgctgcctgcacgaccacatcgccgagcatcggccggactcgctcgcagaccggtccaaacaatccgtccgcgatggcctcatccctggtccgcaccaaggctcggtcttgcaggtaatcgcgccaccggcaagctatatcctcaggtcgttcatccggctcggcatacagcatcagcgagcgaggctctcccccgaccagtgacacgcctcgggtgagctgcggttcaacggcgatgtcaatccgctggtccacgtcggtttgcaccatgccgtggtcggctacgatgacgatcagcgtgcctttgggtgcgctgcgtttcaggagcgcgagctgggcgtcgatatgttcgaatgcggccacccagtgttcggaatcccacccgtaattgtggccgactttgtcggcgtcacggatgtacaggtaggtcaggccgggggtacgggaggcacgtgaggcggccagcacacgatcgcgtggggtgacgttgccttgatagtcggtgcctcgcaatgcggcttcggtcaatggcgatttggagaacttgggcaaccccgagcttgtgacgcgcacctcttgagccgcaagtttctcgaacaccgtctcctcgcgctgctggtcgagcggatcgaccatgggtggcacaggaatgtgcggattggctggtctgggtgccagcgcgtctttgaactggatgagttggatgagcttatggctggcgggttcgagctgcgtatagcccgccattgcggtcagtcccgggcaggttccggtaccgaatgcggccatggccgccacagtggtgcttggagcgcaggtggcgatgggacgctgattggcgcgttcgttcatcagcgaacgcagatagggcgcgtggccgaggcgcatggcgaggttccagaagcccaggccgtctacgagcaccacgatggccgattcggcgtcgggcagtcccaacgcgcgctggcaggccttgggatcggcgtggaccttggtgggagtcggatgcccaatcgcggcggacaaggcgggcagcacggcggacaggtgcagtgctcccccacgccgatcggccggggcgtcatccccatagcccacagtgggcaccagccgcagcaactcgtccatatccggcgtctcaacactcatagttgcccattcaagtagcacccctccccttggctcagtgcgcagagaacggttctcaataacaactgtgcgccccaacgcacataatcaaacaaacgcacatcgactgaaacactggaatcacgccattttatcggcaaacatgtgcgattggcgcaccgaaaccagcgcacagttgttattgagaaccgttctctgcgcactgtttcgcgccctcccgctaatatgggggcgttcgaaagggagtttcatggcatcacaccgcaaaccgtccgcgcaaacctacgatccgcgcacggtcaaggagcatatcgtcgagacgccgctgaacgaggagatgagcaaatccttcctcgagtatgcgtattcggtgatttacgcacgcgcactgcccgatgcgcgcgatggcttgaagccggtgcagcgccgcatcgtctaccagatgggcgagatgaacctgactcccgaccgcccgtatatgaagtccgcccgcgtggtgggcgaggtgatgggcaagctccatccgcacggcgattccgcgatctacgaggccatggtgcgtttggcacagccgttcgcgatgcgtctgccgctggtagatggccacggcaacttcggctcgctggatgacggccctgcggcctcccgttacaccgaggccaggcttggcccggcggccctcggcatgaacgcggatatcgatgaggacaccgtcgacttcacgccgaactatgacaacaagctcaaggaaccgaccgtgctgccggccgccatcccaaatctgctggtcaacggcggctcgggcatcgccgtgggcatggccacgaacctggccacccacaatctgggcgaggtggtgaacgccgccaagttcctcatggcgcattcggacgccaccctggaacagctgatgcgttacgtgcccggccccgactggcccaccggcggcacgatcatcggccgcgatggcatccgtgaggcctatgccaacggccgtggtacgctcaccacgcgcgccgccacgcatatcgaacatgtcacggcccgcaagcaggccatcgtggtcaccgagctgccgtacatggtgggcccggagaaggtgatcgagcgtatttccgacggcgtgaagaaccgcaagctggaggggatttccggcgcgttcgatctgaccgatcgtcataacggcacgcgtatcgtcatcgagatcaagaccggtttcgacccgcatgcggtgctggtgcagctgttcaagcacacgccgttgcaggacaattttgccatgaacaacgtggcgctggtggagggccgcccgcacacgatgggcctgaaggagatgcttcaggtgtgggttgaccaccgccgtgtggtgatccgccgtcgcagcgaatatcgcaagaagaaggcgttggagcgcctgcacctggtcgagggcctgctgctggccatgctggacatcgacgaggtgatccaggtaatccgcacctcagatgatgcggatgccgcgaaaagccgtttgatggttgtgttcgacctggacgaggtccaggcccagtacatcctcgacctgcgtctgcgccgtctgaccaagatgaaccgcatcgaacttgaggccgaacgcgatgacctgaagaagcgcatcgaggagctgacccgcattctggcctccgccgaagcgctcgaccaggtggtcaccgacgagatggacgaggcggtcgccaagtggggctcgccgcgtcgcaccgtgctgctggacgccgacccggatggcacgctgacgccggtcgtggcgcagggcgccggggcttcgggtgtgtccaagtccgcactcgaagcagtgaaggccgccaccacgatttcctccgccgaagccgatgtggccgcagccgcagccgccgccaagaagaccggcgagcggtccgcgctgaccggagccttgaagatcgaagacgagccgtgcgtggtgatgatgagcgccaccggtttgattgcccgtaccacgccaagcgcgatggacgtgttcaatgtacggtccacatccgatgaacgtctgcgagacgatcaaatcaccacaatcttcgagacctccacgcgcgccacgtacgggctggtcacgtcggccggccgcctggtgctcgcgcatgtggttgatttgcctgccttgcccgctgccgccacattgtcgctgaagggaggagttcaggccgacgaactgatcggcatgaccgaatccaccgatccgattcgtggcgagcgcgtgattacggcgatcgccatggagcagccgacgtccggcaaggccagtgccgaggacgagagcgaggatggtgccgccgaggccaagccgttgccgtcgctggctatcggtacccgtaacggtgtcatcaagcgttggaaccgtgaggcacccaccaccatggattcctggcccgtcattgatctgaaagatggcgacgaagtggtattcgccgccgtggccgaggatgacgaccgtctggtgttcatctcctccgattcctcgttactgacctttgaggcgaagaacgtgcgcccgcagggtcgcaccgcgggcggtatggccggcatcaagctggccgagggcgcccgtgtggcggcattcaacgtggttcccgccggcaaggtggcatggacctatgaggagggcgagaacggtttgacttccggctccggcgcggtggtgctcaccgtggccggcgactccgatgcactacccggcaccgaaaacggcgccgccaaggtcaccccgctggaaatgtaccccaccaagggccgcgctaccggtggcgtacgctcccagcgcttcctcaagggccagaacacgctgattcttgcctgggttggtctctacccgttgcatgcctccacatccgcaggctccccggtcgagcttcccaagcccgatatgcgccgagacggctccggagtggacctcgcctcccccatcgccttcattgcgtaacctcaattaagctccctctgatgggccgagccgtaaagcaaacacccccagtggggtgtttgtaggcgaggagcgaacgatagtgagccaaacgcatagagaagagaccctaaacccgacctacactaagcatcaaggaggtggcgatgagactactggttgccgtatccaatgaaccgttggcccgcgccattcgtggtgcgctgcttgcctgtcgtcatgaggtgtccttggcaagcaccggcagtatcgcgctcgccgcggtcaccaaggagctatttgacgcagtgattctcgatgaatccctgctcggcatctccaccgagcaactcatcgaatcccttcacaatgcccgtgcctccgtcaagattctgctgctgacttcgacgccactcagcaaaaccatcggcgaaggcagccgctggcgagcgctgcctgacgagtacgccccgatcgaagagacgccctacagctccttcagcgcggattcacacgcaaacaactcagatgccgaagccgaacagtgcacggacaatgctgccgctagcgcacgagctaatgtacgacacccggatgccgtactgagcaaaccattctccgatggcgaactgctctcatacgtcggctcgcttgccaccgactcccccaccatgatcattcgtggcaatctcacgttggataccacgaatcgcaaagcctactacgcatccacacacaccgcaatttcactgtcccgtctggaatacagtttgcttgaagcactggtcaaggctgatggccagtttgtcaacaccagcgaattggtcaagctcgtcggtggcccattcttcgagcaacaagggctcctcaggaacgccctctacacactggataagaagctcacccacgccggcctcatcatgacccaacgcggctccaactaccgcattcgatagctgggctcaatcagtacagccgcatgcctcggggaacgggggtgaagccggactggtggaggatgcgggcgaaggggtgacgggcgttgaggggttcgccattgatgtcgctgaacgtcacggaaccggtgccattgcgtttgagagcgtaggccagttctgtggcggccttgcgcatttgttcgtcggaatcattggcggcgggttcatggccgaccgattgatcgaacgccgtcaagtgcttggctttggcagccgcgtatagtagcgcaccttgcgcattgagcacgaccgtggctccgatacggcgtgccggtttacccgcaccggcaggcgcgtccggccacgcgatggcggagccactgagatttgcggggtcgagcacactcaatgccaccacggactggccgcgatgctctgacggatgacgcaacgcatccacggtgtcgcgctcggcaaattgggccgcgccgaaaccacggacgaacatgcctcgtaccagtcgaccatgctcctccatgcgctgcaatatcggatacaacgctgagtagccacccgggatattttccttgtcgatcaccggctgcgcgatgacgccatacctgtccagcaacgtctcgaccagtgcgagcgcctgctcggtctgatcagtgtcttcggcttcagcttgcccgattacggcagaccacaaacctcctaacgtcatatccgtagtggctcggtgaatcggagcgacacgcccacgacgacgtgatgtagtggatttacgcgggcttgctgcgcctgcggttaatgcacgtaccggcgcgaagctggaattggtgaccttaccttgccagaccaagctccacaaggcatccttgaactgctgttcgctccactcttgcggaatgatttcaccggtgtttggattgatgtccggctccgcggtctcattccacacacgtttggcggcatccaccagttgacgggcatggaacgctccccctgagtccagtgcggtcagaatcgcttccggcatggtggcgtctgaagcgttcgatgtcgtaccatgttccacaccgctgagcaatattgaatccgccggatagaaagcaacctcaccggggtccatcgcactggttcccccggtttttgagccgacccagaccacatcgccgctggtcagcaactcatccagcaatgcaggttggtagtctcgtactcgtgcggggaataccgccgactcccagagtgcagtgggcagtgctatgccctccagctgctcgataacgcgcatgagcccgtcggcaccttcatatcgttcgccgccgaccggcccgataccttgtcggtcgataagaaacatctggaacgcctctggttctactggcttgactgctttacgcgccttggccaatgagcgagaccgaatgcggcggaatacgtccttatggagccactgttggccttgcttgtcatcatctacaaagtggccttgcagcaactcgcctttggcagccagtacatccaaagtatgcacggcatccgtagcatcgaggtgcagatcggccatgagctgatcggcggtgaaaggaccatgggttttggcgtaacgggtcacgcgaccagtcacatcatcgtcggcaagttcattccagaaagtgcgctcccccagttcctgttcgacttcgcgaatcacgtccgggttgagcacttgtgccatgtcggtggtgccgagcaagcgttcgagcacgtgcggatcgagagacaacagttgcgcgctgcgctcggcctgaggttggtcatactggtacatcaccacgccgacgaagccaaagagaatgttctcggcaaaaggcgatggcggctcggtctccacgtccttcacggtaatggtgccggcttgcaatccggtcatcacctcgttcagggcgggcatgtcgtatacgtcttgcaaacattcgcgcgcggtttccagcagcagcgggaagttcttgaccatacgtgcggcttgcaggagctgtgcggcgcgcagtcgctgctgccataggggcacgcgacggcccgggtcggatcgcggcatgaacagtgatcgggcggcgcattcgcggaatcgtgcggcgaatagcacggactcgcccacttgacgttctacatctgctttgaggtcttctgggtcgaaaaggaacaggtcttgagcaggaatatgtccgtcaccgtccggtagctgaatgacgataccgtcatcggcggcatatacctgcccatcgaaaccgtagcgttggcgcagtctgcggctgatggccatggaccacggttcgtgaacgcggcggccgaaggggcttaacagtacgatgcgccagccgccgtcttcatcgcgggtccgttccacgatgagggtttggtcgctgggaactgtgccggtgatggcttgttgctcggagagtaggcgggccaggttggtgatagcgttggggtctaggccgtctcggtggagacgggtgaggattgttgggatgaaggttgggacagctggaccttctgcggcagaactccccccagtccgcttcacgtctaatccggcggcgatttctcgggtgaagcgggctatggtacggctgaaaccgtagtcacggccagcgccttcaccgtgccagaacggcagacgggcggtgcggcccggagccggagtcacgaccacacgatcacgggtgatttcctgaatctgccatgtggaggtgccgagcgtaatgacatcgcccacgcgcgattcgtagaccatctcctcatccaactcgccgacgcgacgctggcctttgccggcgtccgcctcaggcaggaccacggtgtacagccctcgatcgggaatcgtaccgccagaggtaacggccactttctgcgaaccgggacgggcggaaatcaggccattatcccgattccataccagtcgcggccggaaggccgagaattcctcgctgttgtattcgccggacatcatgccgattacggcatcgaacatgtcacgtggcagttcggcaaacggcgcagcacggagcaccgtggcataccagtcatcagcgttcaaatcgtgcatcgaggcagcggccacggtctgctgggcgagaatatcgagcggattgcgcggcacggccaatggttctatatcgccggcaatcatggcttccagacttgcggcccccgtgacgatttgctgacgggtgagcgggtagaacaatgcgtgagagacgccaccgacctgatgatcggcacgacctacacgctgcaatccggaggagaccgacaacggtgtatcgacttgaatcatcaagtcgaccgagcccatatcaatgcctagctccaaactggaggtggccaccacgcagcgcaattcaccacgcttgagccgttcctcaatcattttgcgacggtctttggagaccgacccatgatgagccatggcgatgacatcatcgccctcatgcgagccgacaagcatggtggtggaaccgaccacagcatcgtaatgtgtggagaacccttcgcggccttccggagagcccagatcacgcacagtgtcgggattggtgccatgccgggtctgcgcatagagatcattgaggcgcgcggtgagcttttcggccacaccacgcgaattgacgaacaccaatgtggtgcggtgcgcgagaatctcatccaaaatgctgcgttccaccacgggccagatggaaccggaggtacggtcgcccgccgctccaaccaacgcggaggaatcgaacgcatcactcgcatcagaatcgtccccagaagtggaagaaacatctctatcatccaccggcacaatgcccctgcgttcggcaagtcgctgcatggccggcgtgacaccgctgatatgcggagcggaccgttcagcatccacgccaccgacacgctgcttggcattcacggactgcaaatcacgcatgttttccaacggctcaatcatgcgcagatccattgcaggccgcccaccgggattcacgatggtaaccggttgtccgccgcccaggaatcgcgccgcctcttcaggcggattcaccgtagcggatagaccaatgcgctgcatatgaaggtcactgaggccagcatcgatggcggtatcactgccctcatcagcatccgcatcgattgcatctcgcttgcgcgattccgcgacaaggttctccagccgttccagacttaccgccagatgtgcgccgcgcttggtgcccgccactgcatgaatctcatcgacgatcaccgtatcgacagtgccgagaatccgccctgccttcgaagtgagcaacagatacaacgattctggcgtggtaacgaggatatccggtggatgggaggctatgcgccgccgctcctgtgcggtggtgtcgcctgaacgagtggcgaccgcgatcttcggcacgggcagcccttgcgcctcgcattgtgcggcaatgccctccaaaggctgttctaggttcttggccacatcggccgcgagcgcctttaacggcgagatatacagcacacgcacaccggcacgccgcgtgcgtggcacggtcatcaatcggtcgatggctgagagaaacgcagccaatgttttgccggagccggtaggtgcgatgaccaagacattacgaccggaatggattgccggccatgcctgagcctgtgcctcggtcggctgaccgaaggcatgctcgaaccacaccttggtgggttcggaaaacaggctcagggtttcgtacatatgtacgattataggtcagctgaagtaggcgatgacttcttcggcggtgccgtaggcgctttgggcaccaagcttggtggccgcataggcggagacataggagccgatttgcgcggattgcagcagcgtatggccagcggccaagccagccagcacagttcccatgaacgagtcgccgcaaccggtggtgtccaccgcattgacttgcgcggcggatacgcgatgccaacgtccgttctcgatcaccaccgaccccgacgcaccaagcgtcactatcgcccggtcgaatccgtaatcggtgaatcgttcggcgacctcataccagtcgagtgattccacatcgccgtccggcagacccagtaactgagccacttcatgctggttgaccagcagaatatccgtggcttccaccagttcgtgaggcagctcgtccataaatggcgagtcgttgagcagcacggtcacgccagcgtcatgcgcggtctgtgcggcggcgataacggtggagatcgggctctccaaacacagtcccaataccgcgcattcggcgatggtcgtgcgatgtgattgcacatagccggcacttgccttggcattggaacccggcgaatagacgatggtattctcgccctcagcgctcacggtgattaccgtggtgccgctggggccttcaacgtgcaggatatcggcggtgtcgacgccggcctcatccagcttgcctaataggaagtccgcgttggagtcctcgcccaccgcgcccagcaactggacattgacaccgaggcgcgcagcggcagacgcctgattcgcgcctttgccgcccggcaacactttcatggcaccaccattgacggtttcgcctggcttgggcagtcgtttggtggtcacggtgtaatcggcgttcatcgagccgaccacgattaccgagcccggcgcatccttcagcgcttccaatcgttcccgtacgggctcgggcatctgtttatgttcttcttcacttatcaccatgggctccaagcatagtaggcggcgggcccaaatgcgcgcatgatcagccgcgcaacttacgaagacgctcgtgcatggccaccatcagcaccaagagcaccagcaaataccacgggtagagactgattgtcacatattgcgcgatgatgccgaacagtggcggcatgagcagtgagcccacataggcacaggccatctgcacgccgacgacggcctgcgatttgtcttcgccgaagtaggccggcgtcgagtggatgacgcacggataaatcggcgcgcacccgaagccgatgaccaccagcccaacgaccacgccaaggtggtgaggcaatggcacgaacatggtgaggatgccggcgagcaccagcacttggccgaggcgaatcatgaccgggtccttgaatcgcatggtcagaaagccggaaagcgcacgccccacggtgatgcctacatagaataggctggcccagctggcggcggtgatcttgtcgatgccgctgtgcatcaccatgtagctggaggcccacagacccgccgtggattcgatggcgcagtagcagaagaacatcacgaggatttccttggcaccgcgaatggtgagcacgccggccacgccgagcggtttgcgttcagcaacagacgccccttcagcattaccacatccctcggcattgccgtcagatgatgcggcaccatcggtcgattcgccgcccccagtcgtgccacgtttcttccacagcggcaggctcagcaccaggatgacggtcagcatcacctgcaggatcgcgatgtaccgatagccccacggccagccttggccttgagacagcgcatagcccatgatgtaggggccgaccgatgcgccgacgccccacatgcagtgcagccagctcatatgccggctttcgtagtgaatggctacgtagttattgagcgccgcatccacgccacccgcgccaaggccgtacggtatggcgatggccaacagcacccagtaattcggggcaacggagaaacctgccaaggccgccgcagtcaacgccaccgaaacggcggtgaccttgcctgccccgaatttcaatgtcattcggtccgaaagcagcgccgagacaatcgtgaacatggaaatcaccgcggagatgccgccagcccacgccaccggcacgttcagatcctggctcatggtgggccatgcggacccgagtagcgaatccggcaaccccagactgataaacgccacatagatgacggcaagcaacagactggccatgttccatctcccattcacagtacggcaccggttgtgataacgatgtcatcagtctatcgaatgactcatgggcaacacgcataaaacatatgacaacgtgctcacctcaaacgccaattacggaaattctcggtaagcacgatgtcattatcagcgacgtcttcgatcaggtatcgatcttggagcggtcgaaatcgtcggcgttgtcgacgatgaactgcttgcgcggcggcacgtcgtcgcccatcagcaggctgaagatctcggatgcctgggcggcgtcctccatgcggatgcggcgcagcatgcgcgtgcgcgggtccatggtggtgtccgccagctggtcggcatccatctcgcccagacccttgtatcgctggatgtcgtcgttgtaaccgatgtgcttcttgtcgaggtcggccagtttgccggccagctcgtcatcggaatacgtgtagatgtattcgcccttgtgcgagccggtcaacgcgatgcggtgcagcggcggtactgcggcatacacgtagccgtgttcgataagcggccgcatgtaccggtagaacagcgtcagcaacaggatacggatgtgcgcgccgtccacatcggcatcggtcatcatgatgatcttgtggtagcgcgactgttcgatgtcaaagctctggccggagccggcgcccaccacctggatgatggccgcgcattccttgttggagagcatctgcgtaatcgacgccttctgcacgttcagaatcttgcctcgaatcggcagcagcgcttggaaaccggcgttgcgggcggccttggcggtaccgagtgcggaatcaccctcgacgatgaacagttcggccacgtcgtcattgcccggctggcagtcggagagtttggccggcatcgaggcggattcgagcgcgttcttgcggcgcgtgacctccttggccttgcgcgactggatgcgtgcgtgcatttcgccgacgatcttctccagcacgcggccggattgttccttgtatccgcgtttggagccggtgatcatctcgccgaattgcttgtcggtgagccgggtgacgatcggcttgacctgcgcggtgccaagcacgtccttggtctggccttggaactgaggttcggccacgcgtgcggtgaccacggccacgagtccggcttggatgtcgtcgcgctccaccttcatggcggagtccttcatgttcaccttgagcttgcgggcgttgtcttccaccgccttgcgaatctgcttggtgatggcgttcatgaaaccgtccacgtgagtaccgccgccgggcgtctccacgatgttcacgaagctcatgattgtggtgtcgtagccgttgacccatcgcagggcgatgtccacgccgcaggtgcgttcgatttcctgggcgtgcagttcaccgccttcgcccacggcctgggtctcctccttataggtgccctcgccttggatgcgccagatgtcggagatcggctcgcctttggataggaagtcgacgaagtccttgacgccgccggtgtgcaggaattccacgacgcgcgggtgcgcgggctgctcgccgaacgcgccatcgacgacctggtcgccggccgtcagcgagaagtcctcctcggacaggctctcggtactgtcggcttgagcctcggtggagtcgtcgaagagttcggcatcgttggacgagacgtccaaagccggggcctggtcttgcgcaggttcgactgcgtcggcatcaatggcttcggcggtgtcagtcgccgtttccggtacgttttcgtcaacaatggtgattttgaggccgggcaccaggaagctggtctggcgcacgcggtcgatgagctgttcgtatgagaattcggcggttttgttgaaaatctccggatcataccagtagcgaatacgggtaccagtggttttgggagataccttgccgatgatttccagctcggtgggtcggttcttgcgagtgcgcttgaacggggaatcgggagacggattggccgggtcggcatccgtgtatacgccagggtgaccttggtggaaggtcatgtggtgcgtcttgccgtcacgatccacttcgacgtccagtcgggagctcagggcattgaccacggaggagcccacgccgtgcaggccaccgacggcgttataagacgagttgccgaacttggcaccggcatgcagtttggtcagtacgacctccacgccggacaggccggttttcggttccttatccaccggaatgcctcggccattgtccgcgacttccacggaaccgtcggtgtgcagggtgaccacgatatcgttgcagaagccggccaaggcctcatccacggagttatcgatgatctcccacaggcagtgcataagaccctgcgagtcggtggtgccgatgtacatgcccggacgcttgcgcaccgcatccaagccctcaagaacagctaggtccttggcgccgtattcttctttgggcatacagtcctattttctaataatttggctcccctcttcaggggagccttcaacggatggctccgtcgtctgacagcccactgggctgtcaaactcctcgcgcggtcggcctactaagcgggccgaccgtcattgatccaggaagtcgcgcagggtctgcgaacgggacgggtggcgcagcttggacatggtcttggactcgatctgacggatgcgttcacgggtcacgccatacacacggccgatgtcgtccagcgtcttcggctggccgtcttcaaggccatagcgcatcttgatgacgccggcctcacgcggagacagggtttccagcacctgcttgaactgttcctgcagcagggaaaaggccacggcgtcggacggagcgatggcgtcggtatcctcaatgaggtcgccgaactcggaatcgccatcctcgccaagcggggtgtgcagggaaatcggttcgcggccgtacttctgcacttcctgcaccttctcaaccggcatgtccagctcgcgggccagctcgtccggcgtaggttcacgccccagatcctgcagcatctggcgctgtacacgggacagcttgttaatcacttcaaccatgtgcacaggcacgcgaatggtgcgggcctgatcagccatggcacgggtgatggcctgacgaatccaccacgtggcgtaggtggagaacttgaagcccttcttccaatcgaacttctcgacggcacgaatcagaccaaggttgccttcctggatcaaatcaaggaagagcatgccacgacccgtgtaacgcttggcgagcgagaccacaagtcgcaggttggcttccagcagatggtccttagccttcttgccgtcggcggcggcccacttgagttcacgcttgcgcttgaactccatgccttcactttcggtgtcgagcaggtgctgggcgtacaggccggcctcgatgcgctcggacaggtcaacttcctgttcggcgttcagcaggctcacacggccgatctgcttcaggtagtccttgaccgggtcggcggttgcgccggccgcgatcacacgacgcttcggattgcccgaagggatgatgttctcttcctcatcatccgtgtcggagaccacgtaggcacccttttccttgggctgctcgggtgccttggacttggcttcttcctcgtcctcgtcgtcttccacatcgtcgtcgtcggcatcgtcctcatcgaggtcttcgtcgtcggcatcgccttcgtcaacgtcgtcaagatcctcgccgaggtcgtcaacatccaaatcgtcgtcgttgacctcggcatcgtcatcaagctcgtcatcgacctgagtgtcctcgtctttgacgagctcatcgtccttggccttcttcgcggttttcttcgcggcggacttgcgcgtggtctttttcgagggctctgcggacttggacttcttggcagaagtcttgcgcgcggtggtcgtagagctggccttcttcttggtctcggtctcctcgctggactcggctgtctgcttggttgccgtcgtttccttcgtggccaaaactgctccttctgatctctcgccgtgaagtgcatataccacacgggcccacttctggcaagggcaaatcgtcaactatgtgagtaaaccaccctccacggacgattattcccacatcgttgcccgacgtgttgccgatcaccacacgctttccttccgcgcatcgcgcataaaacctcggaaatccgccgtttctgttcattcagcccgagcaccatgccggtgccacgcctcgatcggcggctgagaatatcatcgccgccagcgaacaatcctcatcgagcagcaggcatcgcaaggcgaacaccattgctcgcggatcgcccagccaccataaggtgtaggcgattacggccaatggttgtatgcagtacggcaccggtgaggcttccgcgatatcgagcaacataccgatgccggcatggcaacgctccttatccggcatcatgccttcatcctcgaatgcgcaggtcagcagctcgcccattcgtgttctcgtacgtgccagatgcggtcgcgccgcgaattccatgagccatgacttggggcaacggctttcatcaataaccaacgagagaatcagcgcatcacgaatcgataaggtctcacgcatgcccaccgcaaacgcggccatcgtctctcggcctaggtcggtgttcccggcatcaagacaagacagccattcgtccaatggttcggccacccagtcggcattagcctgttgcgcgcctcgaagtcgtcgatcattgcgaaattcctgtgatctcgtctccaactcgtcaaagacaaaaggctccgtctgttcggcggcgtgccgtttggcgtgtcggttcttacgcggcttgtgtggcgtgttgttgttcatcatatcctccttgactaatggtgtgcaatctattggtgttgtggtgcgcgccgagccgggtagctcatgcgccgagggggtgtgtgcccactatggctgaaaacgccgtatgacgcaggaaaaaacgaccattgtggttctagcttcaaaacccttgattcccaacgttcttgtgttcttcaaaccctgtggataagttattaggcatgtgcacaactgctaacaaccgcgaaatcatcgagccacgcatcattcagttggtgcgggaactgactgccgcccccgccaccgatgaggttgccgacgccctgaaaccggtgatggaacaggttgtgggccaagccgcctcctccagccaaggaggcaaacgactgcgtgcgttgctcgcattggacgccttcgatattcttgccggcgacgtgactcctgatcggcgtgacgccatgatcgacctagcctgtgccattgaagtgtttcagacggccgcactggtgcatgacgacatcatcgacgaatccgatctgcgccggggcaagccttccgcacaccgtgccttggaacaggccgtacacagcggtgccataggccgtggcttgggcctgatgcttggcgatattctggccaccgcctgcattgaaatcacacgccggtccgccagccgtcttcccaacaccgatgccttgaacgaggcgtttcttaccatgcagcgcgaggtggagatcggccagatactggacttggccgtcgagatgaccccactgtccaatcccgaagctctggcgaacgcctcattgaacgtattccgctggaagacagccagttacaccaccatcgccccactgctgcttgcactgctggccgcaggagagagcccggatcaggccaggcattgcgcgttggccgtcggccggccgctcggactggcgttccaactggccgatgacctgttggatgtcgtcggatcaagccgcaataccgggaaacccgttggcggagacattcgagaaggcaaacgcacagtgctgttggctgatgctctgtctgcggcagatacggaggataaggccgatctgattgccatcttcgaagcggattgtcgcaacgacgaccaggtagcccgcaccattgaactgttcacgtcgaccggtgctcttgatcgatcccgcgagcgcatcgctgccctatggggtgagtcccgtaaggcgattgccggtcttgagctgaattccgaagcgcagcgccgtctgaccgaggcttgtgcgcgattcgtccccgaatccttgcgatagtccacaatgcgagccgccgggtcatgagaccatgaacaccggtgaaaacccgtgaaaactatgcgccgatgctccggccgcgtaaccggggccatgtacactgaacatgtttagtcgtgattaaaggaatcgtacgatacaacatgagtgagaacgagcccgcgcagatgattgagggacgctaccgcatcgtgcgcaatatcgccgagggtggtatggccaccgtgtatgaggccatcgatgagcgtctggggcgcaccgtggcgattaaggtcatgcacacacaactcgccaaaggcccgcatcgggagcagttcgtcgaacggttccgccgcgaggccaattcggccgcgtccatcgccaacccgcacatcgttcaggtgtatgacaccggcgagttcaatggacttgattttctggtcatggaatatgtgcatggcgtcaatctgcggcatgagatgaacgcccaaggcacattctccgtacgtgagacgctgcgcgtggtcgcggagacgctggatggtctggcttccgcacatcgcgccggcgtggttcaccgtgacatcaagcccgagaacattttgatcaatgatcgcggccatgtgcagatcactgatttcggtctggccaaggccgccagccaggccacattgagctccaccggcatgctattgggcaccgccgcttatctggctcccgaaatgatcgagaacaatcaggccaccgcgcaaggcgacctgtattcggtgggcatcatggcatgggagatgctgaccggcaaggtgccgttcgattcggataatccggtgacgcttgtcttcaagcatgttcatgaggacgtgccgtccgtggccacggtctgtcagggcattgatccgtccgtggcggcgttcatcgcccatctgaccgcgcgtcaggtggatgcccgccccgccgatggcgcggcagcagctgaggaattgagccagttggccgccaaattgccgctggaggcgtggcaataccgtttgcatgccgaacccatcggaggtgatcataccgatgccaccgctgcagcgctggtaggcaatatcgccgagcaggccccgctgaccggcgtacctgccggtgcagcaacgttcgagccgtccgtaccggcgtttttggccgatgatgtcgcaagcaataccgccgataccggtggcgccgcagacgtcaatcctccggctcctccggtcgcccccaccacggcacttgattcgtcgacgccagccgatgcttcggctccccataagacgcaaatcatggcacagtccggcagcgagacacaagtgctgcctcaggccggcgatgccttcacccgaacgcttgccttttccgatgagccggacgtcgcttccaacggcaccgggccaaagaagcagcgcagcaaaaaaccgcttatcatcgtactggtgatcgtgctggtactggctgcaatcggcggaaccgccggctggtggtggtttgccggaccgggcagctattggagtgtgcccaagccggatgacgtgacctgcgatgcgaatgcaagcaccgaatgctcgttggccggcgcggattgggccacgtatgagagcacgttgaaggctctcggcatcccctacaagacgcacaaggaatacagcgacgacgtggcggaaggcaagatcatctcttcttccgtgaacaagaccaaggccgttgtgaacagccgcataagcaagcgagccaatcaggagcttacggtggtggtgtccaagggcgtgcggatgaccaccatcccgaaggatattctcgacgcgaattcggccaatggcaaggacccgttgaacgcgctcaagaaggccggcttcgataatgtcaagcatgacgagtcgaaggatgagtattcgatggacacgccgcagggtgtggcattgacgatctcccctggtcccggtaccacggccaagcacaacgatgaggtgacggttactttgagcaagggaccgatgccggtgaccatgcctaacatcgtcggtaagacccaggatgagatgcaagccgcgctcggcgagttgaagctcacggccaatgtcaccgaacagtacgatgacaaggtcgaggccggtcaagtcatttccgcgtctcaggaagccggagcccagctgaagtggggcgatagcgtggacgtggtgatttccaagggtccggagatggcgacgataccgtccggccttgtcggcaaacaggaaagcgccgtaaccaagacacttgaaggtctcgggttcaaggtgaaaaccgacaaggtgctcggtggcctgttcggcacggtacgtaccgtgaaaagtggcgatacggacctatccaacggcggcaagattcgcttgcgcaatgccaacggcaaccccaccgtcatcaccctcaccatcgtgtgagatttgaatgaggctccctctgtcttcagacgagggagcctcatttgttaattacttttcggcttcttcagcggcctgctgggccttgagctcggccttgaccttctgggcgtattcgttcacgaattcctgaccgctcattttctggattgcggtggaaacacgatcggtcagcgaacgcaaatcatcatgtgtaatttcatcagccggcttcttcgcaacctcaatcggcttgccatacaacaccttggtcttgcccttcttgggaatcgacgtgccaatcggctgcagcttgtccgagccgatgatggcggtcggaacaatcgggcaaccagtctcgagcgcaagtcgtgcggcaccggtgtgtcccttgtacagtcgaccgtccgggctgcgcgtgccttcaatgtggataccgaacaggtgcccatcctcgataatctcgcgtgcatgctcgagtgcgccaagcgacttgctgccaccggaacgatcaaccgggaacacgcccacggacgtgaaccaccacttcttgaacttgcccttcaatcccttgccctcgaagtattcggctttgcccatgaagtgcaccatgcgcgggcaggtaatcggaatcaaagcatcgtcaatcaccgccagatggttggctgcgataatcgcgccaccctctcgaggcacgttattcagtccgctgacagcagggctcaaacgatgatgagcaatagggccgagacctttgacgaagaaccagtagagcacttggcattcctcccgcagacgaactagccattggccggtcgcctgattagagtgacagttatgactgagaaccagaatagcaatgccgacggagagcggccaacccccacgccgggcaacggacaggattccgatacttcgtccaagtcgtcgactcccggtgccgccggaccggccacgaatggtgccgatacaccgcaatcgcatgacatgaacgatttggatgcggcgtgggccgcgttcgaagccgagcatcaggccgacttgcatgacgtggcttcctccaggcaggccaaaaagttcgagaagcaggccaagaaacgcgagaaggaagcactgctttccgtagatgacttggatatcggctcgttcaccgatgatgctcgcccgagccgtggcggcaaaaaaggcaagcagtcaggcccccgtgatttcaccgtctccagctggctggataccgataatgtgatggacgcctatgatgatggcggcttcactcccccgaaccctgatcttggtccggtcaaagcatctacggtactgctgacggcgttgctcatcatcggtctcgcaggcgaaacggtgatgatattcgttcccggcttgaacgcgattcctctcttaggcgcgctgctcaatattctcttcgggctgggcgtcattttgggtctgggcggattggtggccaaaatcctcaaccgcaaagaccgccccggtgatcagggtggctattacgacgacggcgcgagggtgtagttcgcgtaggttgtgtagtccttggctcccctctctgaggccgagccgttaagcaaacagcccggtgggctgtttgtaggcgaggtgtgagcgatagcgaaccaatgtatcacaggcgtagctcgtccgtaattgcggccgagccaagataggtcacgaattgaagtcgatggactcctgcaactcgaaatagttgataatgaaggaaaggtaaacatattcgagcaaacccattccatatcacgccttggacttggcggtttcgatccacttgttgaacagggcttcagccttgccggagtcgacagcatcctcggccagcttgtaggcctcggcgaagcgctcggccagtgtgccgttgccgaccagattgccgtcagccacgatggcggaggcagcgttgagcagcgcggtggtgcgggacgtaatgtccttgccggccaggaagtccttaaatgcgttggcgttgacgtccggcacgccgcccttgagctggtcgacggtaatcttggcgagacccagatccacggtcgggtcgaactcggtttcggtgaccttgccgtcgcgaatctcccagacggaaaccgggccggtgggggcgagctcatccatgccctcatgcgaagtgtagaccaagccggactgaccacggctggcgtagacggcagccatgatcgggctcaccttgcggttggcgcagccgatggccacgtgtgccgggttggcggggttggtcaacggtcccaggatgttgaagacgcacggaatgccgagcgcggcacgaatcgggcccacgaagcgcatggccgggtggaaggtgcgggcgaacgcgaaggtgatgcccacctcgtcgcccacttcgccgacggcctccggcttcaaatccagcggcaggccgaggtcttcgagcacatcggcggcaccgcacttcgaggatgcagcgcggttgccgtgcttgacgatcttcacgccggctgcagcggcggccacggagcccatggtggacaggttcacggtggcgaagccgtcaccaccggtgcccacgatgtcggtggtcccaccggaaacgttcagcggcacggcgtgggagaccatggccttggcggcaccacgcacctcgtcggcggtcagtcccagctgctgctgcatagcgagcgcggcacccacggcgaccggattggcgttaccttgcatcaggtcgtccacgaaccactccgattcctcagcagtaaggtggtctcccccgaccagcttggtgagaatcgacttccatgtgatctcggccatgatgccctccttggcgtttcctacgccgtgtgatgtatgttcgccgctcattgtaatggttcgtcatttcaaggccctgaatcttccatattgcaaaatatggcgctattgctgttttcgtggatgtcggttcgtcgtcgagccgttggtttcgtaagcgtgaggggcgttcccgcgtattctgttttccgaccagagaaatgaatcacgaagaacgcctgggcaaaagcccattcaccggattgccgaacgtcaaaggcacggttgcagaggatgcgcggatcacggattcgccgccgcgttccgaacccgtgctcgagatccgggtgcgtccacgtgcgggtatgctccgatgctcccgatgcggaaggaggcgccgcgggcatgaccagggcggcggcgtgcggcgtcgtggtcgcttccgtgccgtgggccgagccgggcagccggtccacacgcgatttcgaatcggaacgcgcgtggccgatgagcgtcgcgaaccagaagaccgtaagcggttttccgcacgtcgcgtggcgcgccgccggaagacgccgcccatagggtcgccgaacggttgaaagcgtcgatgccgtctccgttcggcggcctcacgtcgatcggcgtggacgagaccggctaccgcaaaggccacacgtgcatcaccgtcgtcgtcgaccacgaacggcatcgggcgatatgggcgcacgacgggtacggcagggacgtgttcggcctgttcttccaaacgttgacgcccgaacagcgcgcctccatcagggtcgtcgccggggacggggcccggtggatcgactcatgcgtgcatgagtggtgcccgaacgccgaacgcgcgcccgacgggttccacatcgtcagttggacgagcgacgcgcccgacaaagtcaggagacacccgtggaaccaggcgcgccgcgacggggacgagaaatccgtcaagcgcatgcgcggcgtcagatacaccgtcctgaagaaccccggcaagctgaccgacagacggtccgaggcgtccgggaacctgcgggacacggaccccaagggccggccctaccgttcatgacggctcagggaacccctccggacgatgcccaaacgaccggccgac

SEQ ID NO: 3844 - DNA, 13734 bp, Unknown
  R35_2m  MAG No. k141_12386
ccgtggccgaatagtccgaaggaggtgggtgatgtctgcgcacaagtacgaactgatgttcatcgccgatcctgagctggatgagcgcggtctgaagaagctgaccgagcagtatctggaactcgtcaccaaggaaggcggctctttcgatgagcccgattactggggccgtcgcaagctcgcctatgagattgccggtaagaccgaaggcaactacgtcgtggtgaagtacaccgccgagcccgctaccagcgatgagctcgaccgtgttctgaacctcaacgaatccgtgatccgtacgaagatccttcgtaagggctgaatcaagcgtttagtcagctgaacagctggtattcaaggtaagtaagaaggaccgttatggcaggcgaaaccgtcatcaccatcgtgggcaacctcactgcggaccccgagctgcgcactattggcagcggcgcgaccgtggcgagcttcacgattgcttccaccccgcgaacctggaatcgtcagaccaaccagttcgaggatggtcaggcgctgttcatgaggtgctccgcttggcgtgacctggccgaccactgcgcccagtccctgaagaagggcatgcgcgtgattgccaccggccgcctccagcagcgttcctatcaggcacaggatggttcccagcgaaccgtcgtggagatgcagctcgatgaaatcgggccctccctgcgctacgccaccgcacaggtgacccgccagtcgtccggtcagggcggcttccaaggtcgttccggtggtttccagagtggtcagcaacccaatcagggctatggcaaccagggtggccaaggtggttatgccggtggccagggcggttacaacggtggctatcagggtggtggcgctggatactcccagcagcctgccgctcccgccaacccgtccgctcctgcggccgacccgtggagcaatgccggtgcatctgatgccggtagcttctccacgttcggcgcttcctccgatttcggcggcggcgacgattccgacccggagttctgatcagtacttatcctccccgctgccagcagcaatcaatatcaagatttataaggagaacatcatgtcacgtaagaggccgcaaccgccggtcaagccgttcaagaagaagccgaacccgctgaaggccgccaaggtcaccgagatcgattacaaggacgtcgcgctgctgcgcaagttcatttccgatcgcggcaagatccgttcccgtcgtatcaccggcgtgaccgtgcaggagcagcgtgagctgtccaaggcgatcaagaacgcccgcgagatggccctgctgccgtacgccacctcgggtcgctgagttagggaggctttgaacaatggctgaaaccaaggttattctcaccaagaccgtgtccaacctgggccactccggtgacgttgtcgacgtgaaggccggctacgcccgcaactacctgttcccgcagggcctcgctttcgcgtggaccaagggtgctgaggctcagatcaccgctatgaagcgcgctcgtctggccaaggccgtcgccacccgcgaggacgccgtcgccgccaaggccgccatcgagggcaccaccgtcgagatcgccgccaaggtgtccgagtccggcaagctgttcggtggtatctccaacgaggccatcgccatcgctctgtccgacaaggccgcggtgaacccgaaggccatcgaggtcgagaccatcaagaccaccggcgatttccccgccaaggtggccctccacccggagatcaccgcttccttcttcgtgaaggtcgtggccgagtgagtcattccggcctagtgctggaatcacacagaccaagagtctgagcttaagcatcatcccccgtgcggttcgcgccgcatgggggatttttgtattagcaaaaacgccggaaatagacgcgacacgccgagagttgcattcgcttcaaatctgagtatatttatcacctgttgcaaggaacacttcaacatctaaccaagcccctgtagctcagttggttagagcagctgactcttaatcagcgtgtccagggttcgaatccctgcgggggcacagacaaccggaatcgaaagattccggttttttgttttttccagcatcagtccgtagctggtgcggaaaggccgtcttcgcgcgtgacggccggacgtgtaaggagcggcgtcatgtctcagatattcgcgttcaccgtatccgaccccgaaggcatgcacgcccgcccagctggccggttggttgccaaagcgcgggaatatgagtcgaacatcaccgttgcctacggcggcaaatccgtggatgccaagcgtatcttcggtgttatgggacttgatgttcaacaaggtgacgaggttacggttcgggtgcagggcaacgatgaagctgtcgctgccgcagagttcgagcgattcctcaaggagcacctgtaatgagaacgatacagggcgtcggcgtatccgctggcattgctatcggcacggtccgcgtgctcgccgccgccgatcatgctgtagaacgccgcgtaatcgacgatccgcaggctgagatggatcgattccgcgcggcccgtgacatggccgtcgctcagctcaagcaactgcgtgacaacgtcgccgctgagttcggcgaaaacaaggccgagctgttcgacgcccatcggcttatgctccaggacccggactatgcgggatgcgtcgaaggtttgattgcgcaagacaaggtgaacgccgaatttgcggtgaagagcgtcgccgaacagttcgccgccatgttcgctgcgatggatagctcgaccatgcaggctcgagccgctgatgtcgaggatgtttctcgccgcgtgatgaacgtgctgcaaggcaaacgcgatagcacggcgcaggatggcagtatacaaggcgatgctgtgcagaacggtactgtgcagaacggcgaaagccacatcatcttcgcccaagatcttgctcccagcgagaccgcgcagctcgaccgcgctaaggttttgggcctcgtgaccgccaagggctcagcgaactcgcacaccgcgattctggcgcgcacgatgggcctgcccgccatcaccggtatcggcgacgccttcgacccgactgatgacggtcacgttgccgtaatcgacggcgccagcggtgcggtgttcgtcgacccggacgaggccacgctgaccgagtgccagcgcaggaaggccgaagctgaggaacacctgagcctactacggaagctcaaaggcaagcccaccgaaaccaagtccggtcagcgggtccgcctgtacgccaacatcagccgtccctctgacgtagccgccgtgctggccaacgatgctgagggcatcggcttgttccgcagtgagttcctgtatctggaacgcgaggactggccgaccgaggaatttcagttcgatgcatacagacaagtcgcacaggagatgggcgaccgtccggtcatcatccgcacactcgacatcggcgcggacaaacaggtcgactacttcaatctggaccacgaggataaccccgcgcttggttaccgggcaatccgcatctgcctgacccgcccggagattttcaaagtccagttacgcgcattgttgcgcgcctcagcatacggcaatatcgccattatgctgcccatgatcacctcggtgcaggaggtgcgcgacgccaagcggattcttgaagaagccaaaagcgagctgcgcggcgagcacaccgacttcaacgagagtatccagatcggcgtcatgatcgagacgcctgcgtcggtcatcatggccgacgagctggccgccgaagtcgatttcttctccatcggcaccaacgacctgacccagtacacgctggcctgtgaccgtcagaccccgagcctcgaacgctttgccgacccgcattcaccagctgtgctgcgcatgatccagatgactatcgaggctgcccatcgtcatggcatctggtgcggcatctgcggcgagcttggcgcagacctgagcctgaccgatacgttcctgtgcctgggaatcgacgaactgtccgtctcgcccaccagcgtcctacccctgcgcaacgtcattcgcaaccactgagagtcaaggtcgctttggctgattccggtggctttttgggcattgcattcggctggacattcgacatcgcatcctgccggcatttcgtcgtggggcaaagtgtacaatcgccacgtttgctttcgcgcccagcgtaaatcgcgtcgccggctccgcgaacggatttccaatcacacagaatgccgtgaacagtcagccatgcctgttgcgcggcgaagagaaaagaagaagcagtggaatactctctctttaccaagctggccgccgagttcttcggcaccgccattctgatgatcttcggcaacggctccgtggccaacgtcgagctcaagaacaccaagggtcaccacgccggctggttgaacatcgccatgggctacggcttcggcgtcatgttcccggtgcttatgttcggtagcgtctccggcgcgcacatcaacccggccatgaccatcgcccaggccgtcaacggcctgttcccgtggagcgacgtgctgccgtacatcgtcgcccagctgctcggcgccctgctcggccagttcatcgtctacctgacctactacccgcactacaaggagaccgaggacgccgaagccattctcggcaccttctgcaccaccgacgcggacaaccagaaggtcaactacttcctcaacgagatgttcggcaccctggtgctcgtcttcggcgccctgtgctgcctgtccctggcttggggcaagcaggattacgccgccgcctccatcgtcgtcggcttcattgtgtggggcctcgtgacctccatgggtggcccgaccggccctggcctgaacccggctcgcgacctcatgccgcgtctgctgcacgccattctgccgatcccgcacaagggctcctcccgctggggcgaggcctggatcccggtcgtggccccgatcatcggcgccatcatcggcgcttggctgtacgtgttcttcttcgccagctgattcgttgattgattcatgcatgcaaatggcctccgctcgttttgggcggaggccattgtcgttgaatcaggtaaacgcagagactactgctccaggaacacctgcggggccttcatgaagttcgtggcgcagcgttcgccgcagaagtaatagggcttgccctcatactcgcgcgtgatcgcgtcggcattcaccgccacggtcatgccgcacaccgggtcggtggcggtttcgccgtcggtcggggtgacgtggtgcatgtgcattcccatatccatagtgttctccttgttggttggattattggattggtcggatacgtgattggttggattcagcgtggtgcgatcgtcgatgatgatggtcggctcgtgaggcgcgttggatgtggtggagccggtgatgttggcggcgttggctgattcggccgatccggctgattcgatatccgccgtgctgttgcccgagccagcggtgctatcggcagcacccacgttgatattcgccccatgcagcctgttcgcgttcagcaccaggcacaccgagctcaacgccatcgccagacccgcgatcatcgggctcaacagccagccggtgaacgggtagagtgcgccggcggccaccggaatgccgatgacgttgtagccgaacgcccaccccagattctcgcggatgttgcgcatcgtggcgttggacaggttgatggtcttgatgatgccgcgcaagtcgccgctcatcaaggtcacgtccgccgactgcatcgccacgtccgtgccggtgccgatggcgatgccgagatccgcctgggccagcgcgggggcgtcgttgatgccgtcgcccaccatcgcaatcagagtgcgggattgcgcggccgtgcgggaggcgccatccgcggacttggcggcggcctcgtcgcgttcgcgctgcagtttggcgatccagtaggccttgccgtccggcttgacctcgcagatcaccgtgtcgatgccgacttcgcgggcgatgcgcccggctacctcggccttgtcgcccgatagcatcaccgtgcggatgccgcgtgcgcgcaacgccgcgatggcctcgcgcgagccttccttgactgtgtcctgctcgtagctcggcttgtcccagtcggcggccgcgtccaccacgccgcgcgtgatggtgccggtcttgtcgaacaccacggtgccgatgcgacgcgcctgttccagcgccttggcgctggtgaccagcacgccgttggtggcgcccaagcccagtgagaccgtcaccgacagcggcgtggccagtcccagcgcgcacgggcaggcgatgatcagcacgctgaccgcggtgaccagcgcatgcgccagttgcggcaccgggcccagtgacacccagatggcgaacgtccagatggcgatgatcatcaccgccggcacgaaataccgggcgatcttatcggccagctgctgcaccggcgccttggtcgcctgggcgcgggccaccatcgccgcgatctgcgagagtaccgtgtccgcgccgacttgggtggcgcgcatcacgcagtcgcccttgagcagcacggtggccccggttaccggatcgccgacggttttggaaaccggcttggattcgccggtgatcatcgattcgtcgatatgcgcctcgccggccacgatgatgccgtctgtgggcacgcgctcgccgttcttgacgaccagcaggtcgccggtggcgatggcgtcgatgtcggtgtccgtgaaatacgccggattgcgccattcgatgccgtccacatggtctgcggaagtggcgttgagtttgtgcgcggtacgcgggcgcagtttgatgagcgactgcaccgccttgccggtgccttcgcgggccttggcttccagaaggcgaccgaccagcaccaaggtgatgaccacgccaaccgattcgaaatacggttcgcgcgagccttccgggaacacccacggggcgatgcaggtcaccagcgaatacaggtaggcggccgaagtgcccagtgagaccagcgagttcatgtcgggggagcgatgcgccaacgcggggaagccgaccgtgtggatcggacgcccgcagtagaacatcaccggcgtgatcaggatggcctgcaaccacgggttcaccatccaatgcggcaccagcgtgggattggccatatgcagcatggtgacggcgaataccggcaacgtcagtaccgcgcccacaatcaccagcttcgtcagcgccttgatctcattggcgcgttcagccgcctctcgccgatcggcctccgccgcatccacggcggtaggtgccgtatacgaagcatcaggatgaggaaggggcgtgttctcatccgagccgtcctctccctcaaccttcaacatcccatgcaccatattcatgccgcacgcaaacggatactcgcccggcggcaacgccggcagttccacgtcggtggtggcgttgcccggcagcatggcgtcaagtcccagatcagcaaacaccacatgcgaggtgcattcgccggtctcctgccggtcgaaggctagtgtgatcggcgtacccgcacgcatgctcaccacggcgggggagtacccgcccttgacagtgattgttgcggattggcgttcgccggaagcgtccatggccccggccgttgccttctgcgttccgaagaagaatcgcaggaccagccatgtcaatgcggccgccactatcagcgccgcgacggtcgagaagatgctgaactccataactgttccttcccactcctgatgtactgaacaacagtgtataccctatacccctagagggtatataatggggtgtgttcagctgacggataagtatcagggggtttgcgatgcatggttatgacgaagacaaggccaaggtcatcgcacgattacgccgtatcgaagggcaggtgcgcgccatcacgcagatggtggaggatgacaaatactgcatcgatattctgacgcagatttcggcgtcgaattcggcgctgaaatccgtggcgttattgctgctggacgatcatctcaaccattgcgtgcggcaggcgtcggtccagggcggcgaggtggccgatgaaaaacttgcggaggcttccgcggccatcgcacgtctcgtcaaatcgtgacgagttctgccgcatgatgacgcgcgctggcaaatcatgaaaggccgtctgacgctcggatacgacacagcataataacggttgatgctcgactgtgataaggccaagcgtccaatgtgggctgctgagcgtccgtttaacggcttgaaatcgtcgagttcggtaaaaatttaccgtcattcaccatcgatgacatactgggtaccatgtttgagcaaataggaaccgtgattatcgtcatcgtcgtgctagtggttggtgcagggcttggcctcttcgccggcttcgtgctggggcgccataagggtcaggagatggctcgaggcgtcaaaagcgaggagctggaggaggccaagacctcgctggagaatgcgcgattcgagaatgctgagctcagtgctcgcaatgctgccgcacaggctcagattgaaggcgtgaaccagcaattggctttcgccaagtcacaacttgcccaggcgcagcaggctgagcagattcgcattcagcaggaacgtgagcgtgcagctgcggaggcggaacggaagcgtcaggcggatgctcgggacgccgaggccaagcgtgctgaacaggaagcacgtttgaaagaacagagcaaggtgctcgaggcgcttgcgccagtggccaaaaatcttgataccttgcagaacaaggtcacgcagatcgaagagggccgcaagagggaaatgggcgcattgggagcccaactcaaggggctcaacgaccagcaggcccgtttggacaaggaaaccagttccctgtccgccgcattgcgcaacaacaaggtgcgtggcgcgtggggcgaggcccagctcaagaacattgtcgagtccgccggattgctggaacatgtcgatttcgacattcaggtggtggtcacggatgccgatggacgtacgttgcgcccggatatgatcgtgcatctgccgggaggcaagaccattccgattgatgccaaagtgccttatgccgattaccagcgtgcctgcgagatcccggacaccgccagccccgaggatattgcccgccgcgatgatttgctgcgagcccatgccaaggcgttgcgcgagcatgtacgtgctctcggcgaaaaggcctattggaatgcctttgatgtggcacccgattttgtggtggccttcatccccaatgaggcactattgcaggccgcgctcgaagccgaccccacactgatggatgatgcgttctctcgcaaagtggcgctcacctcgccggtcacgctgtgggccgtgctgaaatccgtggcctatgcctggcagcagcagtcgctcaccgatgacgccaagcagctgttcgatttgtcccgagaactttacgaacggttctccacgttgggtgattatgccatcaaattgggcacccagatcaccaagacagtcagcgcttacaacaagttcgcgtccagcttggaacgccgtgtgttgcccaccgctcgcaagctgcaaaaaatcgaaccgaccaagatcatcgaggaagtaccgatcatcgaatcagacaaaggcaatgtgagcgaactgtccgcccctgaagtggtgccggccgatgaaggtgatactcatctgactgcctcaggcgatagtctggagtcatgactgaatctggattccgccccactggtaccccggacctcgccgtcgcgaagagccacaatgactttgccatgctggagccgcgtgagcagctagccaccttgctgagggagcatgtggtgggccgtccgttctccgaacttgccgcggtgactttcgaccaccatgccgccaccgtcatgggccatgtactgattgacgctttggaagatgcgggctattcggttgatgacttcgatgctgttggtgccttgaccgcagcatctgtgcccatggtgtccgccatgatccaggccgccgcctctcgtggcgaggacctagacggattcgtgatggacttcgtctacccgtccatcaagggcccctccatcgaaggccgccgtgtggtgctgttggatgcttggctgtccgaaaagtcgtacgtgcagaccagctcgctggtcaccctgcgcaacggcaatgagctgagcctcgactttggcatagtggagcagctgggtgccaaggtcgtggccatcgcctcgctggtcggtggcggtgccaaagacatcaatgtggtcaacccctccaccggcgacgagcaaacgctccccttcatccaggtcttcgacgaatccgaactgcggtaaatccacctttgacttccctcgcataaagtcagccgggctgagccgcgaagttgactaagaggaaccggtgaatagcgttatcgaggagaaagattgcacgcacccaaccagatttctttggctgccaaagcttcaggtgaaccggaattccgtgaaatcggccttgggccgtggtctgagacccatcctggcgagcctcgtcccgacgatccgacttctccgaattatgacggtcgtttcgactcggtgctgttgaatgacggcgaccgccgcaacgtattggaccgttaccgctactggaccgtcgctgccattaaggccgatcttgacgctcgagggcgtcacgacttcgaagttgcggtggaaaactggacccacgatttcaacatcggttccatggtccgcaccgccaacgccttccaggccaagcgcgtacacattgtcggtccacataagtggaatcgcaagggcgcgttgatgaccgaactgtaccagcacgtcgaacaccacccctccatcgccgaactggtggaaagctggcatcatcgcatcgccggtgaaatcgcctatgaacgagccaaggccggtgccgccgccatccatgcgcatgatgtggctgtggatggagacaacaagcaccttcatgagctgctggccgaaatcgatgcttgtgatgcgcgcatcaaggagcttcaagccgcccgcgtcatcgccctcgatatcattcccggcgcagtgccgatggaaacctataccttccccaagcggtgcctgctgctcttcggtgcggaaggccccggattgagcgagaaggccctcgaattggccgacgatgtggtctacatctctcaattcggttccgtgcgctccattaatgcaggcgctgcggcggccgtggccatgcacgcatggattgcccaacacgccgtatcaggcgtgtagccatgcgccgacaatcctgccgcatctgcccaatatgggccacattagaggcatgatctacgccaccaaatccatcgccgcggcattaattcgcatttgccgccggcatcgtcggcatcctgctcgccgcaggcatcagcagctccgcgcagtccacactggccgaagccgttaaaccggactactggattcccgaatggtggcagtccggcctgattctcatcgcctgggctgccgccgcatggatcggcggtctcagcatcaccggaaaagcggatatcagatatcaaataacgcgggttactgctttggcagttctgccggttcggccatggtcctggcagtttgtcatggctatggctttggcggttctgcagtgaccatggttctggtgactctgaccccatggatttgaccaccgtggttcactgcgcttaaccagctcccatcactgttccagcatgaggtatgccggctgcccgcagcttattgagtaaaggatgttgttgcatcacctcctcataggtgaatcggacaatggtgtcgactttggcccggtacagtgccgtctcccgttctttctccgcctgaactgcaccacgaacacccttgcggtcattcatatccgggttcacatatttttcatagccatcgaattcgcccacgataagccgattctcaggtagccgccagaggaaatccacgcgatacagagcaccggtttgcgggtcggtgatgttttgttgcagttctggggctaataggccgcctgcgatgatggtgcctcgtccaagtgactcgccaccattctcactcgccggattggcataatgcagtaggcggaatatcggcgtgcaatcacgtcgcatagtgctgcacacattcagaatgtccgtgatggcgacgccgttgcgcagcgccgaatcgataatgggcagtgcaaatcggaagtcgacggacagcccgcaatccaccaccgttctggctttgctggtcaccgggagtccattggcatattctggcgtgctgcttgacgtgaagatgcgtttgacctttgcactgctggcgttggggcctcgtgatgttgtggcgagagtgatggtgccagcatgaagatgccattggtgttcaaaatcgtggatggccgctgccgtgaccccggcgaacacccaatccggatgtctgttatgaagagttcgtgcaatatgtctgatacgttcgtcgggttgcagcgaatcccagtattccgaagcggcgtacatgttggggaatacacgtttgagttcgcgcgcctgcacgcgccgagccagcgccgagcggtgtgccttggttgttccataagcgcactgttgcgttgcttcagccttcgtgatgagtatgtccactgctttgtgatgtttcatgattcgacggtatgccaatggtgaacacggtgtctatctgtctggggttatgtggttctagcttcggtgcctagatgtgtgtttttgcctgattatcaggcatctgaccgtattggactgattatgtggattcttttgggtgggtatgcaaaatgtggataactggcgaggtgcgcagggcgattgtcgttcatatgttcgatgtaggtgtgtttgggctcattgtgagcttattagggtggccatgcagatacttcagtggggcacatttgcggttgggccgtggcgttgcctcgctgcggggcgtctcagcggggcgttttattggttggaccgcggttttgttttgctgggatggctgagcggggcgtttcatcggtcagctcgcggttttgctctgctgcgagtcgtctcagtaaggtgaacttgcggtccggcaacggttttgccccgccgaagaagccagcagcggggcaaatgctcgaccggcttgagcttctgattcgctgaagggctccagtaggcgggaaaatgaggcttcccgacaactgcgtgtcacatacggctcatatagttatggccatgccaacattttcacgtgaagaaatcgtgcatttgggcgatctggcccgaatcgcgctcaccgatgaggaaatcacccgtctgcagggcgaactgaacgtcatcgcagactccatcaacaaggtccaggaagtcgcctccgacgatgtgccgccgaccgccaacccggttcctctggaagcctacctgcgcccggacgtcgccgaaaccccgctcacgcaggaagaggcgctcgccggtggcccgaagaccgaggccggcatgttcgtggcaccgcgaatcctgggaagcgaggagtaatcgatgagcaacgaa

SEQ ID NO: 3845 - DNA, 19847 bp, Unknown
  R35_2m  MAG No. k141_12613
cgaatggtcctgttgcgcggtgttcacctgttccgtgcgctgcgtgcgaggttctttcatgcgaatatcacctgccatatcgccgtcatattagcaccgtacgcatgatagtggtcgagataatatgcgagttccccgcataccgatggtacacgtcgatatgcggggaactttgcacatggttgcctgggccgatggcgaatcggtgggccagcatctcggtggccacttcctccttgctcatggatgccgggtaatacgtgggccagttgtccatttccttgagggtttcttcctgtcgttgaagtgacgttgcacggtggcggcggtggcagaaccggccccggccttgtccgcgtagacggcgttgatggcttcggcggccttcagcacggcttccgggctgaaccacaggtgcgggttcgtagcaccatggtggtgatggcggccttcttcgccctcggcgtggtcgtgggaatgctcgtgctcgtcggtggcggtgacgcccatgaggccgcccacgttcacgatggtctggcgtttcttgtcaagctgcgccttttccgcccagccgtcgtagccggcgccgttgagcaccacgatgtctgccttggcgagcttggccagatcggatgcggtggcctcataaaacggcggttcgccccggcaggtgacggcatacggaaggaaatgggagaaagaacgtacgccgccggcctgtggagcggaccgtcgagttgttgttacgagacttgatggattgcggaatccacgatgttggttatggcttcatatacccctttcgtacggctgcggccagattctgcggaacctgaaccacttcgccttcaggcgttctgaccgtggccagctgaggcaccttggccttccagttggctcggcgcgaatgcgtgtttgctcgggacgccttgtacttgggcagtgccatcagccttgcctcgccttccagtgggggttcttcttgttgattacatacagatggccgcgccggcggacgacataggagccatccttgcgggccaatgagcggaccgatgccttgaccttcatgtccgttcctttcttcttgtcttacggtctttgcggaatgtgcggcgaatcacttgcgcccgtaacgagcgttgaacttctgcacctgaccggcggcgtcgatcaccacattcttgccggtgtagaacgggtggctgtagctggacacctccacattgacgagcgggtaggtgttgccgtcctcccagtcgatggtcggcaggtttacggccttggccaccagtgtggacttggtgaggaagtacttgtcggcggagcggtcatagaagaccacggggccgtattcggggtggatgccctcttgcatggttatggacctttggttgtgtggtgttgtgtggtgatatggatgagaatggcgtcggacgcgcgggtggaatccggtgaattgagatggcctgagacggcctgacggccggttgtgccggcccgatcaccagctggatttcaccacgccgggcagtttgcccttgtgtgccttctcacgcagattgatacgtgacaggccgaacttgcggttgtaggcgcgcgggcggccgtcgatggaatcgcggttgcgcagacgggtggggctggcgtcgcgggggagggcctgcagcttgcgcatcgcctcggcgcgttcttcggtggtcagatgagggttgacgctgtcgcgcttgtattcggcgcggcgttcggcatacttggcgaccatgcgttcgcgctgcaattgtcggttgatcttactggttttggccatgtccggctccttgataaggctccggggcgcgggaatcgcgccggccggagctgggacgagtgcattcgttcattgggcgcatgccgcaaggttcggaagatgagttcatgaaatggtgatagaggaaaccgccggaatgccaacgaggaaacgatttcggcgggtgcttaagcctcttcctcgcctcgcgactggtgtccaatgaacgaacagatggattagcgggtctctcggaagagcacccgtttgcggactaccggatcgaacttggtgagctcaagacgatccggcgtattacgacgattcttggtggtggtgtaggtgaatccggtgccggccgtggacttcagggtgatgaccgggcggattgcggaggatttgcttgccatgagtggtgctttctatgtgtgggtgtcacgctgttatgtcgcgtacgtcgcggtgccatgtgggtgatgcagctcgttagcgcggtttgttgcgcggttacgcgccggcacagtggcgggcctactgactgcccgagcatgggggtgatgccgtggccggttcagttgacgttctgatcgcggcggatgcgggcgatcgccgcctcgatgccgatgcggtcgatggtcttgatgcccttggcgctcacggtaagcgtgacgtgccgctgcaaggacggcacccagtaccgcttggactgcaggttcggggcgaaggttcggcgtgttttcctgtgcgagtgggagacgcggttgccgaccccggcgcgtgttcccagaatttgacatgttttggacatgcctgcaactatatcataatgataaccattatcaaataagaaaggctgtcatgattcatccggcattgcaatcacagggaaacgcggaggggcgcacgcccgtggtgctgctcaccggcgccgaccgcctgagcctggactccgtggcgttctcgttggtcgattccttcccgtccgtatgctcgattgcttatgacgtgcgcccgaacgaagccgtggaatccggtctcgatatcgtgcgcaacgtcgcgaagccccaggcaagcggggtggtgttcggcgagtccgattcgttcgggctcgaggggtgctgcatgagctgcacggtcaaacatgaccttgaacggacgctcggatcgctgcaagggcgggccggcgcgtttctggtctcgctgcctgtgggccttgaggccacgccggtcgcgcagtatctggccgattccttccgtctcaacgagtggggtgagtcgatgttcgtgggtgcggtggccaatgccgtaggccttgacgaattcgaagagcgattctttgacgacgaccgtttgtgcctgtacggcatgggcgaggagaacggcgtctatgacgagcgttcgaccggcgtagtggtctcccgcctgatccgtgaggcctcgtgcgtgctcgaattgccggtcattggtgccggttgcctggcacgccatttggatacagacggggagtgcgcctgccgcgacatcatccgtgcaatcgccttgcgtgatgcgctggtctgtgaggatgcccacaccgtggggctcgtcgacctggtgcaggcgtcggtctgtgccgcgatgccgttgtgacatgtgcggcaaacggcagaacccccgcgtccgaacgaaggtggcgcgggatttctgtcgtttccgaggccttaaatggcagaacccccgcgcgggtatcgttcggacgcggggatactgccgtttcgtctgccgaaaacggcgggatcccgcgttgtcatcgtcggggcgcgggatttccgccggcagcgcgggtgtgcgcgtgcaacacgccgacgtaaatgcaaatgataataattctcaatacatgttattctgtcgtgttgggggccgggcgatgatgcagcaacagcagcatcgcccggccaaacagccgaattagagaggaaaatccaatcatgtccatcatgtccaacgccaagcgcgcgctcgccatcgcggccgccgcggcgaccctgttctcgatggccgcctgcggttccagcaatgccgccggcaacaagtccgattccagcagcgccgcgtcttccggcaagatcgaggtcgtcgcctccatcaaccagtggggttccgtggccgaagacctcggcggcagcaacgtcgaagtcaccaacatcatgaccaagaccaacgttgaggcgcacgattacgagcccaccagccaggatgttgccaagttcggcactgccaaggtggccgtggtcaacggcgccgattacgacccgtgggccaccaaggccgcccagtcgaccaaggccacgctggtcaccgccgccgaaaccgccggcatcaaggaaggcgacaacccgcacgtctggttctccgccaaggtgcgttccaacgctgccgacgccatcaccgccgcctaccagaaggccgacccgagtcacaaggacgactacgccaagctcaacaaagaatggcacgccaaggaagaccagcttgagtccaagatcaaggagacttccgccaagaccgagaacctgccgtacgccgccaccgaatccgtggcctggcacttggccgacgacctcaagatgaccgacgccaccccgaagggctacgcccaggcttccgccaacgagagcgagccgaccccggccgacatcaaggacttccaggacaccctgaagggcggctccatcaagatgctcgtcttcaacagccaggaagccaactccaccaccgaccagatcaccggtgccgccaaggacgtcaacgtgccgatcgtggagctcaccgagcagatgccgaagcagtacaccaacctgctcgactggatgagcgcactggtcgaccagttcgccgccgccgtgaagtaatgcggcggtagccggcaatccgcaacagcaataaggggaataatcaagtcagatagcgaggcgttgcctaggggagaacagaacgcttcgctatcagggaaggctccttatatatcagggtgcttcggggatgtcccgaggcaccctttgcgttagggtgaatagttaggaaacggtaagaaaaataatggaactatggattttccaaggttcagcggcaacaatatgcccttgaaaagtcccatacggaaacaggcgaatgagcgagaacactagtagtatcaccacagtgaaaccccatttcaagctttgggtcaaaaaggccgaagccaatgaagtcacgccccagcacccccacaagcccttccccggctgggcgtacggcgtgctcttcgttatcttcgacattattgttgtgacggcgctcgaagtgggcgtttcgtccagctccacccgtgtgcaactgtccagtccgaccgtcggattcggcttcgtgagcaagatgtggaccgacggcaatttcgtattcgtactcaacgtgatacttgtcgcgttgctgtacctcatgttgctgatgctgttcaacagattctggacggcaagcatcgtgattcttgcggtcggaatcatcgtggccgccatcgaacatttcaaggtcgagatccgttacgaggccattctgcccgccgacctcggcttccttggctcgaacaccggcaatatgctcaccttcattccggccggcgcgcacgtgaccatcctcgtggcacttggcgcgttcgccgcgctgctcgccctgattctggtgctgcgccacttcgacgggcgcaaaggtcgcatgatccgtacggacaacctgagcctgaacctcacctcccgtctgattctgctgctgctgccgattctggtgttcgcgttgtactgcattcatgtgagcaccaccgattcgctggccaacaagttctcccgcgccttgggggacacgccatccatgtgggattccgtgtatgacgcgcagcgcaacggtccgctcgtggcctttacccgtcagctcaacccgaagatcatggacaagccgagcaactactccgaggagaccatgaagaaggtcgccgctcgctaccagaaggaagcggagacaatcaacgcctcccgcaccaacaacctcactgattcgacagtggtgtacgtgctgtccgaatccttctccgacccgagccgcgtgccgggactgaagaccaataaggattcgatgcccaacatccgcaagatcaagtcgggcaccacctccggcctgatgctctcctccggctacggcggcggtacggccaacctcgaatacatgggactttccggtctgagcatggccaatttcgattcctccctgtccagcccgtaccagcagctggtcccgagccagcattggacccccaccatcaaccagatgtggggtgcgcccgccaactcgctcggctaccatccgtacgagtccagcatgtactcgcgcgctacgaactacaagaagttcgggttctcgcacttctacacgctgaccggtccggacgtgatcaagtatcaggacaagattgacgagtcgccgtacgtctctgataagtcttcctatgattctgcgctggaaggcatcaggtccggcaagacgaacaagttcattcagatcatcaccatgcagaaccacatgccctaccacgagtggtatgagaacaacgactacaccgctgaatccaccacgggtacgccgctgggtgatgatgaacagcagtcgattgagacctatcaaaagggtgtggagattaccgatcaggccactcaggagttcctgaacgaactggatgcgctggataagcccgtcaccgtagtgttctacggcgatcacttgccgggcatctactcgtccgccagcgaggatggcaacaactccttggccctgcacctgaccgattacttcatctggtcgaataaggcttccagctcccaaggcaataaggcaagcgatgcagcctactcttcgccgaacttcttcgtggcacaggccgccgatcacatgaacgccaaggtcagcccgtatctggcgttcctgaccgaaatgcattccaagattgccgctatggaaccgcctgtggtcaacaaggtccaaggctgggatcgtattcccgaaggccagaacatctatctcgaccaaaacggcaacccgatgtccaccgatgacttcgacaaggaaaccaagcagttgcttgccgactacaagctcatccaatacgacatcaccgccggcaaaaactacctcaaagacacagattttatgacgttgccgtaaagcagacagcccggccgaaccgtaaagcggatagctcagtgggctatccgtaggtgaggggagcggctgtgccgcgacggagaatccggaggattttcggtctgtaggcaacgtgcgagccgacaggcgagccagcaaaacgcgggcgaagcccgtccaaaattgctgtaccgttgccatagtgctgtgagctccctctgatgagggagctgtcgaacgaagtgagactgagggagagatcccacagaccaatcactcccgccttacaataaagccatgaagcgcatcgatgtgaatcatggctggcggttccgttcaattggcaaggaccgcgatacggcagcgcggcagccagtcacgctcccgcacgatgcgatgattcacgagtcgcgcgaccctcgcgggccgcacctcgcgattcatcgaacgaggacatgacggcgtggccagctggtcatgggcgggctatgagggccgcgacgccatcgtgcatgtcaccgatgaccgccgcattgtggttgatgcaggcgggcatatcgccgtcggaccttctgccgaagctgtggatgtggaggtacaagtggactctgtggccgcacaacacgacctgcctgccaatgccgaactgctcggcgtggccagcgccaatcccatcaccgtcgatgaactcgccgacaatacctgcaccacctacttcggccgagcccaagatatttggcgaataccagccgaaacgtctggtattgcctgcagcacaaacgccctcatgccatcgtcatgacggtacgataggtacagtcgatgcccggaaaaccgacccgggcatcctgcgggaaggatgtgccatggtcaatgcggatttcgctcagttgcgtcacgcctacgaatccgggtgtacgcggccattggcttggcgacgggcgcaattggatgcgctatgccgtctggtagcggacaatcgtgatgctttcgtggctgcggccatggccgatttgggcaaacccgcggcggaaaccatactgatggagctgaatctggtggccggcgaggcgcagttcgtccgcaaccggctcggactgtgggccgcgcgccatcccaaggcgatgcattggatgctgcaacccgccgccggctggacgatcgccgagcccaagggcgtggtactcatcatctcgccatggaattacccggtgctgttggctctggagccaatggccgacgcgctcgccgcaggcaacgccatctgcctgaagccctccgagctttcgcccaacacctcgcgcctcatcgccgaactcgtgccgcaatatcttgaccccgagtccgtgtgcgtggtcggaggcgggcccaaggaaaccggcgaactgctgaaatgtccgttcaaccatatcttctacaccggcggcgggcacgtcggcaaaatcgtcatgcgtgcggcggccgagcacctgacaccggtcacgttggaactcggcggcaaatcaccgtgcttcgtggaccgtacggtggatatcaatgtggccgcacgacgtatcgcatggggcaagttcaccaatgccggacagacctgcgtggcacccgactatgtgctcgccacgccggatgtggccgaggctctggccgagcgcatcgccgtagccatcaccgaattctatggcgaagatccgaaggcctcacctgattttggtcgtattatcaacgatcgtcattttgaacgattgtgcaagctattgccggtcggcaccgtgccgtctgaggagccgagctcgccgctggtacaggtggcatcggcggtaggcgcggccatggatatggtcgggcggcgcttcaatgtcgcggctgccggacgcggaagcgcgggggagacagccggtggtggcaccggtagcgcgaacaatgcggcgaagccggcggccggttcgaatacggcagccgctgatagtgatgcgactgcctcggccgctgttgagccgagcgagattcacaaggtgcccggcgtattcgatccggccgggcgaatcgtttgcggaggcaaggtcgatcgcgccgcccgatatatcgcgcctaccgtgctatacggcacgtcaccggatgcgccggtaatgaaggaggagatcttcggcccgattctgccgatcctggtggttgaggatgccgagtccgcaatccgattcatcaacaagcggtcccggccgttggctgcatatgtgttctcgcgcgatcacgaggttcggctgactttcgaacgtcagaccagctccggagctttgggatattcgttgccgttgggtcacctgctgtccagccgactgccgttcggtggcgtgggcgcgtccggcatcgacgcctaccacggcaaagcaggcttcctcaccttcagccacgtcaaaaccgtggttaccaagccgcagttccccgacactctgcgcctcgtgtacccgcccttcaatgaagccaaggccaaactgttcaacatcatcgccaaattcagctagcgtgatatcgctcgctgatattgggtgatggcgttgtcatagtgacgttcgctgtcccggcagccacgtcaatcgattgattcgtgtaccgggccagatttttctgtcctggtatttgatttcgagtcattttctgcttaccgggacaaaactgacgccgaaagtatcgtccgcgtattacgaaaatggcggaatagtgcggttttgcatggaagggaattccaaatattcctatattcgaggtgttcaactgtcctggtttgcgaaaaagagccgaaatcggctaccgggacagaaaaatctgtcccggtagccacgtcaatcgattgacatggctaccgggacaaaaatatgcggcagatgcgccgcttctgttacttcagggctttgaagccgatgtcgtggcggtagaacagtccgcgcagctcgagcttgtcgatgattgcgtagaccttgtcctgagcggacttgatgtccggggcggaggtttcgacgagcaggacacggccggagttggcaatcagaccacccttgtcgtcggaggcgacgccggcatagtagacatgcgaatcctcgtcgacctcgatctcgggcacacgggcacccttgatgacgttctccgggtagccgttggaggcgatgaccacgccgagggtggcgttggactcatcccagatgaattcgggggtttcgccgtcgagaatggcggagatgccggcaccgaggtcggaggtgagtttcgggagcacgacttcggtttccgggtcgccgaaacgagcgttgaattcgatgaccttcggtccgtcggcggtggcgatcaggccggcgtacaggatgccggtgatcggtgtgccttcctcggccatgccttcgacggtggggcgcacgattttctcgatggcctcgtcgaccacggactgcggaatctgcggcaccgggctgtaggcacccatgccaccggtgttcgggccttcgtcgccatcgtgggcgcgcttgtgatcttgggagatcggcatcggccagaaatcagtgccgttgacgaagctcatcagggagaattcctggccgtcaaggaagtcctcgataacgaccttggcaccggcggagccgaagcgatgatcgatgaagatgtcttcaagcgcacgctgggcggtgtgctcgtccatggccacggtcacgcccttgccggcggccagaccatcggccttgatgacgatcggcgcgccatgctcgtgtacgtaagcctgagccatgtccaagtctccgaacgtctgatatttggcggtcggaatgttgtgacggtccatgagctgcttggcgaagtccttggaaccctcgatctgggcggcggccttggacgggccgaacgccttgatgccggcggcggcgaaatcgtccacgatgccttcgatgagcgggacttccgggcccacgaacacccagtcgtagccgttgtccttcacgaattcgatgagcgcggcatgattcgactggctcagctgtgtggtgcggatgccatccttgagcatgcccgggttgccgggagccacggtgacttcgtcaatactcggtgccttgagcagcgtgtaggcaatggtatgctcacgcgcaccggagccgatgaccaatactttctgacccatgtttttccttcctaaagtctttggctcccctctttgaggggagccggtatctggagctacttcagtacgatttgcgtgtcggtggtgtcggtggtgatctggccgagcacgtaggcgggttcgttgttgtcggcgagcagcttcagcgcctcgtccttgcgggcggggtcgatggccagcaccatgccgatacccatgttgaagatgttgtacatctccttgtgatcgatgttgccggccttctcaagcacgtcgaagatcgggagcacaggccaggtgccaagctcgatctcggcggccagaccgtccggaatcatgcgcgggatgttctcgatgaagccaccaccggtgatgtgggccacgcccttgaccacgcccgccttgaacagcggggagagggccttgacgtagatcttggtgggggtgagcagcacgtcgccgagctttgcgccgcccagctcggcgagctcagtgtccacggtatagccagcctgctcgaacagggccttgcgcaccagggagaagccgttggagtgcacgccggtggaaggcagaccgataagcacgtcgccctcagtgatggtggaaccgtccacaatggcggacttttcggcaacgccgaccgagaaaccggccagatcgtactcgtcctcgtcgtacatgcccggcatttcagcggtctcaccgccgaccagtgcggaaccggcctgcacgcagccgtcggccacaccggccacgacctgctcaagcagggccgggtcgttcttgccgcaagcgatgtagtcaaggaagaacagcggctcggcaccctgggcggcgatgtcgttgacgcacatggccacgcagtcgatgccgatggtgtcgtgcttgttggccagcttggcgaccatgagcttggtgcctacgccgtcggtgccggagatgaggaccggctccttgtagcccagggaggctaggtcgaacaggccgccgaagccaccgatgccgccgaccacgccgggacggttcgtgcgggccacgtgcgacttgatgcgcttgacgacttcgtacccggcttcgacgctcacgccggcgttctcatatgcttttggcatttggtggggcctttctgttctattttcaagctcccttgccggggagccacctgcaaaaagcggattttcgtttgtactaagctccccttgtcaggggagctgtcagcgaagctgactgaggggtagtcgtaaagaccaatgactgaggtgtagtcgaaggaccgaccgaacctactgcacgtccggctgcacggtgttgtactcgttgccgatgtacttgctcttgtacagcgcgaattcaggcagacgcacacggtcctcgggcgtgagggacttcaggaagtcggcctcgtagtcgtcgagcgcagtggggtagtcgccgttgaagtaggcgacgcacaggccaccgtatggggcgtcggcgttcagtccgatggattcgaccagaccgtcgagcgaaaggtaggccaaggaatccgcgccgatgtattcgcggatttcctccacgctcatcttggctgcgatgagttccttggtggtggagatatcaatgccatagaagcaagggtacttcagcggcggggagctgatgcgcatatgcacttcagcggcgccggcttccttgagcagctgcacgatgcgcttggacgtggtgccgcgcacgatggaatcatcgataacgataacgcgcttgcctttaaccacgctgcgcacagcagagagcttcatacgcacaccctgctcgcgcagttcctgcgtgggctgaatgaaggtgcgggccacatactggtttttgattaggcccatttcgttgggcaggcctgctgcttccgcatagccggatgcggcggacaatgaggagttcggcacgccgataaccatatcggcctccaccggggattcggcagcgagacgtgcgcccatgcgcttgcgggcggagtgcacgttgacgccatagatatcggaatccgggcgtgcgaagtagatgtattccatcgagcagatggccagctgcgtgttgttggtgtactgcacgatcttgtagccgtgatcgttgaccaccacgatttcgcccgggcgaatgttgcgcaccagctcggcgccgacgacatccagtgcgcaggtttcggaggcgagcacgtaggcgccgttcttcatcttgccgagggagagcgggcggaagccgttcgggtcgagtgcgccgatcatggcgtcttcggtcatcagcaggtaggcgaaaccgccatgcaccgtgttgagcgcttccttgagcttgtccataaaggtgcgctgcatcgaacggcgaatcaagtgcatcagcacttcggtgtcggagttcgaatggaagatggcgccttcgtcttcaagcttgcggcgcagtgacgggcagttcgtcaggttgccgttatggcacagagccacgtcgccgtcatggaagcggaagatgaacggctggatgttgtccgtggtgcccgagccggccgttgcgtaacgcacgtggccgatggcgcaattgcccttcagtcgttcgatttcgcgctcatcgccgaacacctgggtgagcaggccgagtccgcgatgaccgatgagatgaccgttatcgttggagacgatgccggcaccttcctgaccgcgatgctgcagcgcgtgcaggccaaaataggtgagtcgtgaggcgtcggggtggccccatacgccgaagatgccacattcctcatgaatgtcttcgagttcagccgacaagccaaagctcctttttcaaacaggggattaactatctgccaaccctaccaatcggcggctacatcgcgtgttgtggggtggtgggggcatggggctgcccatggtcttgcccctggccgcatgagcagagccgtcaggtcggaccctgttcgccgatggcgccggaatatggactgttgcttaaatcctgttgtcttatagtccgatgttttgtattctcaactgaaatgaaggatagttttttacccggctgggggcactgttgattactgaggaagtcggcaagagaatcagagaattacggaataagacgggcctgagccaggaaaagttcgctgcaaaaatcggtatggatcgcacatatttcgccagtatcgaactaggcaagcgtaatgtagccttgaaaaacattgaaaagatagcgaatgggttggatgtgcccctttccgatctgttcaaagggatctaagactagtgcgtcgagtaaaaaggtgatgggggataagcgagaatgggattcaagggtaaattgtataaaacaacgttgattaacaatcgcagatacctgggcaacaaatacaagctcctgccttttatcaccaaggtggtcgatgaggagtgcacggggatcgatgtcgtcgccgatatctttgccggcactggcgcggtttcttccgctttccccgggaagacggtaatcacgaacgacataatgtacagcaattacgtgtgcaattacgcctggttcggtgcggagacttatgatccgcaaaagatcgtgaattatgtagtcgaatataatgccatctcgcaatatgacgacaactacatgaccgataatttcgcggatacctacttcagctataacgattgttccaaaatcggtttcatcaggcaggatatcgaggacaactatcaagctggcgacctcaacgacagggaacatgcgatacttatcgcctccctgctctatgcgatggacaaaatcgcaaagacctgcgggcattacgatgcctatcgtaaaggagccaagttcgataaaccgcttgagcttcgtgttccgcttgccgaggtgcataacaatgccgggaaccaatgtttcaatgaggatgccaatgaactggtcaaggacattcatgcggatctgatatatatagacccgccgtataactcccgccaatattccgatgcctatcatctgctcgaaaacgtcgcccactgggagaagcccgaagtattcggagtcgccaggaagatggagcgaaaggccatcaaaagcaagtattgcactcgcagtgcgacggagacgttcgaggatctgatcggcaacatcaacgcgaggtatatcctgttgtcctacaacaatatggccactaaaggagacggccgttcgaacgccaagatagctgatgaggatatcgtaagaatattgcggaataaaggcgagttgaagattttctcggaagactacaagccattttccgcgggcaagtcaagtattaccggcaatgccgaaagactgttcctatgcacctgcaatgagggataagaaaaccatgattcaatcccctctgaattacactggtggcaagtttaaactactcccacagatattgcctctcttccccgggaagattgatcagttcgttgatttgttttgtggtggctgcaatgttggcctcaatgtcacagcaaataaggtgatctataacgatttagatgagaatgtaattaatctgtacaagaccttattgcgtttagggcatgacatgacgttcgagtacattcatcagataatcgatgattatgagctgtctcttgcaagccagaaggggtatgcatattacggctgcgatagcagcaaaggactaagtaggtataataaaccccattttttgcaacttcgtagcgatttcaatgcaaggcagaagaaagatagctacaactacataatgctctatgtactcatagtctatgccttcaataatcaaatacgattcaacagcaaaggtgaatacaatcttcctgccgggaaaagggatttcaatgagagcatgtcccacaagttatctgcctttatagagaaaatccaatcccagaattgccttttcacttgcagtgatttcaaggattttgatattgctcaacttacgagtggagatttcgtttatgccgatcctccatatcttattacttgtgcaacctataatgagcaaggcggatggaacgaagacgacgaatgtgccttactgtcttttctagaccgtctggatgaaagtgatatacgattcgccctctccaatgttctacgaagtaaaggcagagaaaatcaagtcctcattcaatggttgaaggaacgaaaagacaaatatcaagttattccattgaataaaagctattcaaactcaaattaccaagttaaagacagagtttccaatagtgaagaagtactgatagtaaactattaatgaaaagtggcaattccagctgcggagagttttgcgactgcatatcgctgattgtaagggaggatcctcatgaaagtatccaaggggcatattttcaacctttttgacaccaatggtcgtagaaatgatgtgattgctgccatgcgggggtatctcagtatcctaaacaccattcgtgccaatcaggatttgccgtggagagcaatgccaaacagtccggcacaggtcttgttctatcgtcatgcgattggcatgtttccggatgttttcaaggaccaccccaaatatgatgagctcatatccacgatacacgaatatcctgcattggaagcagcaattgatagagccgatatggaatggctcgaatctcacggtgacgagtatgcgaatgtggatatcaactttgacgaaggcgtggaggatcgcgcacgtcactataccagtaatcttgtcaaactagggtttgcggatgggcggcggaacatctcgccggttggcaatattttgctcgatcgtattcctctacatgaagacggtttggaacgattgctatcgttgaataaggagaatatcctctatctgcggcagttgctcaagttgcgaatttttgataaggccggggaacgatactatgccccattcgttatgggcgtctacgcgttgctgcgcaagtctcgcctatcagaagatgattttttcggcatggtgcaaggaagcagtccgtacagcaacattgacgacgtcgatcggtatattgataatttttcggtagaggggcagctccacaaccatgctgtctccactcccgatgaaatcaatattgatcagcagttaacgtatgacgtgtttaaacaatattttctgaaccggaaatcagcaagaacggtaaatatctattatgggttttatcagtgtatattcgaatttaccgttgaccggactcctgaaaaattagaccttctacttacgtattatgagtcaaatcgttctgtgctgaacaaggcattcggattcgggcgaaatgtatttgatactcgaaccggtgatcgtccagatgtccaggatttccttgatgagaacgaggacatgttttcctccgatatcaacgactatttataccgacaatttgcgatttcaaaattctgggatacgttgcgcgaatattcagataccacgaagcgtattttcaaagcctcgggtctcatcagctttgaaaacggatacgtcgaactggcttatcacgaactgtgcgcatgtattttcaacgcagccgatttgaagcccaaaatcttcggtagcatggatgacgaggttgttccgtactacgaaagttatgatgaatacgaagagggagtgagtagttacttttgtagtaatttcagtctttgcgacattcttggtctgcaggagtcgcttgacgagattaaagagcacatcagtgaagcatttggcggagctgcgcctgaggacatccctgatattacccgtcgtagacggtgggaggaattcgaagttttcgttgcgaaccaatatcctgtcgaaagagtgaaagagctgcttgccctatttggcgacagaaataatgacaagcgcatcaagcaggaggtctgtgaagatgcaactgtcccgaccatttacgagttcatcgttgggctggcttggtattacttctcaggcaaacgtttcaatctcctttccagctataatctcacgttatcggctgacttcgagccgctcaaccatgcgggaggcggacagggcgatatcgtgattgaaagtaagcatgatgtcaccatgcttgaagctacgctaatgaatgtaaacagccaaaagcgaggcgagtgggaaccggtattacggcattccgtgaacctgaaggtggatgaggaggctcgtaagacggaccggcgggtcacgacattcttcatcgccgatgtatttgatgccaataccattaacatctggaaggccgttgcctcggtgccgctgcaatcgaccactgctggcgcggcatatacagacaacgtggtgatcatgcccattagcagtctggaactctgtggcttgatggatagaagttcgcaatatgacacggtaatgcagcgtgtccacgatctgttcgaggtcgacaaaagcaatttcgaccttcaatggagggacaagttcattgatgaaatagtgtgaacccgctattgcgcctttcgcgcatgaaacgagagggcatcggtctcgccggctatcgctatggccggtgagaccgactttgagcgagtcatccgggtttagcactgccgagccttgtgtcggagatctgagacgggatgtctgagcttcgctgaagtttatatcgaacaaatgttcgactgttctggtatgctggtcgggctggtttcgatagggaggtgatggcgatggctggcgagagggcatcggcgcaacgtgaacatacctatatcgccattgacctcaagtccttctatgcctcggtggagtgcgcggcgcgtgggcttgacccgctgaccacgcatctggtggtggccgatgaaacccgcaccgataagacaatctgtctggcggtctcaccttcgctgaagagctatggcattcctggccgtgcgcggctcttcgaggtgaagcagcgcctgaatggagtcaatgccgagcgcgcggtccatgctcccggcggccgattaatcggggagtcctgcgatgcgcgcgacctggaacactcgccgagactcaaagcctcgatggtcatcgccaagccgcgcatggcgcactatctggaaatcagcgggcggatctacggcatctatctcaggtatgccgctcccgaacacattcatgtgtattcgattgatgaggtgttcatcgacgccacgccgtatctgcgctcgctgggtatgggggcgcatgcgatggcgcgaaccatcgtgcgcgaaatccttgccgaaaccggcatcaccgccactgccggcatcggctccaacatgtatctggccaaagtcgccatggatatcgtcgccaagcacatgcccgccgacaaggacggcgtgcgcgtggccgaactgaatgaaatgtcatatcgtcggctgctttgggatcatcgtccgctcaccgatttttggcgggttgggcgcggctatgccaagaagctcgagcatgccggactgatgaccatgggcgatatcgcccgatgctcggtgggtcgtgcttcggattactacaacgaagacctgctgtatcgcatgttcggcgtgaatgccgaactgctcatcgaccatgcgtggggctgggagccgtgcgagatcgcggacatccaatcctatgagccggatgcgcacagcatcagcagcggtcaggtactcaccggtcccgccgactatgccacggcccgcctgattaccaaggagatggctgatgcactggccctcgatttggttgataaa

SEQ ID NO: 3846 - DNA, 9114 bp, Unknown
  R35_2m  MAG No. k141_12819
ggcaacccatacgacaacgcggtggtcgaatccaccaaccggctcgtcaagaaggaactcatccacaggaacgtctacacgaacgtggagcaactacgctcggacgtcaaccggtacgtgtggtggtacaaccaccaacggctccactcgaccctcgggtacctgagccccgtggagttcacacaacaaggaaaaaccctctagaaacagtccaacacaccgtcgccaatccacgcatgatccgcaggcgcatccgggagggccaaccgttcatgttcctcgacgaggggctcgcggcagccggcccagtgccgtccacgaacaacctcgtcgaatcatggaacgcgcgcctgcgcgacatgctgcgccgccaccgcggactgcggctggtcagacggctgaaggcgatctgctggtggtgacaccagcacacggaacggcccgaaagcgacgcgtggctcgcggccaacgcgatgaccgacgaacgactcgagcgcctctaccggcgggcatgggagagaagcccgcagagcatgcacgagacgttcggcattcccatgagacacggcaccggcatcgactggaacgagttccacaccagggtcgaatggcagtcgaacgactagaccgccggacatacattttggcctataaccccgaatacggacgttcgcatcaaaaacaaaaagggttccgggacaaaccccggaaccctaaaggcggataaggcgagattcgaactcgcggaggctttcacctcacacgctttcgaggcgtgctccttagaccgctcggacacttatccatgctgccaaaatggcaacttgttcattatgccacattctgccgacctggcaaatcggagtttcgctgagcaagtctcgagtgtatgccgcttgagacatgtcagatcacaatcccggaattcgcccgaagcgctggcattgcgtttacgcgccaagcactccgacaggaattacatacactccatcatcgcgttgatacgcgaactcgccgacccccaccaacaccgccaagaactccggttcacgggttcgcgcactcggatttctcagcagtttctccttcaacctgcgcagatttgccgccgcttcagggactttatcctcactggacttaatttcgatgccgccccaccgtccatcggacaattcaataatggcatcacactccagaccggaatcgtcacgataataccgaaccggttctatcccaatatcgaggagagatctcgcatacaccaacagatcacggatgcatagattctcaaacagaaacccaaaagtctgccaatcgccgataagagcagcaggactcatgcccaacattgcggccgcaatggaaggatcggcaaaataccgacgcgccttggtctggagtcgctttggatcccgtgccggcgggacccagccctttatcggatcgatgacgaacatgttctcgaacatggccgtatacccggataccgttctctccgaaatgaaatcgtcaaggttttcttcagtaccgtacatatccttacgtaaggttttgaatgtcacagcttgactgatattgcgcgcaagcgaatccagcagacgacgagccacatcaggatccttgccttgcctgggcacactctcagtcagcgtgagtcgcatgtattcccgaatcagaatctgtgcgtcagatacaggcagagccaccgcctccggccatccacctcggcatacggcatccaacaacatttgtgtacttatctctgattttgcagcggcgaacttatgttcaaacagtccactgagacttaccgcacctgtcgagagtccggactcatataaagtcagaggattcatacggatacgtccgattcgtcccgcaccactatggttcggccgattctcattgagaggagtggatgaaccggtcagaatccactgacctttattcgcggaatcatcgtcgacgcgatgacggacttcatcccatatagctggagcgagttgccactcatccacgatatgaggcctatctcccagcagcatcaatgacggatccgccttagccgcagccaaattgttattgcgatccacataggtaatgctggctgcatgggcccgcgcagaccaagttttcccgcaccacttggtgccggtaatctccaccgcgccaaagatgcgcatatatcgttcgatctgtgcatccacgatacgagggcgataggctttcggcttgatgtcgctcgccagagaatcggccattccgcgcacctcccgttatttcacgtccgccatcgcaataatccgaatttctcaactaccaaaatccgaatgttgcaacgacgaaaatccgaactttctaactacaataatccgaatttatcaactaccaaaatccgaatgttgcaacgacgaaaatccgaatattggtggtggtagaagcggtgacggggccactctgcattgagcggtctctctcagtctcgctacgctcgacagctcgaacgcaatttaaggacagctttccagctgccattttatttgctcactgtcattcgccttcgcctaaaaacgcctccggcgttttcttcacggctcagctcatcagagggggcttggaattttgtttacgccacctgttcgtggacggaggcattgacccattgggtctgctggacgttgtagccggagaagatgccgatgtcgagcatgcagtcgcggtaatcgcggccgtgggcgatggtgatgtagctgtcgtccaccaatcggttatgcgtgggatccagtccgacccatcggccatcctgatacacctcgacccaagcgtgggtcgcgccctctcccccaagcaaaccggcaatgtagcgcgcggtcaatcccacatgccggcacacggacagcattacatgggcataatcctggcatacgcccttgcgctgggccaaggcctgttcggcggtggtgcgaatcgtggtggaaccgggcgtatacacaaacgccttgtagacctcatccatcacttcggcggcctgctgcaccggagtggcgtcggcaggcaacgcagccaagcgttcgcggcatacgtcgatcatcgcctccacgttcgggccgggaatggtgagcgctgaattgaatcggtacagcggtttataggcttccttatggatatgcgcattgtccacgaaggcgatgccggtcaccgaatagctgaatatgtcgtgcggctcggggatgaatccggtcatcaccacggagccaaaggagtcgacggtggtttcgagttcggtttcgggctgaatcttcacttccacgtcaatcacctgttggcgagggccagtggcgggaatacagcgaagctggaacctgtgatcggtgaccggtgcgctgaaggacagcttcatctcatagtcgaacacgagttttttcacaacgtctcctgcacttacacacgagccggcaaccggcacattctcgggataacgacactacagccatggctgaggtatggtccgcgcgctcacagtccacgcatatattccggcaattcgccgatacgcatcggccggcactcgggcgcacggtttttcgccataccaccatagcatttgaacccgtcagggcgaacgtcgggttaggggcgcttggcatccatgttcatggagctcagtgagcccatgtctttgatggccagggcgctgacacggccggaataatcgtcaaggtacttcttcagcaggtcggcgacttcctgatacccgcgagacggcagctgaccgaccagccagctcagcccatcggcgaagcaactaggcaacggcatgccgtcgaggatcatcgagtaggaggcgagcttcctaagcggggcttccatctcctccatcgtcaggccgaagcgcgtgtacaggtcgatgcgctcaagatacttgccgatgaagatgaacgccttcagcgtggggtcgaccggcgaattctcgatgccgccccagaaggcgagcatgtcatcggtaatatcgcgctgcttgtagatgtcctcggcgtcggccgcgtatttggcggcatcggtgatattggtcatcgccaactccacgtactgcaacagacgcgagctcaattccgggcgcagaatcacggcgttgttgaatgcggaggttacggccgaccgcaccgaatcagggttggacccgtcgtacaggaagctgttcacgaacccgtcgaagtcctcgaaatcttcgggcaggtcgagtgcgtgagcgaacggacggaaggcgtccacatcggtgtccatcacacgatcgtagaacgggaagaactggttcagcgtggtgaaggcgcgctcggtgtaccgacccagccaatacaggttgtctgccttggaagcggtgaccagagacaacgagtggcggcgggactggctcagcaggttcgccacctgcacttcagcaccgtattcatgctccacgccggattcgggtgccaacacccacgtatccttgaatccgccaccctgcgacgagttgacgatcatctggccgggcaccgacgagtatcgagtcaagcccgaataccacacgtgcgtgtttttgccggtgaccacaaaggcacgcaaatcgcatttgcgcggcgacatctcaccggtcttcgggtccaccacatcgatatcgcggaactgaatcacctcttgggcgatgaatcgacgaggctcctccttgatccggttggcaagctcctcacgtgcggcagcatccagcgacgaaccgaacaccacgccgtaaccaccggcttcggccacatccttgatgaccagctcgcccatacgattcaggacttccttacggtcggcctcgaacatcggcatatacgtgggcgcgttgttgagaatcggttcctcgccgagatagtacttgatcatctgcggcacgaagtagtagatggccttgtcatcggccgcgccgttgcccggcgcgttgacgatggccacgttgcccgcgcggtaggcggacaggataccgggcacaccgatcaccgaatcaggattgaaggcaaacggatcgaggaattcgtcggacagacggcggtagaccacgcccacacggtggcgtttgccggcgtagtcgaggaagtagaccttgttgtccaccacttcgaggtcttcggggaaggccagtgcggcgccggttttctccgccagataggcgtgctcgaagaacgcggaattgtagcggccgggggtcagtaccacggcgatgccctcagtggacacaaagtccatggccttgcgcagtaggcgcgggtattcgcgattgtcgcggatgtgcacgtcgcggaacaggcgcggggagatgcggcgctcgatgtcgcgcacgaacagcgggtagctggcgcccgaggggatgcgcaggttgtcttccagcacccaccagcggccatcttcaccctggaccaggtcttcgccggcgatgtgcgcgaagatgccgccgggaggggtcacgccgttgacctgcgggaagtagccggccgaggtgtatacgtattcctccggcacgacgccgtcatggatgatggccttgtcggagtagatgtccttcagataggcgttcagggcgttgacgcgctgcttcaggcccttctccaattcgtcgtattcgtcggattcgataatgcgcggcacgggatcgtacgggaagagccggtcatggtattcgccgttcttgtagatgccgaagcgtacgccgttgcgggacagctcgcggttgatcgcctcgcgacggtttaccagttcatgggccagtctgcgtgctgcggattcgatcatcgtgcctgctccttgctgtggcggcttctgtgcctcaagcggttaggcgtttcgagcgcacgctgacgccgcaagccgtaaccgggtttgatggttacaacctaaggcggccccgtttcagcaaacgcgcgagaatgttacaggcaggtcacttcgccgaccgcactcgtctcgccgaccgcgcgcatctcgccgaccgcgcgcatctcgccgaccgcactcgttacaatgaatggctatgacacgactgcgcattgacttggcctacgacggcggcggattctatggctgggccaaacagcccaatctgcgtacggtgcaaggcaccattgaagatgcgctgcacaaggtgctgcgggtgccggccgatgatgcggccgaaccgttgcgtctgacggtggctgggcgcaccgacaccggtgtgcacgcctcccaccaagtggcgcatttggatgtatccgatgaggtactgaatcgctgcgtaggtcacatgaccattccggtcaccgaggcgctgactcgcagactcaaggctgtgctgccttcggacatcgtcattcatggcattgccgtggcaccggccggtttcgatgccaggttctccgcattggagcgcacttatgtgtatcgggtcgccgatcgttcatccgagatcgacccgcgcctgcgtggatgcgtgcttatcgtggatgaatcgctggatctggagcttatgaaccgcgcagcctcattgaccatcggcctgcacgattttggttccttcgccactccgaatccgggaggcactacgatccgcgaagtcaagaccgcctattggcggcgggtgccgatcactcccctggtgccggatgcgatggcatcgcatgaagcatatcggactccgtcgctggagtccggactggcggtgttcacgattgtggcggacgcctttgcccgcaatatggtgcgctccttggtcggctcatgcatcaaagttggttcgggacgcaaatctctggaatggtttgccggcaaaatggccgagccagtgcgtgaaggctcaagcgggccgattgcgccgcagggcctgactttggagcatatcgcataccccgtcgatgatcagctggccgcaagagccgaggccattcgagccgtacgtacgttgtagtttctatgaaacaacgcaaaagggctggaacccaaacggattccagccctttcagctagcttggcgaaacgctattcagctcactcggccttctcggcgtcagcggcttcctcagcgggagcctcagcctcagcggcggcggtctcctcgaccggagcctcagcggcctcagcctcaacggccggagcctcttcttcggcaaccttggcggcggcttcagcttccttcacaacagccttcttggcaaccggctcggtgacgagctcgatcacagcggccggagcggcatcgccaacgcgcggggcgatcttgacgatacgggtgtagccaccttcacgctgctccatctgctcggcaatctgggtgaacagaatgtgcaccacggacttgttgcggatgacgcgcatcacgcgacgacgggagtgcagatcaccgcgcttggcgaaggtgatcaggcgctcggccagcggacgaaggcgcttggccttcggcagcgtggtggtgatgcggccgttctggaacaggctggtcgccatgtttgccagcatgaggcgctcgtgtgcggggctggaagccagacgcgggcccttcttgggtgtaggcattgggtttactccttatatgtccgttcttcaggcaagcaggtgggcatatgcccgaacatccgcttgcctagtgaacgaacgattggtcaaagaggcagatcactcgtcttccggcgagaagaacgtgccaccttcgagattattggtatcgaaggccatcggcgaggacttgaggctcaggcccagggtctgcagcttctccttgacctcatcgattgacttcataccgaaattgcggatgtcgagcaggtcctgctcggtgtgggagacaagctcaccgatggtgtggatgccctcgcgcttgaggcagttgtaagaacgctgcgtcaggttgaggtcctcgatcggaacggccatctcggggttggtctcctcggccaccggggccggaccgacctcgacgccttcagcctgggcgttgagctcacggcacaggccgaagagctccaccaaggtggaaccggcggaagccaccgcgtcacgcggggagatggcgggcttggtctccacgtccagaatgagcttgtcgaagtccgtgcgctgttccacacgggtggcctcgaccttgtagctcaccttgagtaccggggagtagatggaatcaaccggaatacggccgatctcatcgttgtcctgcttgttcatctgggcaggaacatagccacggccacgctcgacagtgaactcgatctcgagttcgccatcgtcggcgagggtagcgatgtgctgctccgggttggcaatagtgacgccggcaggcggggtgatgtccccagccacggcttcgcccttgccgctcttgcgcagatacatgaccacaggctcgtcatattcgctggtgagcacgatgcccttgatgttcagcaggatctcggtgacgtcttcctggacgcccggcagagtggtgaactcatgcagggcaccggaaatacgcacggaggtcacggcagcacccgggatggagctcagcagcgtgcgacgcagcgagttgccgagcgtgtagccgaagccaggctcgagcggctcgatggtgaagcgggagcgctgcggattcagagattcctcggtaagagtcggacgctgtgcaataagcactgtggttatcctttcagcttgaactcggtggtgcactcaccggtcaggcggttttggatggatttggtattgctgagtgctcagacgcgacgacgcttcggaggacgaacgccgttgtgggcttgcggggtgacgtcggtgatggaaccaacctcgaggcccgcagactgcagggaacggatggcggtctcacgaccggaacccgggcccttgacgaacacgtcgaccttcttgacgccgtgttccatcgccttgcgggcggcggactcggcagccataccagcggcgtacggcgtggacttacgggagcccttgaagccgacatcaccaccggacgcccaggacaccacggcaccggacggatcggtgatcgaaatgatcgtgttgttgaaagtggacttgatgtgagcctggccgaccgggaccgacttgcggtcgcgacgacggggctta

SEQ ID NO: 3847 - DNA, 20197 bp, Unknown
  R35_2m  MAG No. k141_12896
gctaatacctcccactgattgcgcgcatcttcgaatacgtgccggatgcataaggccatacaaccggttgccggattggatgggtgcagaagttgcggattggccccatccaaattggactggtttgggtggggccaatccaatccgttcaataatgaagcgcgataccaagcagcgtcgaacgaagggaaactcatgacgcagaatcgtgcggaactcaaccgtaatctggcccagatgctcaagggtggcgtgatcatggacgtcaccacgcccgaacaggcgaaaatcgcgcaggatgccggcgcgtgcgcggtgatggcgctggagcgcatccccgctgacattcgtgccgccggcggcgtctcccgtatgagcgatccggccatgatcaagggcattcaggaagctgtctcgattccggtcatggccaaggtgcgcatcggccacatcgccgaggcccgcattctgcaggccatcgacatcgactacatcgacgaatccgaagtgctttccccggccgacgacgtgtaccacatcgacaagaaccagttcgacgtgccgttcgtgtgcggcgcgaagaacctgggcgaggcgctgcgccgcatcgccgagggtgctgccatgattcgtaccaagggcgagcccggcaccggcgacgtgattcaggccgtgcgccacatgcgcaccatgaacaagcagatccgcgagctcgtggccttgcgcgacgacgaggtctacgaggccgccaagcagctggccgtgccctacgacctggccaagtacgtgcacgacaacggccgtctgcccgtcgtgaacttcgccgccggtggcgtggccaccccggccgacgccgccctgatgatggagctcggtgccgaaggcgtgttcgtgggctccggcatcttcaagtccggcgacccggccaagcgcgccgccgccatcgtcaaggccaccgccaactggcaggacgccgatctgctcgccaagctgtccgaaaacctcggcgaagccatggtcggcatcaacgaggacgagattcagaccatcatggccgctcgcggcgagtgagtgcgttaccttggctcccctcaaagaggggagccaagaaagggtggcgctcccgccagcgggagtcaaggcccaaggagacaacatggttgtagctgttgaatatatttccaaagaagagtccgcggacgtcgaaaacgtcaagcacggcgtgaccggcatcctggccgtacaaggcgcattcgccgaacatgcggcggtgctggacaagctcggtgcgccgtggaaactgctgcgcgcggccgaggatttcgatgaatccatcgaccgcgtgattctgcctggcggcgaatccactacacagggcaagctcctgcattcgaccggactgttcgagccgatcgccgcccacatcaaggcaggcaaaccggtattcggcacttgcgccggcatgattctgctggctaaaaagctcgacaatgacgacaacgtctactttggcgcgctcgacgccgtcgtacgccgcaacgcctatggtcgtcagctcggtagtttccaggccaccgccgattttggtgcagcggatgatccgcagcgtatcacggacttcccactggtattcatccgcggaccgtacgtggtgtcggtcggccctgaggccgcggtcgaaaccgaagtcgatggccacgtggtgggcttgcgtcaaggcaatatcctggccaccgccttccacccggaactcacggacgatacccgcatccacgagctcttcctgtcgctgtagtcgattcgtctgccgctagactggtatccgactgacgaatcaaggagacgatctgccatgcagcttgagctgaatcgacgcagcaaggtgccgatgtaccggcagctggctgccgagctgcgtgaacagatcgtctccggcgcgatggccgagggctaccgcctgcctcccgaacgcgagctgtcctcgcgtctcgaagtcaatcgcaccacggtgttgcaggcgtatcagcagctcaaggacgaaggtcttatcgcctccaaagtcggcaaaggcacgttcgtgctgccggctgcctccgcaagccgaacaccgcacacgtcaaacagtgacttcgggaatgcaataacgcgaacaacacgatcgtcggcagaaatgggaacatcgcaagcctcctcttccggcgacgtagaacgtgctacctccactgatttcttgacgacggaccagggcagcagctctgcggcggtccatacgattcgtgaaagccgctcggttcagggcccggagccaaccgtcgtgcgtccgccatggtcggtgttgttctctgattattccaaccggtttacctaccatgacatcgcctcggccgagcgggcgcagcgcggcgacaccattattgatttcgccaccggttcgccgaacccggcggatatcccggacgatctgctgcgcaaggtgagcatcgaggcgttcgaatcgcgggaattcgacggccaaccggaatcacctatcgagggattcgaagagttgcgtgcgctacttgccgaacatatgcgcacacgaggcgtacaatgcggcgtccgcaacgtgatggtgctctccggctccgagcagggcatcgacctcatcgtgcgcgcgttcatcaaccccggcgactgcgtgctggtcgaacaatccacgttcttcccggcattgcagaccttccgctcggcggatgcgcgtatcatcggcgttccagtggacgagcacggtatgcgtacagacctgttggacggctattgcgcgcgattccggcccaagctcatctacaccgtcccgacgttccaaaaccctaccggtaccacgctgccgcccgaacgacgcagcgaactcatcgacgtggcgcggcgctatcagtgtctgatcgtggaagacgatgcttacggcgatttgtggtacggcgggggatcgtccgacgcacatcgccccataccgcttaagggcatggagaatgcgggatacgtgatgtatttgtcgacgttctcgaaaaccgtcacttcgggcctgcgcacgggatgggttgtggccgacccgcatgtgattaaccggctggcggctctgcggcgcatggtcgaccagcatacgagcacgtcatcgcagcgcatctgcctggaactgcttaaagaaggccgcgtcgccgaacatttgcgcggtttgatcaaggcttaccgcattcgacgagatgcggcaatcgcagcattggagcggtatgcgccggatgaagtgtattggaccgtgcctgcaggcggctactatatttgggtttccttaccggacggcgtgcgctctctggatgtattggaatcctgccgttcccaaggcgtcacgttcatgccgggcagcgtgttcgacgttgacgaaatggatgattcccatattcgtctcaactttgtgcgcccggatgctgctgacattgataccggcattcgaatcattggcgagacgatagcacagatgtagccaagtgactggctcattgcggttgtcgagttttttgatggctgcatacccacatcgatgggtgcattcgacgaatgaataagcgaggaagccatcatcagttcgctgtggcatgcgcatagcgttgtcgggcgaacggggcagaccacgtggtcgttgcgtgacctggccgatcgagccggcatcgcattgcccctggcgtagtggcgaggtggcgcagtaacgagtcacgccatcgcgagccgatgatgcgaaatgcggaaccggtcgcggccatcaacggctatcatacatgcggaagcaacgatacgttggcgtcagcacatccatctgactccagaaagggacacgatatgaccacatcctccgtttcgccggtgaccactgaactggcgggcagcgaaaccggcatcacgtttatcattcacgccggagcgggcagtcgtggcaagcacagcacgcctgaacgcatcgcccaggtcgaacttgatctgcagcgcgccctcgatgccggataccagttgttggaatccggagcaccggcgcatgaggctgtggtcgccgccatccacgtcatggaagacgctcccgaattcaacgccggccgtggtgccgccctgaccagcgatggcatcgcccagatggacgcctgcctgatgaccggcgatggcgaggtcggtgcggtcaccggcgtaagcaccgtgaagaacccgatcgatgcggcgcgtgccgtcaaagagcagaccaagcatgtgctgttcgcggacccgaccgatgccgagatcgccgattggggcgtcgcgaccgaaagcaacgagtacttcatcaccgaacagcgtcgtcagtccttggccgaggctcagtccggtggcgatgagtgggagaagcatggcaccatcggcgccgtggcgcgcgatgccgaaggcaatatcgccgccggcacgtccactggcggcatcaccaaccagatgcacggtcgtgtgggcgattcgccgctgcccggttgcggcacgttcgccaaccagtccacggtggcggtgtcctgcaccggcatcggcgaggcgttcatcaaggtggtcgccgcccatcaggtgtcggatcgtgtgcgtttcgccggcgagaacgtcgaggatgccgcgacggccactttggacgaagtcgccgcgcatcatggcgatggtggcatgatcgttctgccggcggtcggccgtggcgtggtcgcctacaacagcgagatgatgaacttcggataccgtagcgcgcaaggcggtaaggtgcagggctgattgcccccctgtattgcggcatatatcataatggccggtgtgctgcggattcttggtaaggaatccgcagcacaccggccattcatgtatgcggcaagtgccgccgatcagtgcggcagtgcgcgctacttggtgatcgtgttgtacgtgggcatgttcgtgtaatcgaactgcacgttcttcacgttctgtgcagacacggcggcgaaacgtttgaccgggaatactggggtaatacgcaacttcatcgctcctcttcctcgaatgaaactatgttccattggtatgagccagccacgtacggtattcgtgtctggcctgccacacaatgatgcagccgtatatacgggcacagcattgcgcggcaccggtccaaaaactcatgtccgccagcgcaacgcgactacgtaccttatgccggtctgcgcgtagaatagaacggctgcgatattgggttattcacggaggaatggatgcgacgctggctgatcaatgtagccaaaaatgagacgattctcatcgtcgccgcaatactcgccctgatttcgtgtttcattgtgccgccggacgccgattacaaaagctacattcacgccagcaccatcagccagctcatctgcctgatgattgtggtgtgcggattccagcgtatcggcgtgttccgcatcgtcggttcgcgattgctggagaaggtcagcaccatgcgcggactggtcattacgcttgtcgctttgacgttcttttccgcgatgttcatcaccaatgacgttgcgctggtcacgtttgtgccgttcgcggtggccgtgctcatcatggctgggcaagaggataagaccatcctcgtggtcacgctgatgaccattggcgcgaacgtgggcagtatgctcaccccgatcggcaacgcgcacaacctgtatctcaaagccctgaccggcatgccgaccatggaattcctcggcatcatggcaccgtattccggcacggcggccgtgttgctggtcatcgtgatttccgtggtgtttggcggcaaaccggtcggcgacctgggcgacctcgaaaccggcgtgctggctcccgagcgcaacaaacaccagcccgacgagattcgtatcaccggctacggcgccggttatggcggctggcgcaccatcgtctactcgctgctgttcatcgtctgcctactggccgtctccgacgtgattcccctgtgggtgatgtgcgtgatcgtggtcgtcgtgttcctgttcaccgatcggcgcgtattcaaatacgtggattggggactgccgctcaccttctgcatgttcttcatcttcatcggcaacatgaagcgcgtgcccgaattctacgaactggcgcgctcgctggtcggcggccatccgctggaagtggcggtggcgtccagccaggtcatcagcaatgtacccaccacgattctgctttccggcttctgcgaccaatggcgcgatctgatcattggcaccaatttgggcggcatgggtacgctcatcgcctcgatggcctcgcttatttcttacaagaacgtcgtgcgccaatacccgcacaagaaaggccggtatctggccgtctactccgccgtcaacgttctgtttttggccgtattgctgaccttgagctggatcatcgagccgagtctctgagcccagccatctccaccccgctgacgggggctgtcggcgaagccgactgggccggtctaccgcgcgtatacggtgggggagccggtcagtcggctcatggccgactgcgggatgtcatgaatgcggccgatggtggcatccagcgtggatacgccggatacgccgtctgtgttggctgtgttggctgcagaggtgatgctggatacgccgactgcggacgatgatacggccgcaaccatcggctgacgataggcgttggagttgcgggccagccgggcgagcgcagggcgctgcctgcggaacagattgataaacataccgcatactccttcatcgttggccggcggtcttctggccgccgtggtttccatcctgccctcccgtgcttgtattcgctatgggggatagcccctattattccctgaatctgcacgattccccctcatccttgagggtgattctaacggcaaaggaatcggcctaatggccgatgtcaatcaacgcgaagccaccagcgtgacgctgtacggcttgatcttcatcgccagcaatgaagacggcgacggcaatgtgtaagcccgacgttccggcacaatcgcccccgaagcctcgccgcggtatccgatagtggttttcgccgtcggactggcgcttaacgtcgtcacctccaaacgcaccggtcgcgatggcgaggcgcccagcccggccagtccgcgcgcgatttccaacgtcacatccaccggggaatcggaggtattgacgattttgatgtaacggcaggcgtcatccccgtcatgtccggtggcactgacatacagatgtttggcggggcgtgacgcggtctgctcgatggacacggcatacgtcgtatcgcccagatgcgtggaaaacagccgctccacctcataattcaccgtggggttcacatgcgccggattgagttcgataagattctgcgcccaccccttagccgggatatgcgcgagcagcggtgcataggaggtcatgcgcaccacgtcggaattgcgctcgcaaccggtcaggaacgcggcctcgccgagtgccgacttccacgtgttcgcgccctgttcggtctgcggttggccggcaaaatagccgttggctgaatattcgccgaaatagacgccggcgccgcaacgcgggtaagcgtcgaatcgtgacgcttggtatgcaaaccattcgggggagtggtaagaatgttcgtcgacgataatcgcgtcaccgatggcggaatcatgtgccccggaatcggttgcggccaacgctcgcgcatggtcccagctgcgtttcatcgtcggctggaaggggaacagtccggcgctcatcacacacagcatatccgggtatcgttcgtgaatggcctcgctgatcatgtcaaacttggccacgtagtcagccccgaagttttcgttgcccacgccgatcatgtccaggccgaacggttctggatggcccatatcacgccggaccgcggcccacgagctggactccggatcgccattcgcgaattcgatgaggtccaggtagtcctgaatcacattgttgcggaaagtggccgaattgatatccatgtggcgcggatcgcggccgggcgactggcatgcgatgccggcgaacagagtgggcagcggcttggccttgagatcctcgcacaggcagaaatactcgtagaagccgatctgatagctctgcgaatagctggaaccatccggcatcttgaacgaccacatcgaatactgttggcgtcgcgcggccagggagccgacggtatccttccagcgatattcattgccgggcgtcacaccttcgacgatgcagccgccggggaatcgcagaaacgctggatgcaacgcctgaatggtttccaccagatcgcggcgcagcttgccgtaacgccatttcgggtcgcccgcgccccaatagtccgcatccatgaactgcaccagatccaggtcgaacgtggtgcgttcgccggcgtcaatggtgatacgcagcttgccgtaatcggtgttcaggccggttacgtcggcgttgaaccggtaccagccgtcacggccgatggcgatggcaccatccgacgaatccggactgatcgaaacgccggaatcctgcgcattggcaccatcgtcctgcctcagaccggtctcttccgtatcgtcaagcggatctgcgtccacgatatacgacaatcgagtggtgctggtgagcggcagaccgtacctatcgaccacgccgacggacagcttggcccgcccatgaaccggacgtaccgcgagactgacggaataggtgtggtcggcgacgatggagaacgcgggctcgcccccgttgtcgccgcctccgttatagccgaggttttccagatatgcagggccggtttcggaaggaacatcggacgtgatgcgagcgtatcggctatgtgcgtgaattggcggggcggggcagtcggtggtcacccgctggccgtgaatcccgcgtatctcactgccgaggctggcggcggaacagttgatgaaatcccagaaacgcagggaatcggcctgtgtacgccatcgttcggcgccggccatacgccacgtgtgatggtcgagatagacgccgtcaaaactgtagttgttcaccatgttggcgttcagcccgccatccgcaccatggttgatgtcctcgaagaacacgccgtacagccgcccgcttgtgtgatgggtggggcttcccacgctaatccgcaccatggttttgattgtagagggaatggagcggaaaggtaaacggaagagttcgctcaccgttcatgttgcggtcaatccaagtcgactgttcgccggtatacagccggtaccctcgaaacaggaatggaaaatacggacgactaggagcgcggctgtgcaatcctcggtgggaatacgtgagcgcatcgaccacgtgtatccgtcgctgcgtccggcggagcgcgccgtggcccagtatattcgggatcatatcgaggaggcggccgacctgaccgtcggccagatggccgacatcgcccacgtcagccagccgacggtgattcgtttcgcccgcaagctcggtttcggcggttaccgtgaactgcggtacgtgttgcgccatccggccgccgagcacaaagtgaccttcaatccgttggctggattcgatctgaatccgtgggatggcgaagatgagattcccggcaaagcggcctatggcgcgaaggcgctgatcgatgagctgcacagtgcgttggaccccaaggcctatcgcaaggcggtcgccctactcgccgaatcggagttcatcgatattttcggcgtggagaactcgttgacaccggcgatggatctgttcaccaagctcggctacctgggactgacatgccgtctcaataccgacgcttatctgcagcagatcggtgccgggcacctgccccacggcgctgtggccgtcgccttctcccattcgggcagttcggcggatacggtcaaagcgttgcgattggcgaaatcgcatggcgcgaaaaccatcgccataaccaatgccatcggcgcgccgctggccagctgggccgacgtgacgttgctgacgggtcgtgactcgcacacgatctatggcaatgcgatcttctcgcgcgtggccgataccgcgctcgtggacatgctgtacatgggcgtgattctgtccgactacggccgtttctccaccgcgctcgacgaatccggtcgcatgattcgcgatcgcgtattcgagaactgagctgctgctttatcgtgccttgggctgtattgctctggtcgttgccgctttgttgccgctctggtcgttaccgtcctgaggcatgtgccagcgaatacgtagtggacttggcgtgcgtatgacgttcgatcttgccgctcaactccagctggtccaagagttgcgtcatctgatccttgttcaggccaagcgctttctgcatggttttacggctgagcttcacgccgcggaacgcgaggaaattgagcgtgaactgctccaacgtttgaggcgacggttccagcgtcgctgtatcgagcgggcgggtactgacctggtcgtcaccgtccgggcgctcgccgaatccactgccgagaatcagcgtctgcaatggcgcgcagccgatgatgcgtgcgccggccaaagcatctgcggcgttatccgtcatgcgctgaatcgtggggaatgaatacattttggcgcgctgcgcttcgtcagtggtgctgggcgcggcggaagcatcggtatcggtccgatgcaaggatgcggcctcggccgagaccgggatgggcagcaccatcgccaccgaagtggggcccacgcgcagttgcggactgaccgcgctctgcgcgtaggcgtccataatgcgttgaataccggtaccgcagttctcgcagaggcccaaatcggcgaacaattcagccaaacgcggggtgcgtggctggcatacgccgttgagcagatcgttgatttccaaaccatcggtcaggccgccgagcgagacgatttccaggcgggaatcgaagatattgatcagtgtggggccggagtatgtgtaatcgcgatgttccagtgcgttgaccaatgcttcgcgcagggctatggccgggtattggccggattcgttgatgccgttcagcagggcgctggcttggtcgagctggcgcagcaccgagccggtgaatgtgtgacgttcgcgaatggcgtttttgccattgccctcgaaaatggtggccttgataacgaacgggcattggttggacagcagggtggcaagcgacgattcggtggcgctggtgaaggtgttgttggtgccggtgttggtgatgctgccggcgggggcattgccggcatcggcagagacggatgcagccatgttggtcacaaccgggctttcccaatccctgccttcactggcaaaacgaccctgtgcgtatgtgaaagtgagctcaccactatcgcctgcgacggtctggcccgatgcggcgtgatctacgttgctctccgttgtccccatatcgccgatggtaccggtgcaagccgacgttacgccgaggtgttttacacccctacggctagacttacatgagtttggccccgtagctcagctggatagagcatgtgacttctaatctcaaggtcgacggttcgagcccgtccggggtcacgatgcaataaacccttggtccctcatcgtctgtgggggccaggggcttttgagtattatgccggtctgggtccgtctggagcctgaaccgtcgaccttgagatcagcggttatatgcttatcattgccatccgggaacacccttaaggggtgcggctcctgcataacggttatacactggcttgagatgtgctggataataaccagctatcgcgcgtccgccaatggcgacgaacgaaggaagaagggcccgtgccgcgaacaatcatcgaggtaagaaacctacgcaaggaataccccgtcgaggatgagacggtggtggcgcttgaccgtgtcaatctcagtatcccgcaaggccagatctgctgcattttcggcgaatccggctccggcaaatccacgctgctcaaccagttggccggcatggaaaaaccgacgcgcggcggcgtgcgcatcggcggcgtacccgtcagcaaactcgacgagcgtgagctggcggccttccgccagaagcatctcggcttcgtattccagtcgtacaacctgctacccaatctgaccgcgctcgaaaacgtggcaatgccgctgatgttccgcggcgtgcccaaggaacagcgcgaacgtgcggcgcgtggcgtactcaaacgagtcgggctcggccatcgtctcagccattacccgcgccagatgtcgggcggccaacagcagcgcgtcggcatcgcccgggcgtttgtgaccaagcccgaggtggtgttcgccgatgagccgaccggcaaccttgactccaaaaccaaaaccgaggtcatgacgatgatctgcgcattcgcccatgacttcaaccagaccatcgtgctggtcacacacgatccgcagatggcctcatacgccgaccgcattgtcaccttgctcgatggccgcatcaccagcgatcggctcaacaccgacctttcccgcccaactgttccgtccacgccgtccgccccaaccacaccaactacaccgtccacgccgtccgcccatagaacccaaggaactgaccgatgaagcacctctcccaccacaccatcgccatcatcgtcgcgttgctttccacgctgtcactggcacttgccgtcatctcccttccgcatcaggcgtacgcggtcgacggcacagacggcacaagcggcacgaacagtacgtctcagggaagcgacggcgattccgcgccgatcgccggaccggtgcccaacatcatcatcaccaacttcgcgtatggaggtgattccgtggccgccggatccaaattcaatctcgacttcaccttccagaacaaggggcaggtggcggtgacgaacatggtcgtcaccgtggacggcggcgagagcttcgccatcgcgggaggcacgaacacgttctacgtcgacgcgctgtgggccggttacgccatgacgcaaagcgtgccgatgcaggcgctcgcctccgcgaaaagcggtgcccagtccgtgaccgtgaacttccgatacgagtatgtggacgccagcgcccgctcctcaagccagtctgacgtcaagatttccgtgccgatcagtcagcctgaccggttcgaaatcagtgatcccgtagtgcccgaccaggtgatcgccggccaggaaaacacggtcacgatggaatatgtgaacaagggcaaaggcgatatcgccaacgtcgaggccacgatggagggcgaaggtttcgatgccacgatgaaaacccagtacgtgggcaatgtggcttccggcgccaccggcacgattggttacgccttcacaccgcacgcgtcaggcgagctgaagaccacgctcaaagtcacgtacgaggattccgacggacagaccaagaccaaggaattcccgctcaccatacccgtaaccgatatgcagccgatggatgattccggcatggccgatccgaacatggaccagaacgccaatcagggattgccggtgctggtgtatgtggtcatcgtcgtgatcgccgtggtcattatcgtggtgattgtgctgctggtgcgtcgccggcgcaagcagaaggccaagaagaacgatattgatgaggactgggatgattggtccgaaggcaaggatgataagaccgataccggcgtgacggatggtgctgcggcagacaccgctcctatcacaccagtcaccccagcctcatcagtcgcaccagccggctcatcccacaaggcctgaaaggcccgaccatgcgattcggcgacatactgcggctctgcagacaaaacctatggcggcgtaaatcccgtacgattctgaccgtgctgggcgttatcgtcggctgctgctcgattgtgctcatggtctctttgggccaaggcattaacgagcagaacgagaagatgctcaaatcgatgggcgatctgtccatcgtcaccgtgtacaccaacggttatgccggtccgatggacgatggcggctcgtccaagatgggcgataccaagctcgacgacaaggccgtggaatccttccgcgcgatgagcggcgtatccggcgtgacgccgatgatgaacttcccttataacgtgacggccagagccggcgcgggcggccgttacatctatgattacgtgcagatcatgggcatcgacatgacccagctcgaccagatgggctacaagctcgtcggtggcgagaaaccggtcaaaaaagaccaggtgcttgccggcgaatggttcgcctatggtttcatggacaccctgaagaacggcgaacaacgcaccagcacacgtggcggtcagtattcctcatgcacgtttaaccaggccaccggccagtgcgagaaagatcaggacgaagatccgttcttcgacccgctcgccacgcaaattagtctgaccaccggcaccaattatcagggcgaccagtacagcatgaacatgtacggcggcggtggcggcgcgggcggcggtggcggcgcgggcggcgcaagcggcagcgccgcgggtcagtcggaaaacgtcaccctcgatgtgcgggcttccggcattgtggcgggcgactacaacaagggctatgccacctccgacggtctggtcatggatttgcaggcgttgaaggaactggccgccaaagtcgatccggccgccgccaaaaaagccaccgcctatgatcaagtgctggtcaaggccgccgacctcaagtccgtgcccgaagtcgaatcacagatcaaagcgttgggctacgagacctcctcctatgaagacatgcgtaagtcgttggaagaacagtcgcgcgcgattcagctgattctgggcggtatcggtgcggtttcgctgttggttgcggccatcggcatcgccaacacaatggttatgtccgtaaccgagcgcacgcgcgagatcggcattatgaaggcgcttggctgctacgttcgtgacattcgcgtcatgtttcttgcggaggccggcgcgatcggattcttcggcggattgatcggctgcgtgctgagcggactgatatcgctgggcatcaacgttgtcggcgcgttgtatgcgggcggcatgagcggcggcatgtctggcggtatggtcagcggtgccggcgggggctccggcgacggtaccggtggcggaacatctatctggaccatactctggcaggcgatagttggtggcgagaatgtgacccgttattcggtgattccgtggtggctgttcctgttcgccgtgctgttttccacgctgatcggcttgctattcggcttcggcccggccaataaagccgttaaaatcccggccctagacgccatcaaaaacaacgagtgatcgcctctgtcacctgctccaccgttagtccataacgttcgttcagttcgcccagcgacacgcggtcggtaaattccttggctgcgccgaagttcagcacacgaggattacggctgccgtccgagacatgatgattcgcatagtatgcggtcactttctcgccccagccgccttcaagctgcccgtcttcaagggtgatgacctgctggtggccatcacgcaacgactccagtacgtctgaatccagcgacgtgcactggcgcgggtcgataaccgttgccgtgatgccataatcgtcagacaatgcggcggccgtctgctccgccaacggatacgcattgcccagtccgatgatcgcgacttgcgagcccgtctgattgacccgccaatccagcatgggacgcgcaccggcatgctgagccgttacgctaacggtcccgcggactgttgcggcagatatgcccccgctggcggagctggcggaggctggcagcgaagctgactgggggcggtcagcaatctgcccacccgtcaccggcagcagcgtcgcatcccgttccgccgccagaatcgcctcgcccggcacccgaatcaccgccggaccagcaggggcgtccgccgaaccggccggcgcggtagcccatgccaaatcagccagatagtcgcgagccgaagtcggcaccagcatcgtgacccctggaatattggagaacatcgtcacgtcatatgcgccggaatgcgtattgtccgaaccggacaagccgcccagaaaatcaagtaccgtgactcgcgaacggttcaggctcatctcctggaagaactggtcgtacgcgcgctggaagaaggacgccgtggtggccaccaccggcgtgccacccgcccgtgcgatgccggcggcgtacgccacggcatgcgattcggtgatgcccgtgtctacataatgtgcgcccgcgcgctctcggaactcatgggtgatgccgttcgagcccggcgtggcgggggagatgaccacgagtcctggctcggcggcgaaacgcggttcgagcgcggccatcgccattttgccgtaatgcttgcgcggatcgtccggcttgccgattgcggcatccggattctgccaatgcgaggcctcgcactggccttcatgtggttcgtgatcggacaggttgcagtgatccgaatgccacggctcgctgtggttcacgttatcggtggggtgcacgccggtgggggagtcgagtgagaccggtaaggtcgaggcgttttgttgattggcgtgagtctcctcactgtcatatcccgcgcccttcagcgtgtggatatggaccaccaccggatggtcgatatcgcgcacttcctcgaaagccgcgaccagcgcggaaacatcgttgccggccgccacataccgataatccaagccaaacgcgttgaacagattcggctgggcggtgccgccggacgcgcgcaggcgggcgagcggaccgtacatgccaccgaaatcgccggcaatcgacatctcattgtcgttgaacacaatgatgagattgccgccctgctcagccgcgttgttcagtccttcaaacgccacgcccgaactcagcgaaccgtcgccgatcacggcgatcacattgccgatgccgctgttcgggccttccatatcgcgggttttcgccaaaccgcaagccagtgaaatcgaggtaccggtgtggccgagcacgaactggtcgtgtttgctttcatccggattggtgaagccagtcacctcgctgaaacggtccgggtccagataggcgtcggcgcggcccgtgagcatcttatgcacgtagctttggtgggacacgtcgaacacgatacggtcgcacggcgagtcgaatacgcgatgcagggccaccgtggcctccaccatgcccagattggagccgatatgaccgccgtgttggtggccatatgccagcagcgtggcgcgaatctcacggcagagttcggcgagctcgtcgggggcaagggccttgacatcggccgggctggcaatgcggctcagcagatgggagtcgtcgccatgggaaggggtaatgctcggggggatgtcgtgaaggcgcgcggtcccctcggcggcaccggagacggcgaaggaatcgcttgaatcaaatccgtttcctgacgcgttgcgcataccctcgaatctcccttcgctagtctttccgaagttgaatgctaacgcccggcattgtccgaggtccacatgacgaatcaatgcccccaacatctccgtaaatgggtgattcgttcgctgcgcgatgtgggacaatgaatgcggtaattccttttgataccaaggagcgcgcaatgaaggccgtatacgcatccaccgtcaaccatgacgatccgcttgccgcgttggcggtgggcgagcagcccgaaccccaggcccgcccgttctggtcgaccgtttcggtgcgtgcggtgaccgtaaaccatcacgacgtctggtcgctacagggtgtgggtctcgccgccgaacagacgccgatgatcctgggcaccgatgccgtgggcattctggacgaggacatccccggcaagcatgggctcaaggccggcagcgaagtggtgctgtacacgttcgtcggcaccgatggcgcgggcgtggccccgggcgagcgccgcacgatcctctccgagaaataccccggcacgatggccgagaagactgccgtgccgtccgccaacgtgttcgccaagcccgcaaacctcaccacggctgaggcggccgcactcggcaccagctggctgaccgcctactcgctgttgttcgatgccgccggcatcaagccgggcgactccgtgctcattcagggcgcgggcggcggcgtgtccactgcggccatccagctcgcccatgccgccggtctggaagtgttcgtcacctcgcgtgacgcggacaagcgcgccaaagcgctgaaacttggcgcgaacgccgcgctggagaccggtgcgcggttgccgcgcaaggtcgatgcggtgatcgagtccgtgggggcggccacatggggccattcaatgaaatccgtgcgccccggcggcaccatcgccatctgcggcgccaccaccggcgaccagcccggtgccgaactgacccggttgttcttccaggacatccgcgtgcagggctgcacgatgggttcgcgcgaggatttcgcacgattgctgcgcttcgtggagcacgccgacctgcatccggtgatcgattccgtggtcagcgggttggacgccgcccccgaggcgttcgccagaatgatcgccggcgacatgttcggcaagatcgttattgagctgtaaacctcacagaattatgtattgagaacgattcgctgcgtggcttaactccgctatcaggagtacagtgggccttattctcaataactagggagtaaatgataatggcaaatgaatccaagcccgaagtcgcagtggtcatgggatcggccagcgactgggagaccatgaagcgcgcctgcgatattctcgaccagttcggcgtcgcctaccacaagcaggtcatctccgcgcaccgcacgcccgagctcatggccgagttcgcgcacaacgcccgcgccaatggcctgaaggtcattatcgccggtgccggcggtgccgcccacctgccgggcatgatcgccgcgcagaccacactgcccgtaatcggcgtgcccgtgcgctcccacgccctgtccggctgggattcgctgctgtccatcgtgcagatgcccggcggcattccggtggccaccaccgccgtcggcaactccggtgccaccaacgccggcctgctcgccgtgcagatgctctccgccttcgagcccgaactggccgacaagcttgaggattaccgtaacgaactgaaagaaaaggtggctgaatccaatgcccagcttgtctgaggaaacaggcggtcgtgtttcgatgctgatgccgggatcgaccatcggcatcatcggcggcggccagctcggccgcatgatggctttgtccgcccgctacatgggcttccgcgtcggcgtgcttgacccgacgccgaactgcccgaccggtcaggtggccgacttccagatcaccgccgaatacgatgacaaaaccgccatccatgatctggccgtgcagtccgacgtgctcacctacgagttcgagaacgtggacgccgatgccatcgacgaggtgcgcggcatcaccgccaccccgcagggcactgacttgctgcgcgtgacccagcaccgcgtgcatgagaagcggttcatcaacgaccacggcaccgccaccgcaccgtggcgcgccgtcaacaacttcgatgagcttgacgccgcattggatgatattcattatccggccgtgctgaagaccgtgtccggcggctacgacggccacggtcagctcgtgctgcgttccgacgccgacttggagaagatccgctcccgttccgaccgtggtggcggcttcccgccgagcatcctggaaggcttcgtcgacttcgcattcgaggcttcgatcctggtctccggcaacggcaaggacttcgtcaccttccccatcgtgcgtaacgagcaccgcaacaacatcctgcacatgaccatcgcccccgccgaagtgtccgaacatgtggctcgcgaagcgcatgaactggcgattcgcttggccaagggcttcgaactggctggcacgctggccatcgaa

SEQ ID NO: 3848 - DNA, 25164 bp, Unknown
  R35_2m  MAG No. k141_13209
gctgggcttgacctccgtgccgaccgccggtgacctcttcctggtcgcctccgatgatcgtgccgctcgccagatcgccgagaagcgtcaggccaccgagcgtgccgcccagctggccaagcgtcgcaaggtcgtctccctcgaggacttcaagaagaagttcgccgagtccgagatcgacatgctcaatattgtcatcaagggcgattcgtccggttcggtcgaggcgctcgaggattccttgatgaagatcgaggtatccgacgaggtcggcatccaggtcatccaccgcggcgtcggtgcaatcacccagaatgatgtcaacctggccacggtcgacaaggccgtcatcatcggcttcaacgtacgcccgaaccgtcaggtggcggacctcgccgagcgcgagggcgtggagatcaagtactactcggtcatctaccgtgcgatcgaagacatcgaggcatccctcaagggcatgctcaagccggaatacgaagaggtcgtcacctctcactccgagatccgcgagatcttccgctcctccaagttcggcaacatcgccggcgtcatggtgcaggacggcgaggtcaagcgtggtacgaagtgccgtatcctgcgcaacggcgtggccacggtcaacgacctcgagatctcctcgctgcgtcgcttcaaggacgacgttcagtccgtcaaggaaggctacgaggctggtatcaacctcggcaccttcaacgacattgaactcggcgacatcatcgagaccttcgagatgcaggaagtcgagcgcaagtagtcattgttaagccctctctgacgagtgggctgtcagccgcaggctgactgggggagagacatggtagttccatgaattttctctcccccagcctcactgcgttcggcagcccctcgtcagagggggctcaagtctagaaaaggaaattcctatggcaggaaccaacccgcgcgccgcacgtattgcggccttgattcagcgtgtcgtcgcctcctccattgagcgcgaactgcatgacaagcgactcgccagcatcaccgtcaccgaagttcgtgtgaccaacgatctgcagatcgccaaggtctactggacccagctcggccacgaaggccacgaggaaggcgaacgcaagcgcgcccagcaggcgctcgatcaggccaaggggcacctgcgttctctggtgggccacaaggctggcctgcgcctgactccgcagctccaattcgtgttcgatgaagtgcccggcgaggctcacgagatcgaagacattctcgccgtggccaagaagcgtgacgaagaactcgcccgcgcccgcgccaccgcccagtacgccggcgacgccgatccgtacaagcacgacgacgaggccgaagccgagggcgatgagttcgagtccgacgaggagtagtgtgcttcatacaacacccagcggcctactcatcatcgacaagccacaaggcgtgaccagtttcgacgccgtcgccgccgtgcgcggcgcgttgcacatcaagaaggtcggtcacgccggcacccttgaccccatggccactggcacgctggtcatcgccttcggccacgccacgcgactgctcaacgccatcgtggcgcatgacaaaacctacgaggccaccatacgcctcggcctgcgcaccactaccgacgatgccgaaggcgaggcgcttgtcgatgatgaagcccgctcccgctggcaaacgctgtcagcgcagctgactgagggcggccagagcggcgaaccaacggcgtcaccaactgcctcatggcaaaacctgctcactcgcaccatcgccaccaatttcaccggcgatatcgaacaagtacccaatacgttctccgccatcaaaatcaacggccagcgtgcctacgacttggctcgcgaaggcaaggatgtggaactcaagccccgcctggtgaccatcagcgaattcaccgtgctggatatccgcagcggattcgtagcaggggagcaggccgctgaaccattgcgggaagacgcgaacacgggaacgattcccgcacttgatattgacgtgcgggtcagctgttcatcgggcacctatatccgcgcgctcgcccgcgacctcggcaatgaacttggcgtcggcggatacctgacccgtttgcgccgtacgcgagtcggccgattcgcgttgccggacgataccagcggacttatcgcctctgaggcgatgcttgacacgcgaacccataccgtcaccgcacataccgatcagaagacgttcactaatcgggaagggcaaaccgtcacgcgcaacaagtgcgtattgaacactcctgaaggccttgccggtgacgagcgccgcaactggctgcttgaccatgccctcaccatggaacaggccgctcgaggcgcgatgccggcgcttgacatcacacctgaggaagccagcgaattgcgcttcggccgccgtatcgagcgtacaatcagcgagcccactgccgccattgtgccgcaaacgcatgatgtggcggcgattatcgagcgtgccaacgctcatcaggccaagccggtcaccgtattccccctcgcgtaaagtagacgcggtgaaaagtgcagcttgatacaggccgcgcacaacaacgcctatattgcatgaataacatcgcacggataaaaggaacagcacactgatggatatcacgcacctgacccctgacgccgaaggttcgattgaatggccctcgttcagtaacgacaagaaggccgtggtgacattgggcgcatttgatggcatgcacttgggacatcaggcggtgatcaagcgtgtggtggaactcgcgcaccagcatgatgctttttccgtggtgattctgtttgacccgcgccccgcattcgtgcacggctgggccgcctcgcaccatggcgaggaacccgcggtgcagaacgtggatgccgaagccttgacaagtgtggatgatcgactgcaccgcatggaacagttcggcgtggaccatgtgttggtggtgcactacacgctggccttcgcagccatgtcatacattttcttccttggcagactcaccggcaagctgggcatgcgtacgctggtcctcgggcaggatgccgccatgggcaaggggcgagaaggtgatgtgaagcatatcgccaatcttgccgccgccaccggtgtattcgaacttgatgtggtcgatgaccgtggcccgggtgaagtgcgcattccgcgcgatttcaagccggaagccccgagcgaatggggagagcccgtcgacccgctggccaatgccaccaaggccgagcgccgcgcatggagcaagaagaaccaggccaaggcaatgcgcgcctggagctccaccaatgtgcgctacctgctggctcatggccgaatccaggatgccaacgccattctgggtgctccgcacgccatcgaaggcgaagtggtacacggtgaggagcgcggccgcaccatcggattccccaccgccaatcttggctccgacattgcaggctacattccggtcgacggcgtctatgccggttggctggtagatggtgagaaccgctggcctgccgccatctccattggcaccaaacccaccttcagcgagaaaacaggactcaacgaacgcgtggtggaggcctattgcatcaccgatgagtggattgatctgtacgaccataaggttcgcgttgaattcgtcggtttcctgcgcccgcaggtcaagtttgatggtcccgaccaactcgttgacgaactcaagcgcaacgtcgaagagaccaagtgtcttaccgcctgaggcatatctcagggctatttacgcactcccaaggcatctaaggcgtcggacaatgtgttggactccaccagccgaagtccctcgacatgcaccggcttgcgcagcggaggaatgactgccgtcgtaaagccaaggcgcgcggcctcgcgaaggcgatattccatacgcggtaccgggcgcacctgaccggtcagggaaatctcgccaatggcgcacgtggctcgcgcaatgggttttgacgtggcggcgctcgccagtgccgccactatcgccaaatcggaaccgggctccttggcctggcccccggcaatagtggagatatacaggtcgttggacagcaggttgagcttgctgtgacggtagagcaccgcgaccagcatggcgatacggctggggtccacgccattgaccgcacgtcgaggtgtgggcagcaccgacgtggtgaccagagcctgtacttcgataggcagactgcgatgcccatccaatgtgaacgtcacacaggtgccttccatgggtgccgcgttggccgcatcagggccgtctccagacaggaacaatccggcgggatcggtgacctcttcgatgccctcaccgctcatgtcgaaacagccgacttcatcggtcggaccaaaacgattcttcaccgctcgcaacattctcagcgcggtctcgctgtcgccttcgaattggcagaccacatcgaccagatgctccaatgtgcgcgggcctgcaatcgaaccgtccttggtcacatgaccaaccagaaataccggaatgtcaagcgtcttagcggtatctatcagcgcgcttgccacttcgcgcacctgagtcgaaccgccggaaatgccatcgacctcctgcgagacgatggtctgcgccgaatccacaatggccaaggccggcttgttctgttcgatcagccccaatactgtggacagatcggtggtggaggccagtaacaagttcggctccaccgcgttgatgcgggaagcgcgcaaacgaacctgcgcctgtgattcctcgccggaaatgtacagcacggtattggcatgtaccgacggtgcgttgccctgtaccgacaccgtgtttgatgtgccgccctgcgcccggcccgactgttgggcagaccgctgaccggctcctcggaatgtactgtctcccgccacaacgcgcgcaatattgccggccgtctgcaacagcaatgtcgacttgccgatacccggttcgcccgctatcagcgtcactgaacccggcaccacgccaccgccgagcacacggtcgaattcggaaaacccggtaccgagccgctcgacgctttccgtgcccacttcggtaatcggacgggctgcagatctggcgttgtcggcaaccgtaaccgactgcgtgcgtgatgttcggccgggagcggtcgtgcgagagcctgccgccggccgagcctcgtgaaattcctcgaccgtgccccactgaccacactcggggcaacggccgtaccacttcggcccgttccaaccgcattcggaacatacatactgcacacttgatttcgccatggtctcaccctaacccaaacaccagcggacggtaaatttttaccgttcacaagagtttcacgcggcttgcgcacaacgactaagattacggccgtctagcgtcacgcggctgtgagagaatcggggtatgactaatagtgagaactcctcgaccacacaatcccatggcaagttgattgcagtggtggttgccgcagctgttgtgattatcctggcagtgctttcggcctttgtgtggccgggttgggccatccagaagaatgatggcacctccactaccacccaaaacagccagcagaaaaccgaatcatccgagccgatcaagccgaccatcgacgccacagctttgccggatgatgccagtgagctgttgaaggccatgccggacagcgtgctgaattacgcgcgtaccaaggcggatgcctccacgacgtggaattccgcgtcgccgctcgaggagtacactctgacctactccactggtgatgccgccaaggatgtcacgctggtcgccgcgcagtggtcgtcggcggacaatgccaagacccagtacgatgcgttggtcgctgcgcagaccggcgatgagtcggcatccggcaacgtcaaggtttccggcaacgtcacgggcgcgtacgtggtgaaggccgatgcctccaacagcaagaacgccgctgccatctggcagaacgataccgtggtcttccaagctaccggcaccaaggaagcggtcgatcgcttctaccagaagttcccgatgtagtatctagtatcggctgtcagctgctgcacaaacttatgaacgttggggcatccacattgctgatgtggatgccccaactgcgttcggactatcgacaacatactggtttcctctgtctggcaacacgtgtattatggtgcaagttgcaacttttacgattaatcgaaatggaggcttcagatgggttctgtcatcaagaagcgccgcaagcggatgagcaagaagaagcaccgcaaactgctgcgtaagacccgccaccagcgtaagtagtcttacctgcaatcaaggcattagaaaccccgtgatcgttatggtcgcggggtttctctttttggctcctttgccttgttcgggcaacagtaaagcccgcacctgcgatgtacagatgcgggcttggaaaagttcagtgatgtgagacgatcacttgttggcgttggtcaacacgcgcgggccgttcgggtcgccgacgatgaccttgtcgaccatgttgaggaacaggccgtgctccaccacgccgaccgtgttgatgaggtcttcggccagctcctgcgggtgatcgatgcgctccaggtgcaggtccaccacgaagttgttctcgtcggtgcgcacttccttgccatcggcgtcaagacgaagcaccggcttgtagccgcggtcctcgaacttcttgatgacgtggccagcgccgaacggaatgacctcgaccggcagcgggaacttgccgatggtgtccacaaccttggactcgtccacaatccacacgatctggttggagttggtggccacgatcttctcccacagcagagcagcgccaccgcccttgataccgttgaagttcttgtcgacttcgtcggcgccgtcaatggtcacgtcgatgtggtccacgtcgtcgatgtccacgatcttgatgccgtagctttcagcctggacctgcgtgcggcgagacgtggttacgccagtgaactcaagaccttcctcctgatgacggcggccgagctcgtccaccaggaacttcacggtcgaaccagtgccgaggcctgcgatcatgccgttttcaacgagcttggcggcttcgatgccggccgccttcttcagcgcatcctgctgtgccttatccatggtttctcctttgccatccttgcctccgccgcatggatcaacggcgtgaagccttatctcctatcctaacgcgaatgagcgattttgtgtcatcgtgtccgattgcggtacatattcgtgtgtttgggtgttagtgtcgtacgaatggtgcgttggcgatggtcaggttgccgtcgccgtccacatagccttcgatttcgatgctgcctttgatcggcatcggctgcccgttgaaatacgggctcgttttcggcgcgggggagaaggtcagcgtaccggataccgtcagtccgcttggctttgcggggtgtacggggtgcgctgattgtacaggttgcgctgattgtgtcgctaagggtgacgaagacttggtctctggccttgtggcatccgtcgaatccgtcgccgcagccggcttgcgcaaacttgccgcatccgccttgccatccagcaccaactgcacgtctggaggcacatcggtgccatgtgcgtattcggagcccagtagcgactgccagccttcaatcggcagatagccgtcgcgcgcacccgaacggcaatcgcccgcataggtgcgtgccagttcatcgaccaactcattgccctcgttgccggcgtgacctttgacccatcggaaatccaccgggccagggcgttgtgagatctcacggtcgatcgcctgaataagctctttgttcttcacaggctttttctgcgaatttttccagccgttcttcttccagcctttgacccacttggtcgagcaattgatggcgtactgcgaatccgattcgatgagcaatggctcagggcccgggtgcgctcgcaaagcttccagcactgcgcacagctcaccaatctgattggtgccgttggtcgcgccgcccgcatcataaccatggtcgtcgtgcttatggccgggcttgccgccggcgttctgctcatgatcggcccaggcccagcccattggcccgtttggattccctaatgcggacccatctgtggatactgtgatagtcatgttctccaccctaacgcaagctgtgcaatctcttgctgaagtggggttgcccagtgcgaggcaaaacaacgtagtgaagagtgtgaataacatcacacctattgactttgcttgaaaaacatgccatcgcgcgtgaataggtgagcgctcacaagaaaaacaagacatttcctctctgcgggtgaggccggcaacaatggcgcatccggtatctggaatgagaataagggactgtacaaaaccagtgacggcaacatcgaaatcctcaaaccagaggcggacagcgatggttcgacctccacggccgcatccaagggcaccatgcttatcgcaggcaactccaaaaccgtggcactcggtccaggcggcatggccttggctcccggcctgccgctcggtcttggctggttcatccgacgccgcttgggattggatgcctccgacattctggaccgtaagctcggcttgaagtaacggctggttcggacgtgattgctgtcacgtacggatcatgacgacagcgcgaaggtcctcatcggtttacgtcgatgaggaccttcgcgcgcattaggggagtctgttgcgggctgcgctacgcgggtcatgctgcgcgggcgtgctatgcggacaaactacgcgaacaagtcgttcagtgcctcggcaatcgtcggatgcgtgaacaccatatcgcgcaacgtgctggccggcgcgtcaagatccatcgccaacttgacgatattgatcacctcgtgcgactcgacggaaagcagcatcgcacccagaatgcggccagtattgcgttccacaatcgccttcatcagaccatccggtcgccgcattacctgggccttcggcacagcggccaccggcaatcgcttgaccacataatccaatccggccgccttcgcctcgcgctcattcaatcccacgcgcgagtaaggcgtggcgaggaatgtgctcgacggcacatgcttgcggtccttcaccgtgtacggacggtcggaaccattgagctgcgaccacaccacgcgatagtcatccagtgaaatgtacgtgtgctgcgggccgccgttcacatcgcccagagcccaaatgtcggctgctgtggtgcgcagaagctcgtcgactttcacggcaccgcgttcggtgagctccacgccagctgcctcaagatgcagtccctcgacgttcggcgtacgtccggtggccaccagtaccgcgtcggtggtcaggcagaatcgggcttcagccggctcggcgaaccgcggctcgccatcgtctgatggtttcgtttgaacgtgtgacatcgtggcgtgatcggtcgggttgctagtggggctggtggttgttgtagtgtcggtggcgccggtggcgtcggtggcaccggtgatatcggtatgagcgttcccggtgccggcgggggtggaatcgcaagcttgcgatgcgccgcgagtcatacccttcaccgcaacggacaacctgacgccgccgtcagcagcaggcgcgatggccttggtatccgcgttgaacaggaacttgacgccctgcgcttccaactgtgcgcgaatcgcggccgccacatccgcatcctcgcgcggcaggaactcggcattgtgctgcagcacggtaaccgccgtgccgaaatcggcaaacatcgaggcaaactcaagtccaatgaatcctgaaccgataatcaccagtcgctgcggcatatcgtcgagatccatcagtccagtgctggtgtagacgccgggcgtagtgtggataccgggaatatccggaatgcgcggcgtggcaccggtattgatgaagatcttgctggcggtcacggcgaccgggccctcagcggtggcgatttccacgctatgagggccggtgaagtgagcgcggccggtgattacggtgatgttgtcttggtcggcgagcttgtgatagttcttgtcgcgcagcatcgaagtgacgcggcgcttctccttgatagcagcctcgaacgctgcttcgcgggtttcgggagtactgttcgcgccatcccgccgcgcctgttcggcggacaaaatcagtgacttggacggcaagcatccgatattgatgcaggtgccgccgtacatgtcggcgcttgcctcggcgacgacgaccttgcggccggctgcactgagcttggcagccaaggttttgccgcccttgccgaatccaatgatcagggcgtcggtggtgatagtgggggaggtgctgggtgtgctgatggacatggttacttccttacgtattcgagtgataagagtgcgttgtgctgatgtgttgtgtgccgtgcggcgtctgttttcttctttgactgccgaagcgttatcgactgatgctggctaggggaaacgcgcgggattattagcctttgcgctcgctgaatatctgttcggtgatgtcgtggatggtggtgtgttcgagttgttcgaggcaagtgcggttgagcccggcatagatgtcgttcatcactgcgcccattgaagatgacaccagacagtcctcgtgtacgtcgcccggtgtccagttcactttcacaaaagtggtgccggtggcttccgctaccgcgcgcaaagtgatttcggcggcgggccgggccagagcgtacccgccttcagcaccctctttagtggcgatgagtccggctgaggcgagcggtcgcattactttgcgcacgcgcgccgcattggtacatatgttctcggccaggatctgactgggcaggtgtgtggcgcgatggtcaaggtagaccaatgcgtgcactgccagtgaatggtcgccgttcatgaaacgacctccttaccgagtcgatactgtaactatgatgtgtacagttatgatactgtaatcatatcagatacagttagtgtgtcaaatcggggttgaagaggtggatgactatgtgtataagtgaggtgtccacatggttatccacaatgaatgtgtgtaagtgaagctaggaccacatacctcggatcggcttccgtttccgcacccactacccatatggtggtgtcatgaacaggatgaccgacggcatcaccaactatggagctctgccaggctctatatacgatcagcctccggaagaatcggaggcagtttttgttccgcccgaatttgcggggtcattttctactgactcgaaatacccgacttctcgcgactcgtcatcgccgaacagtggtgcacatgattctgcagcgacaccgaccatgagcgaaagcctcgcccagcgcagacgcgacatggtcgcacgctgcactgaggaagcgaaacgggcgggcaagaagctgcttttcggcatgaccacttccctcgctctgcaatccgtaccgattcccgccgattgcgacctcgactcggccaagctgcacactgtatccagcgttaagagcaagcggtttcgtacacgccatgcaccactgcaaacgcatatttggaaacatgcggctaaagccgccaatgtggaaatgaaccaacacgtgtttgcgctggacctgtttcacgtatgggcccaacttgccccgtatgtttcttttgagtccctgattgtgctcggggatgccgtcatcgctgctacgagcaaacagccagtattggctaaggatcgtgatgctgctgcaatctatcaggatctggtgaagttcgtggagcagtttacccgattcagagggcgcccgtcctgtgttcgagcattgctcctgatatcacctggtgctgattcgcccaaagaatcagaagaacgactctctctggtagcgcatgggattccacggccggttgcgaactatgtggtgccggatgcggcttttgcatctggagctcccataacgttggacttagcgtggccagagttcaaggtcgctgttgaatatgatggcgatcatcatcgtacgagtaagactcaatggcgccgtgaccaagagaaaaggggtgtgctggtcgggcggagatggctggtcttcgtcgccacggcggcaagtatcgctaacgaggacgctcgtgctgaattcgctttcaacgtggcgagggcgcttgcttcgcgcggtgccgtattcgagtttcatgtagttgccatgtctcttgaagagttggcgcagagcctgctgtgaccatgatgttcgaaacggactgatgtaaaggcaatatttgtacgacctgttgttgtggtgtgtgcttgatattgcatgccgttcgattgcgatgcctcgtagtgatggatttcgtgaatgactagtgttcgattgtggagggaaatgtgtcatagtggtcgattgggggtgttgtcggtgcattgagcgtggatttgcgccaatgggtgtgggacgctacgcatgttttgccgatttttgcgtggcgtcccacggcccctcgggtaatggctgtgacgggtgtggcaggaatggcgtctttccggggtttccagtttgagtgtgtgggatgggggaaatgtaaaacgattgacttagctgttgtcccacgcttttgtgggatggcagctctggaatgggcaaattcgtcgtggcgtcccacaacgatgttaaaactcgaccatgatgcaagccgaccgaacgcttcggcggtcatctggccgctgtgaccccacaatgatgatggtaggcaggcgaacgtttcgcggtcatctggccgtcctgccctgcagtgatgttgagaaaatgcagtcacggtgcatgaggagaaccgttgacctgcgtgtttcagtggtcgcgaactgcatatgcgctaaaaaagctctgcattggattgcatgaatccaatgcagagccttattggttgcggtgaacgcgactaacgcagcgatttcactcgctcagggccttgtcgaccacgacggtggcctcgtcgagtaccttgtccagagcctcgggggagacgaaggactcggcgtacaccttgtagatgttctcggtgccggaggggcgggcggcgaaccagttgtccttggtggtgaccttcagaccgccgatcttggcgtggttgcccggtgcctcggtcagcttggcggtgatgtcttcgccagccagctgcgtggcggccacatcatcaccggtcagcttggcgaacttggccttttgctccagtgtggtcggggtgtcgacgcgcttgtaccaagactcgccgaagcgctcgacctgctcctggtgaagctgggccgggttcttgccggtcttggcagtgatctcggcggccagcaggtcggggatcagaccatccttatcggtggtccacacgcggccatccttgcgcaggaagctcatgccggagctctcctcgccgccgaaggcgacttcgccgctgaacagcgggtccacgaaccacttgaagcccaccggcacttcgatgaccttcgcgttgatcgatgcggccacgcggtcgatcagggaagaggagaccagcgtcttgcccacggctgcgccctcaggccagcccggacggttgccgccgaacaggtactccacgcacacggcgatgtagtggttcgggttcatcacgccccagttcgggcagacgatgccgtgacggtcggcgtccgggtcggtgccgccgaccagatcgtacttgtcccaagcgccggcgttgagctcgtcgaccaggcccttcatggcgtacggggaagacgggtccatgcgaatcttgccgtcgtggtcgatggtcatgaagcgccaggtcgggtcgacctcaggacgcaccacgccgatgttcaggccgtacttctcgttgatgagcggccagtagttcacggaagcgccgccgagcggatcgatgcccagacgcacgccggagttgcggatcacgtcgaagtcgatgacgttctccaggtcgtccacgtagtgctcgcggaagtcgaagccctcgacgtactcggacttgatggcctcctcgtagggcacacgcttgatggacttgaagtcgccgagcagctcgttggcgcgagcggcgatggcgttggtggtctcggccggggccgggccgccggtgacggggtcgtacttaaagccaccgtcggtgggcgggttgtgggacggcgtgacgacgatgccgtcggcgaggccctcgccctcgaagcgctgggtgccgtcgaccgcacggttgtgggtcaggatggcctgggagaccaccggggtgggcacgaagtcgtcacgggagtcgacgcgcacgtgcacgccgttggcgacgagcacctcgatggcggtcttcttggccgggccggacagcgcgtgggtgtcggagccgaggtacagcgggccggtgacgccggccttcttgcggtattcggcgatggcctgggagatggcgatgatgtgggcctcgttgaacgaggtcttcagggacgatccgcggtgaccggaggtgccgaagatgacacgctgctcggggacttcgggatcggggacgaggtcatagtacttgccgataacctcatcgacattaatcagatctgctggggtggcgggctgacccgcattgtttgctaccatgttccctattctgccacgtttttcgccactttgggtactcttatgttaagagttgtcaacttttgtgcgaatcgtgtgccggttgtctagcgcttggtcatttccttctcgatttcctccagcgacttgcccttggtctcgggcaccaagcgcagcacgaacgggatggacagggccgagaacacgccgaaaatcgcgaacgggccgcccacattgttgccgaacgcatcgagcagcacgaggaagaactgggagacgatgaagttgcccagccagttcgccgccgagccgaaggatgagccgatgccgcgcacgctcagcgggaagatctcgccgataagcacccaggcgatcgggccccacgagaccgcaaagccgaggatatagaaagcgatgagaatcatcgtcggcactgccagcacggccacgtcgcccacgaagttcatcacggcgagcaccgcgagcgaaacggtcatcacgatggaaccgaagatcagcatgcccttgcgcgggaaacgatccatgataagcgtggccacgatggtgctcacgaagttcaccacgccgatgcccaccgacacccagatcgcgtcgccttcagggaagccgaagcccttgatgaacacctgcggcaggaagtagatcaccgagttgatgcccacgagctgctggaacagcatgataccgatggcggccaccagcgccggacgagcgatacggaacagttcgcgcacaccacccttggtgtcctgtgcggccacggccttgatttcgtccagctcaatctgcacctgggtctgatccacgtccttgcgaatcagcgtaagcactttgaaggcgttgcgggtgtcgcccttgttcaccagataacgcggggattcgggcagcaacaggccgccgagcagcaacaaggcggccggcaccagcgccgaaccgagcatccagcgccagtcgcggatgccgaagaggttgtggttcaggaatccgaggttggaggcgtaggccagcagaatgccgaaggtgaccatgagctggaacagcgtggacagtgagccgcgacgctccttcggcgccagttcggccaagtacgccggggtcagggcggaggccgcgccgacggcgagacccaggatgatgcgggcgcacaccatcatcgcgaatccggtggaggaggcgcacaggcctgagccgagcaggaacagcagcgcggagacgatgagcagcttcttgcggccgaaccggtcagacagtgcgccgatcgacagcgcgcctgcgcacgagccgatcagcaccgaggaggtgatgaagccggtctgagagacgctcaggccgaagtccgattcgataagaggggaggcgccggagatgatgccggtgtcgaaaccgaacagcatgccgccgagcgcgccgaaggtgaagatgaatgcgctgttgagcgggaagcgcgtggagaagccgtgcgattcggcggtttcgaggtcctcgattgcgttggctgccgcgtttgtggccgcgcccgccactccggccacgccggtttcgatggtttcgattgcggtggccgccgcaccggttgcgctggtttcctgcgccgcggatgccgtctgtttcgatacgggtgatgccgttgtcgtcgtcattgccttgtcctttcgccgttgacggaccgcgcctgttgcgtggcccctctgccgcgtgcaaggtcaggcttcgattgtctgcagtcgcccgaaaacaaaaaagacctggaacaacgtggaattcgcatattacgatacgcaaattccacgtcgctccaggtcttgcctcgttttgagtaacaaccctgctacgcaacgtgtgtgaaagatagaatacgacttccgcagtcgcgacactccgaataggcagcaaaaaacgatgatttttgacaacgattgcaggattctgcatggtggaatgatgtcggaatgggcgccgcggcaaatacggagaacgggtgtggcgaagcatcatcgcggaacattatggcgggacaccatcgcagagcaccgtagcgcatagttgccgtttcgcgatgctttgccggcattgccgtgcttttggggcacccagcgccgataatggaacacagtggcatacggcagcaaggaggaaccgtggcgaacgcatcgaacgcaacgcctgcagtgattgcggcgcgcatcgtcgatgccgtcggcggccccgcgaacattaccagcctgacccattgcgccacgcgactgcacttcgaactggccgatgccggccatgtcaaccagcacggtcttgaatccatccccggagtcctcggtgcattcccgcgagccggcaatcgttatcaggtcatcatcggcggagcggtcgcctcggtgtacgagcaggtcgttcggctgcggacggcgcgattgatgccggcagcgcaattgccatcggcagtgatgcagtcagcgtcgcagtcaacgcaacccactcagtcaatgcagcccactcagccagcgcagcccgcgcagtcagcgcagcccgcgcagtcagcgcaatccacacagcccacgcaacccgcgcagtccgcgccgtacctttccgacgatgccgcaccatcgcgcgatactgccaccgacgccgaacaaagttgcggcccatccaatacatcccgtcacttcacgcctcgtaccgtccgcgagtggggcagtgccgcccgcgcttgggctgccgcgtttttcgactacctgtctgactcgttccgcccgattctgggtgtactgctcggtgcctcgctggtcatcgccatcgtcaacgtgatcgttgcactcggcatcgtgcctgacggcgagacctccgccggctggatactactcaaggcgatttgggagggtgtgttcaccgttctgccgattatgatcgcctacaatgcggccaagaaactggacgtcgacccctggctcggcggcgcgattatggccgcgctgatgaccccgcagtttactggcgtgatgtccggaatgtccggaatgtccgggacgtccgtatccagcgccctctccggggcgattcaatgctcggccaacgccgtattcggcgccgaaacctgcaccgtgtcggcgttcggcataccgattcaactcaacgactacggcggcaacgtcttcgtgccgttgctcatggctgccgtgctcgccgtggtctaccacgggttgaagcgcgtcattcctgacagcgtacagctggtgttcgtgccattcctctcactggtcgtcgtttttgcgctcaccatactggtcatcgggcctctgggaatatggctcggcggtgggctgggagcggccacagcatggcttaacgcgcacgtgccgttcctattcgcgctcatcatcccgatgctctacccgtttctcgtgccgctcggtctgcactggccgttgaatgccctgatgctgatgaacattcaggcgctcggctacgatttcgtccaaggtccgatgggtgtatggaactttgcctgcttcggtgccaccgctggcgtgctcgtgctggccgtacgcggcaaggattcggccatgcggcagaccgcggtgggggcgttgctcgcgggattgctgagtggcgtttcggaactgagcctgtacggcatccatctgcatcaccgccgcgtctaccgctggctgctcgccggctgcgcggccggcggcgtgaccagcgcggtgcttggctggctgttcccgtccgtgctgccatccggtcagatggtccggggcgtcacgactacggcgttcgccttctcctcgttgctgacgattccggtgtttgacagaatgtgggtgtacgcgctgtccatcgccgttgcgtttgtaatggcgatggtgctgacggtgttgttcgggtaccgtacgccgccgcgcgccacggaggcgcagatggtctcggcgggcgagaacgtacgctcgcaggatgcggtgagagggattggcgcgacatcgtcggatgcggagtctgcggaagattccccatcgcggcctgcctccgatcggactcctgactccaacgccatcctgtcgccggtcgccggccggttgatgaatctggaagcgactggcgatccggtgttcgcctcccgcgcgctgggggagggtgtaggcgtcgtgccggagacggccggcgagacggccgtgctagcaccggtcagtggcacgctgaaaaccgtggcccggaccggccatgccttcggcattaaaaccgatgacggcatcgaagtgctggttcatgtcggcattgacaccgtcaatatggatggcgagggattcgtcgtggccgtgggcaaaggcgagcggatcgcggcgggagagccactggccaccgtggatttcggcaaagtcgcggcggccgggcacagcgttgtggtggtggtgacggtggtcaacgccgctgaactgaccgtggtcacgccgttgatcggcgacggtagcagcgacgacaacggcggcgactgcaaaaccgtatcagccggcagcccgatcatcgatgtggaacaatgacgttgcgaaaggatgccatggaaatactgcgagtgttcaacaacaacgtcgtgctcgccaaaggcggcgacggcggtgaggtgattctcaccggccgcggactggggttccaggccaagccggggcagacggtcgacgagtcgaaagttgtgcgcaccttcgtgccatcggacgggcgcgaccctgaccatctggcgcagatgctggcggacattccgcccgaaatcatccgcgtggtcgtcgaatccatgcaggagaccggactgggggagcgcgagaccggcagcaccacgctggtcatggccctgtcggaccacgtggcgaatgcggtggagcgggtgcggcgcggcatcgacatcacctacccgctgctcggcgaggtgagcaacctgtacccgcaggaatacgcgcaggggcgtgcgatgcttgcatcgctcaatgcacggctcgacgtcacgctgccggacggcgaggccaccgcgcttgccatgcatctggtcaacgccggcttcgccaccggcgacctgtcctatacgtacacgatgacgggcgtgatccagcaactgcttgacatcatcgaccacagctacggcatcacgttggaccgcagttccgtgaacgtgggccggttcatcacccacctgcgctacctgttcgtacgcatccaccagcaccagcaactgacggacgagccggcaccggtgatgaaggtgattcgtgagtcctaccccgctgcgctacgatgcgcgcgaaccatcgcctccctgctcgaactgcgcctcgacacggatatcagcgacgacgaaatcgcttatttggcgatgcatgtcgcccgagtcaccggccacgcatcgtagtaacggattagcggattggcgaatcagcgaatcggctcgagtgtaccggtcatttcggcgaaattcgaggtggcatttgaagcagcggcctgcgcggtcttttccagcgcggaggcgtcgggcacgcgcacgatcagcgcgcggtgatccaccgagaaacggatgtggcgggtttccggcagcatgtcaccgtccacctgcgctttggccggcttttccaatgtgatttcggcactgacaccctggacctgttcgatggtcgagttcgtggacagcgggttctgttcgggcttgccgatgatcgtctggtgcaccacgtcgccgaacaggttggcccagccgaggatgccgccggtggtgtcgatgatttcgaagtccagcagaccatcgtcataggatgccgccggcatcagcgagaacatgggaatctggccgcagttgccggccatcaccgtgcggaagtcgagattcttgatggtgtgggtcgagccgtcggcgctggtgactgtcagcgtgccgcggaacttcggcgcgaacaggttcttcacgccgcccacgaagtaggcgagccagctgatgttcgccttgagctcggggttggtgtcgtcgatcatggccgcatcgaagccgatgccggcgatgatgaggaaggcgtggccgtggtcgtcctccgggtggtcgagcagggtgagacggcccatgtccaccaggcgggagccgtgggaggtggccacggtcagcgcggcgtcgatatcgtccacgggaacgcccatattgcgggcaaacaggttgccggtgccgatggggatgatgcccagcgcatggccggtgccggagacggcgctcgccaccgtgcgcaccgtgccgtcgccgccgaccgcgatcaccacgtcggcgccgtcctccagcgcctcaagcgcgcagaccctgccgtccttgtcaagctgggtgtcgtagaagcggatgcgattgagccccttggcctcgcagaacctctggatatgcagccggcgggcttcggcctgcggtttggacggattcacgatgaaggcgtactgcacctcgtcgtcccggcgcttctccagcgtctgagccagcttgcggcggcgctgcgcgcgcagggcgatgacgatgacggcgatgagcaccaccacaatggcgattgcggcgatgatcagaaacacggtgagggcaggctgaggcatggctcctattgttatcggtggggaggtcgtttgcggccatggtgcgccgtacgtgaacatttcctgcacgcaacagccccgtggggcgcgattatggttcaatcgcgtctcatctgacgaaattggccgggtggacccgtccgcggactttcccgggcttccctgtgatttccgcgtgactcccgcgcattcggccattgtcggtgtctgcttacgcggctagtctggtgcccatgcttgatattcaattcatccgtgaacacaccgatatcgtcaaggaatcccagcgcaagcgcggcgagtccgtggaactcgtcgacgaagtgctctcctccgacaccgcacgtcgtgaggcgctgaaggccttcgaagaggctcgcgcccagcagaaggaaatcggcaagaaggtcgcctccgccccggcggacgagaaggccaagctcatcgccgagaccaaggaactgtcccagaaggtctccgaatacaagtccaaggccgattccgccgccgaggaatacaccaccgccatgtggaagctctccaacatcgtggagcccgaagctcccgaaggcggcgaggacgactacgtggtcgtcaagaaggtcggccagattcgcgacttcgcggccgaaggcttcgagcccaaggaccacctgaccctcggcaccggcgtggccggcatcgacatgcgccgcggcgtcaaggtcggcggctcccgcttctacttcctgcgtggccaggtggcccgtatgcagatcgccatgctcaccatggccgtggaccaggccgaggagcacggcttcacgctggccatcaccccgacgctggtgcgccccgaggtcatgcgcggcaccggcttcctgaactcccacgccgacgagatctaccgtctgcgcgagcccgacgaccagtacctggtcggcacttccgaagtggcgctcgccggcatgcacgagaacgagatcctcgacctcggcaacggcccgctgcgctactgcggttggtcctcctgctaccgccgcgaggccggcgccgcaggcaaggacacttccggcatcatccgcgtccaccagttcgacaaggtggagatgttcgtctacgccaagcaggaggactcctacaaggagcacgagcacctgctggccatggagcaggagatgctcgccaaggtcgaagtgccctaccgcatcatcgacaccgcagccggcgacctcggctcctccgccgcccgcaagttcgactgcgaggcctgggtcccgacccagggccgctaccgcgagctcacctccacctcgaactgcaccgagtaccaggctcgccgtctgaacatccgcgagcgtatggaagatggcggcacccgtccggtctccacgctcaacggcacgctggccaccacccgttggctggtcgccatcatggagaaccaccagcagaaggacggctccatcgagattccgcaggccatgcgcgcctacatgggcggcaaggaagtcatcgagcccactaagtgggaggcctgagtctcatcgtgctttagctccctttaatgggggagctgtcagcgtagctgactgagggagagatcgctaatagccagcaggcgaatccaagaccgaccgcactgccgaatatcaacatccctcccttctgtataatgaatacttgcgcgtgtgaacgcgcatcaggacaggtgtctgagcggcctaaagagacggtcttgaaaaccgttgaggggcaaccctccgcgagttcgaatctcgccctgtccgcgaaccgaggcctgggcaacatgcccaggccctttttctttttctggaacctgtcttcttgatcgccaccggggtgctgatatattggtttgtaatgccgtaacatgcggtgtccccgttgatatgacgggccaatcggcgtgagccgataagaaaaggcccgacgtttgcggcatcgggcctttgcgttgattaccggcttgcgcctttaatcaacaaggttgcaagatgaatcatatcacgatgcacggtagtctgaccgtgaacaggcgcaccgtgatcgtccatgtgggcgatggcgaggtgaacgccacggttgacggcacgcgcttcaacgtgcgtagcctgtggcagctctaccagttgctgagactgctcgtgtagcgtctcattaaggcgcggtgcccccctagtcgggtatcgcgccggcaacctgaaaaccgataatgttggcaagtgcttgcaatttgtggtggacgattgcaagctaacgtcttggattgttgccgctatccaatatctcattaggtctaccggtggaccaaaagtacgttgctttgtaaggggagttaatgaaatgaacaaacccgcacaatcgagcatcgaatcggtttaatgccactcacctcaacgggacgcgcggtaattgttagctaagttgacaataaaagagcaaaggcctaaattagcaatcagtcatcacgctgaggtgatgatttcactaggaaggagtagagatatggtatcgcacaacaagcgcatcgtggctgctcttgccgcggtagcagcaatgggtattggtttggccggttgcggcggcagcgacactgccggcgacacgaagtccggcagcgatggcggtgtggtcaacatcacctatatgcatcgtctgcccgattccgaaggcatgaccttggtcaacgacattgtggccaagtggaacaaggagcacccgaacattcaggtcaaggccaccaagttcgatggcaatgccgccgacatgatcaagaagctcgagaccgacgtcaaggctggcaatgcgccggatctggctcaggtcggttactccgaggttcctgaggtcttcaccaagggccttctgcaggatgtcaccgatgaggccgccaagtacaaggacgatttcgcttccggcccgttcgcactgatgcaggtggacggcaagacctacggtctgccgcaggacaccggcccgctgacttacttctacaacgccgctgaatttgagaagctcggcatcaccgtgccgaagaccgctgacgagctcattgagaccgccaagaagaccgctgcccaaggcaagtacatcatgaccttccaacctgatgaggccatgatgatgatgtccggccaggccggcgcttccggtccgtggtacaaggtcgacggcaactcctgggttgtcaacacccagactaagggctccaaggccgtggccgatgtctaccagcagctgatcgacaacaaggccgccctcaccaacccgcgttgggatgcatcgtttgataactccatccagtccggtcaactgatcggcaccgtggccgccgcttgggaagccccactgttcatcgattccgccggtggcactggtgctggtgagtggaaggtcacccagctcggtgactggttcggcaatggcaccaagaccggcgccgatggtggttccggtgtggccgtgctcaagggttccaagcacccggccgaagccatggagttccttgactggttcaacacccaggttgatgaccttgtctcccagggccttgtcgtggccgccaccaccgcggatgccaagaccccgcagaagtggtccgactacttcagcggacaggatgtcatggctgagttcaagaccgcgaacgacaacatgggtgacttcacctacatgcctggcttctccgcagtcggcgctgcaatgaaacagaccgccgccaaggctgccgatggttctgccaaggtttcggatgtgttcgacaccgctcagaagacctcggtgga

SEQ ID NO: 3849 - DNA, 46187 bp, Unknown
  R35_2m  MAG No. k141_13347
acgcactttggacgaggtgattggccaaacgcaggtgttgggccagggctcgccgctgcgccgcctcgccaatccggccagcaaaggcagtctcaccgcgccgagctccgtaatcctgttcggccctccaggcgtcggcaagaccacgctcgccaccatcgtggccggccaatccggccgcgtgtttgaggaactctccgccgtgacctccggcgtcaaagacgtgcgcgacgtactcacccgcgctcacgaacggctcgtgtcacgcggccgggaaaccgtactgttcatcgacgaggtgcatcgcttctccaaatcccagcaggatgcgctgcttcccgccgtcgaaaaccgcgacgtgacctttatcggcgccaccaccgagaacccgagcttttccatcatcaaaccgttgctctcccgttcggtggtcgtcaagcttgagtcattggagcctgatcagctcaccgaactggtgcagcgcgcgctgactgatgaccgcggtctcagggacgaggtcaaagccacggacgaagccatcaccgatatcgtgcgcatggccggtggcgacgcacgcaagagtctcacgattctggaggccgcggctggcgcggtcaccggcgacgaagcccgcaaaaagggcgcacgccgacccatcatcacctccgaaatcgtggctacggtaatggacaccgccaccgtgcgctacgacaaagacggcgatgaccattacgacgtgatttccgcattcatcaaatccatgcggggctccgatccggatgccgccatccattatctggcgcgcatgctgaaagcgggtgaagatccgcgcttcatcgcccgtcgcatcatgattgccgccagcgaggaagtcggcatggccgccccgcagattttgcaggtcaccgtggccgcggcgcaggccgtggcgttggtcggcatgcccgaggcacgtattattttggccgaagccacgattgccgtggccaccgcgcccaaatcaaatgccagctataacgccattaaccaggcgctcgcggacgtggataccggcaagatcggcgctgttccgctgtatttgaggaacgcccccaccaagcttatgaaagagtggggcaaccacgagggctacaagtatgcgcacgattggcccggtgccgtggcgccacaggaatatatgcccgaagagctgcgtggcaccgagtactaccatcccaacgatcgcggctatgaacacgaagtcagccagcgtcttgccaagattcgcccgatactgcatggtggggaacccgaacagaaatgaacataggggagtaaagtgtaacgcaacaatagcagtggaaaaaggggaggcaaacaccatggcgaccatcttcatcgtggacgatgatcaggccatcggcgaaatgcttagtcttgttttggaaaacgagggattccagactgtgacctgcctggacgggctgagggctgtggaaatgttccccatcgtcaagcccgatttgattctgcttgacgttatgctccccgggctggacggcacggaggtggcccgccgcatcagagctacctctaatgtgccgattatcatgctcaccgccaaatcagacacacttgacgtcgtggccggcttggaagccggtgccgacgactacgtgcccaagcccttcaaagtagccgaactgctggcgcgtatccgtgcacgcttccgcatcgccaagccggccgccgaagacggtgccaccggtggcgcaagcggtggcaatgcaaacgtcaaccatctggaacgcggacccatcgtcatcgaccgtttggaacacaccgccaccaaggatggcaaggacctgaatctcactccgatggaattcgagctgctgttcatgcttgcggccgccgccggcgaggccatcagtcgttccagcctgctcaagaatgtctggggatacgagaattccggcgatacgcgcctggtcaatgtgcatgttcaacgccttagggccaaagtggaggacgaccccgagaacccgcaaatcgtgcagaccgtacgcggtatcggctacaagttcgtcactcctgaacaatgaacctgcgccctcgattcagcctcaaacgcttgctgcgccacggacgcgctgaagttcgtcgctcactgcaggcccgcaccgtggccctcaccgtgattcttacgctggccgtggccatcgtcttctctggcgtatcgatggtatcagtgcgcgcctcgctgcttacccaaatcacttcgcagtcgcgtgccgactattcaaacatggtgcagcaggcccaaaccagtctggacgcggccgatgtctccgccgtagtgcagatccaacagctggtcaatgacttggcgtcctcgttgcaatccgaggggtcctccaacctgataggtgtgtatttgtggagtcgtgataccaactcgcgtgccatcatccccgtatccaccgaacccagctatcaaagtctgatttctgacgacatccgttcgtccgtggcttccgacttggatgacagcgtgttctatcagccggtcgaaattcccggtgattccggcatgccgggcagcgggacgcccgcagcggtgctcggcaccgtattggactttggcgtggccggcaacctcgaattcttcgccatttattcgtacacgttccagcagcagtccttgacacagattcagctcagtctggtggtcatctgtgcgttgctgtccatcgtggtgggcgtagtaatctggctggtgattcgtggcatcgtgcgcccgattggacgagtggcagcggcctcggaaacactggcctccggcaatctcgatatgcgcgttaccgtggatcgtaaggatgagcttggtgtgctgcagcaatccttcaatacgatggctgatgcgctcaaccagaagatcgatgagctggaggaagcaagcgttttccagaaacgatttgtgtccgacgtcagtcatgaattgcgtaccccggtgaccaccatgcgtatggcttccgacctgctcgaaatgaaaaaagacggcttcgacccctccaccaagcgtacggtcgaactgttggccggccagatcagtcgattccaagacatgctcgccgatctgttggaaatctcccgctacgatgccggttatgcggcactcgaccttgtggaaaccgatttatgcgaaccaattgaaacggcagtggaccaagttgacggcatcgcccaagccaaacgggtgccgattcacacgtatctgcccaatgtgcaggttttgactcgtatcgattcgcgtcgagtgattcgcatcgtcagaaatctgttggccaatgccgtcgatttcgctgaggaccggccgatcgaagtgcgcgtcgcggccaaccgcaaagccgtggccatcagcgttcgcgactatggcgttggtatcgacgaagacaaagtcgctcatgtattcgatcgattctggagaggcgacctttcacgttcacgcgttaccggcggcaccggattgggcctggccatcgccatgactgatgccttgctgcaccacggtagtatccgtgtacgttcggcagtgggggagggcacctggttcttggtattgctgccgcgtgaccccgaccaaggtgaggtggcggacgctgaactgccggtgaattttgcttctgaaacgccggatgacctgcgtgttaccggtgggtttggtgtggccaccagccaagtcacacatgattatcatgaggttcgccgcgacacgatgatggggaggccactatgagacgagtgaccagaacgattgccgccgcaggcgcggccatagcctgttgcatcacgatgacggcatgctcaagtccgttcggtttgccgattagcggctcggtgcagactctggcaccggtggaacagcagacccagcgtgtttacaccaatcctcgggggcctgcggacgatgcacagccggaaaccattgtcaaagggttctatgacgctatgcctgctggcgtgcagtccgatggctatcgcgtggctcgcgaattcctgactggctcggcttctgccgggtggaatggagattctgcggcactggtatacagcggcacccctgatttccgccgacgcgccaacaccataagcgcgccacaaggtgcggaaagctcactgattgtggaagtggaacttcaggtggtgggttccttggattcgcatggcgtatacacgccgtcaaacagcacccaaacgcgcaggcttccctatacgctgatgaagaaaagcggccaatggcgcatctcgtcattggaaagcggcgtggtgatttccaccgcagattttgaacaggtgttccgccaagtatccgtgtatcaggtgagtacttccggcaagcaacttatcccggatattcgttggttgagctggcgcaactggcgcacccaggcagtcggtgaagtgctctcggatgcaccctcctggttggaaggagtgctgcgaggcgccggcttgtctaccatcaaactcgcggtcgacagcgtgccggtgaagaacaatgtggtggagatacacctcaacagcggtatcaatgcgttgaacgaggaagaacgaggcctgctggtacatcgcatccgtctgactatgggcgacggcaatgccgaatacgcgctgaggattaccggcgatggagtggactattccgatgccgacgcaaatgtgaaacttactaccgagcagccgacagcgggcgtatacacgttgaccggtggtcatatcgtttccctggccagctccagtccgttgcgtgtaggggaggcccccggatatgacgatgctcggggcttcgttttttcctcatccggcggcgcggtgttgcgtgcggacggcgtggtcgaatgcctgaaatctgatggtgcgtcctgtggggtgatgttctccggcgagccgatgcgatcgattaccgaaggtctggatggcgaagtatgggctgtatccgagaacgggcgcgaattgcatgtgtcagatgggggcaaggaaaccgatctgaagcttgattggcttggtgctgccgacagcattgtggcattggcggtttctccggaagggtgccgattggcgttggcagtcaggggcgaggacacgaacggcgtgatgatgaccggtgtggcgcgcaacggtgataaaacactgagcggtctgagcaaagcggccacccaagtgagtgtgctcaggcacgtcaccatgctcacgttctacaatgatctgaatctggtgtacgccaccacacctcctgagggaaacagcgaacaacaagaggcatggcgtcaaatggcaccaggcccggccaatgcgcagcgtttacccaatggaatcataacgtcgatggcatcggggcagatcagcctgtctcgtcgcctggccattgtggacgatttgggtattgtgcgctccgtttccggctcactcgacggttcctggaccatcgccgatagccaggtcactgccctcggtgcgcagtagatggtataagaaaaacggtgttcataataacttttcttgtgttgtgatgcggcggctttgtcgctcggctgacgagcggcattgccgccgtgcaaccacctcttattatggcttaataacaaggcaaaacggcgctgtgaagccgttttttgaactactgttatcaaactgttataaacctgttatcaaactgttatcgcatgcgattgaacatttggcctgtgagcctcacactagagattgtcgatgacgaacagtcaccaaacaggatggaagatcatccaaaaaataaacactgctcgaggaggagtatttatgaagaattggaagaaggccattgccctcgttgcttctgctgctgcgcttgtcagcgttgccgcatgcggttccagcaacgcaggtggcagctcggactccggcaagaagacggttggcttcgttgctgtgggccctgagggcggcttccgtaccgccaacgagaaggacattcagcaggcattcgaggatgccggctttgacctgacctactctccgacccagaacaacgatcagcagaagcagattcaggcgttcaacaagttcgttaacgacgaagtcgacgccatcatcctgtcctccaccgaggattccggttgggatgactccctgaagaaggccgctgaggctgagattccggtcttcaccgttgaccgtaacgtggacgtcaaggacgccgaggccaagaaggccatcgttgctcacatcggaccgtccaacgtctggtgcggcgagcaggctgccgagttcgtgaacaagaacttcccggatggcgccaacggcttcatcctcgaaggccctgccggcctgtccgtggtgaaggatcgtggcactggttgggacaacaaggttgcctccaacgtcaaggttcttgagtcccagtccgctaactggtccactgatgaggccaagaccgtgaccgctggtctgctcgacaagtacaagtccgacaacccgcagttcatcttcgctcagaacgacgagatgggcctcggtgccgctcaggctgttgacgccgccggcctcaagggcaaggtcaagatcatcaccatcgacggtaccaagaacgctctgcaggctcttgttgatggcgacctctcctacgtgatcgagtacaacccgatcttcggtaaggaaaccgctcaggccgtcaaggactatctggatggcaagaccgttgagaaggacatcgagatcgagtccaagaccttcgacgccgcctccgccaaggaagccctggacaacaacacccgcgcctactgataagtctgctgcgactcattgataactggaccaaataattgatgtgatggtgtgagaaggatgttccttccacaccatcactcatgtgtggctcaaatatcacaaaacgataacatctcattctcgtttaaggcaaagacatgacagataaaaaccccatcgtcgtaatgaaaggcattacgattgaattcccgggcgtcaaggccttggatggtgttgatttgactctctacccgggtgaagttcacgccctgatgggtgagaacggtgcaggcaagtccaccatgattaaggctctgaccggtgtgtacaagatcaacgccggctccattatggtggacggcaagcctcagcagttcaacggcaccctcgacgcacaaaacgccggtatcgccaccgtgtatcaggaagtgaacctgtgcaccaacctttccgtcggtgagaacgtgatgctgggccacgaaaagcgcggccccttcggcatcgactggaagaagacccacgaggccgccaagaagtatttggcacagatgggcctcgaatccattgacccgcacactccgctgagctccatctccatcgctatgcagcagctggtcgccatcgcccgcgctatggttatcaacgccaaggtgctgattctcgatgagccgacctcttcgctggatgccaacgaggtcagggacctgttcgcgatcatgcgcaaggtgcgtgactcgggcgtggccatcctcttcgtctcccacttcctcgatcagatttatgagattaccgatcgtctgaccattctgcgtaacggccagttcatcaaggaggtcatgaccaaggacaccccgcgcgacgaactcatcggcatgatgattggtaagtccgccgccgagctgtcccagattggtgccaagaaggctcgccgtgaaatcacccctggcgagaagccgatcgtcgatgtcaagggcctcggtaagaagggcaccatcaacccggttgatgttgacatctacaagggggaggtcgttggcttcgctggcctgctgggctccggtcgtaccgagcttggtcgactcctgtatggtgccgacaagccggattcgggtacctacacgctcaacggcaagaaggtcaacatctccgatccgtacacggctttgaagaacaaaatcgcgtactccaccgaaaaccgtcgtgatgagggcatcatcggcgacctgaccgtccgccagaacatccttatcgccctgcaggcaacgcgcggtatgttcaagccgattcccaagaaggaagcggacgccatcgttgacaagtacatgaaggaactcaacgttcgtcccgccgacccggatcgcccggtcaagaatctctccggcggcaaccagcagaaggtgctcattggccgttggctggccacgcaccccgagctgctgattctggacgagccgacccgtggtatcgatatcggtgccaaggctgaaattcagcaggtcgtgcttgacctggcttctcagggcatgggcgttgtcttcatctcctccgagcttgaagaggtcgtgcgtctgtccgacgacatcgaggttctcaaggaccgccacaagatcgcagaaatcgaaaacgacgacaccgtctctcaggcgaccatcgtcgaaaccatcgctaacaccaacgtaaacaccggaaaggaggcatgagatggctgaaaaggcaaaagccgagggcaacaactttgtcaagaagctgctgagcagcaacctgacctggtcgatcgtcgcattcattcttctggtcatcatctgcaccatcttccagcatgacttcctggctctgagctggaacagcaacaccggtggtctggccggcccgctgatcaccatgctccaggaatctgcccgatacctgatgattgcaaccggtatgaccttggttatctccaccgccggtatcgacctttcggtcggttccgttatggcagtggcaggtgccgccgccatgcagaccctgtccaatggcatgaacgtgtggctctccatcctcatcgccttggctgttggtctggccattggctgcgtcaacggcgctctggtttccttcctgggcctacagccgttcatcaccaccctgattatgatgctcgccggccgtggtatggccaaggtcatcacctccggtgagaacaccgacgcctccgcagttgctggcaacgaaccgctgaagtggttcgccaacggcttcattctgggcattcccgccaacttcgtcatcgccgttatcattgtgattctcgttggcctgctgtgccgcaagaccgctatgggcatgatgattgaggccgtgggcatcaaccaggaagcctcccgtatgaccggtatcaagccgaagaagatcctcttcctcgtctacgcgatttccggcttcctcgcggccatcgctggtctgttcgccaccgcatccgtgatgcgtgtcgacgtggttaagaccggtcaggacctcgaaatgtacgccattctggcagtcgtcatcggcggtacttcactgctgggtggtaagttctccctcgccggctctgctgtcggtgctgtaattatcgccatgatccgcaagaccatcatcaccctgggcgtcaacgccgaggcaactccggccttcttcgccgtcgttgtgattgtgatctgcgtgatgcaggctccgaagattcacaacctgagcgcgaatatgaaacgcaagcgcgcgctcaaggctcaagctaaggcggtggcagcatgacaacagctacggcaaacaaagtgaaggctcccaagaagggcttcaagctcgatcgtcagatgatcccgaccctcgcggccgtggtgatcttcatcctgatgatcatcatgggtcaggcgttgttcggcacctacattcgactgggcttcatctcctccctgttcattgaccacgcctacctgattattctggctgtggccatgaccctgccgattctgaccggtggtatcgatttgtctgtcggtgctatcgtggccatcaccgcagtcgtcggcctgaagctggcgaacgccggcgtgcccgccttcctggtcatgatcatcatgctgctcatcggcgctgtgttcggtctgctggccggcaccttgatcgaggaattcaacatgcagccgttcatcgcgaccctgtcgacgatgttcctggcccgtggtcttgcctccatcatctccaccgactcgctgaccttcccgcagggcaatgacttctcgttcatctccaacgagatcaagatcatcgacaatccgaagatctccaacgatctgtccttcaacgtcggcgtgatcatcgcactggtggttgtggtcttcggctacgtcttcctgcaccatacccgcaccggacgcaccatctacgccatcggcggctcccgttcctccgcggaacttatgggtctgccggtcaagcgcacgcagtacatcatctacttgacctctgcgactctcgccgccctggcctcgatcgtgtacaccgcaaacatcggctctgccaagaacactgtgggtattggctgggagctcgacgccgttgcctccgtggtcatcggcggtacgatcatcaccggtggcttcggctacgtgctcggctccgtgctcggctctctggtccgctccatcctcgatccgctcacctctgacttcggtgtgccggccgaatggaccaccatcgttatcggtctcatgatcctcgtcttcgttgtgcttcagcgcgcggtgatggcggtcggcggagataaaaaatagcgggcttgcccgctcggtctccgcaccgaatacgacacacaccataactgaataggcgggatcagcccggctgctgtgatggcaaggtcacagcagccggcactgcccgccaaagctttctttctccttttcttcctttcattagcgtgtggggcgtgccccggggttctcccggggcacgccccacacgtgtttggaaagctgggactctattgatgatcggatttatgcacgcttacgtgccgcgcgaatgcggaacgcggtggccagacagcaccagccaatcaggcagataaccgtcatcgtggcaaacgtccatgtgccgccgacggcagtggcgtgagcaaactcagcggtgccttcttctcctgcgccggcctgagccacggaaagaatcgtggagaacagtgcggtaccggcagcgccgccaaactgaagacacgtgttgaaaatggcgttgccgtccggcttgaactcgggagagacctccgacaggccactggtcatcacattcgcattgccgatggaatagaacagaccgaaaatgaaatagaatccggcgagcagcacgggcgtaagctgcatcgagaacaccagcataagcactgggcccaaaatagcgatgccgatcggaatcagaatcggcttgaccgcgccgaacttatcgtagaaccagccgccaagcggggcacagacagcgccgaccagtgctccgggcagcaccagagagccggccacaaatgccgtggtgccgagcgagagctgtgccacattggtgatgacatagccgtagccgatggcgaccaatggcagcagcagatatgcgcaggcgtgtaacagtacggcgggatccttgagaatgccaaggcgcagcagcggggagaaggcacgcttggaactcatggcgaacacgatcaacaaggcgaggcccacaatcagactgacaatggcgataatgccggagcgtgtggctgacttgccggacaccgccgcactgatggccacgccaccttggttgagcgccagcaccagaccgaccaacgcgacaacaatggacccaagctgaatcgggtcaagataggcagcctcggtcggtgtcttctgctcaatgcacttcatgccgatgcatgctgcgattagcaccagcggaatggcgatgacgaaaatcgcgcgccacggcagcactgtggtcaccgcgccgccgacggtcgggccgatggccggagccacggtaatgaccagcgatcctacgcccatcaatcggccgattttcgaacgaggagactgctccagaatgatgttgatcatcaacggcgtggccacgcctgagccaatgccctgaataatgcgggcgacaatcagcagcgggaaggcttgggcgacgatcataatcagcgagccaacgatggccagaatcacagccgcaagaaaaatggttttcagtgcgaatcggcgcttcaaaaacgagctgatgggcatggtagcggccaccgccaacagataaatcgtggtaatccattgcacagtggccgtgtcgacatggaattcgcgcatcagtgcggggaaaagcacggtcatcacggtttcggtcagaatgccaatgaaggcaagtgagccgacagccacaatcgcgccgataagacgtgtgggaatcttctcgttatcaatatgctgctcaggcatacatgctcctaaacgttcggttgcaatgtatggaatgtaaggtttaccaaccggcgtaggtacctgtgcgtgcggataaaccggcaatcgtactgccttggctgcacgctatggaatcacaaaaccacctgtgagtgtacggttcggggcggacgctacggtcgatgcgcaatgggctgtcccttggtttggtggggtttgatggggcgggttcggcattggtccggcggggcgggttcggcattggttcagcatgaggaaacacgcgataatatccgccctgccgcctagtttggtgaaccatgggtattgagaacacgcataagctgattgtcaactgcctgccactcaacgaaggagaacggcgcgctttcgccaaggcggcccgcgatgtgccgcaggaattcgtgggcgacgaagcgcactgcggcgacatggtctggtcggccgctgttcccgaggagcttcgctcccgagctaccgcagtcatcggcaactttccggtctcgcaggcttcccaatacacccgtcttgaatggttgcagaccttcagcgccggtgtggatgcgtacatccgcccgggtgtgctgcctcgcggcaccatggtcaccaatgcgagcggcgcgtatggccaaagcgtgtcggaacacatgttcgccaccatgtgggcattgatgaagaacctcaaccggtatgcctccaatcagcacgatcatcagtggcaggatgaaggcccggtattgagcccggaaggtggcatcgcactgattatcggcgtcggcgacatcgggtcgcatttcgctcagcttgcccaatccgtaggtatgcgtaccttcggcgtgcgccgtcatgcggacgtgccggccaagggcattgaaaagatgtatggcttcgagcggctggaagcactgctgccattggcggacgtggtggcgatggcggtgccgcgctcgccgcagacccatcatctgctgaatgcggatcgtctggggcgtctgaaatccacagccatcgtgatcaatgccgggcgtggcgacgccatcgatcccgaggccttggccgacgccttgcacaatggacggctccacggtgccggattggacgtcactgagcctgagccgttgccggcggaaagtccgttgtgggatgagccgcattgcctgatcaccccgcatgtggccggcggcaatcatttggaaaagacttccgaacacatcatccgcatcgccctgaccaacgtttcccgctatgccaaacagcaggaactgttgaatctcgtgcgatactgattcgcctgtatcgggtgtacatgaactcatgtacacggccggcgtgtcgcatcccgctacgactgcggcatcgaaatgatacctgcagaggcgtggttgatcagaggcccaatgaacgtggcccgaggtcagtctcagtctgatagttcgtagccgttggcgtctttatgccacggcgagccgggcttgctgcacagaatgatgatgccttcaacaaagccccagatggcggctgcgattgggccaagtccgagcagaatccagccgacaagcgtcagcagcagctgggccacggccttgccggtgttgccgagatagaagttgtgcacaccaagtccgccgaggaagatgcccaacaggccggcagccaacttggacttggatgattgccacaccggggcggcggcatacggagcggcggtgtattgcggctgtgcgtaggcattcggctgctggtaggcctgtccatagccgggctgctggccgtagcccgctgcgggctgtgcgggctggccatactgcggctggccatactgcggctgagcgtactgagactgagcgtatgcgccggcgggctggccgtattgcggctgctgctggccgtagcttccggcggcgggttgagcgtatgcggcgggctgtggggcgccatagccttgcggctgccgtgcggcatcttggccgtacgacggctgtgccggctgtgcaggttgtgccggctgcggaacactgtccgaaccgtacggttgttgttgattatcagtcatgtgggtctatcccttctcaatcgggaacggcagtaccttcttaccgtttctgcacaacatcatctcacgttttgcctaatagtaaaacctgccgcgctacgattgggccatgaaaagtttcctgaccagctggttgattatgactatcgccgccgccgtcatggtcgcggtgactcccggcatgaccccggtgggggagcctccgattctcggcatcgccgcgttcgctttgttcatggcgctgattaatgcgtcaatcaagccgattgtgcatctgatcgcactgccgtttgcgattctgtctctcgggctggtcaccttgattatcaattggctgttcatgcgactcgccagctggctggcggtcagtctgttcggcgtgggcgtcttcgtacacggtttctggtggtcggtactggggtccttggttctgaccattgttgcgggaatcgtcgggtccatcttggatcagtgacggtgctcgctgggcgaatatgaataatggcggttggaatcggactgactccgcaagtggttccggattgttgatttttcaacgattcggaaccttttttcatgccgggaatcggtatacatttcggtatatatttgaaggcatgaacggcacggttttctatgacgcgaacaacaagcgatggattgcgcgatatccggcgggacggttcaacaccggaaaagtgatagccggttatgggcagacggcggaaaaggcgatggcgcggcgcgacgcggcgttgaaacgcgcgttgaacggaaccatgcgcggcggaaccatcaccgtccggcatgttcttatgaaatacatggcgtggattgaacagggaaacgacaggcggaacagcatcgcgcggaaacgcgaccggttggaacgctatttgaagccatacatgggaaaaccgatgaaatcgtttgacagcgatgatgtcggcgcgattatcacggcggcacgcgcggcatcgaccgacagcgcgaacagcaagatagcaaaaaccatgtggggcgaaatacaccaaatgtgcgattttgccatacagcgcggcatgattgaaaaaaatcccacggattatgtcattcgaccaaaatacaccagcgcggcgcggcgaaccaatgaacttcacatagacgaacgcattgaacaagggcgctggatgctggaacacgcggcacgcgacggcggaaccgcatacggcatgttattactggcatgtatgggattacgcgccggcgaaatacgcggcatggaatacaaatgctttgcgcacctgctggacggcgcatgggattcaacaaccatgaccgtccaacaaatatatgaccgcgatgtcgaaaccggcgaatggcgattgatgaagcatacaaaatcaaacgccatgacccataggacgctggccgttccaaaaccatgggcatataacattttctgcttttatgaacagatacaggacaaacacaaacttccatatggatatgacggatttgtgtgtttgaacaaggacgggaaacctcttacaagaaaccaacaatccgccatatggaacgatttaagacgggcatacatcaatgaacatccggatagaaaaccaatcgcatcaaccatgcgcatacatgacatgaggcatgtcatcgcgtccgtgcttgtcatgaacggcgcgacattggaacaggtgcgccccatactggggcacatgaacgcggaaatgacggcatattacacggcactttcaaccggattcaaccgcgcgacgatgaatgaactgccggaactcatgaaccacgggaacaatctattgaacttcattaacattaacaatgaaaacaaaaaataaaaaggaaaaataaaataagcaaaaaaacgcgccgccgcgaactttccaacgcgcgcgaacaaatataaccacattaaaccatggaaatctatgaaattatccggcgagtggtagcgcgttcttggaggattagaattgaacacatgttgaacacatgaacttgtttcatgtgtgataacgcgtgtgattcgtattatgtaatgatttttatgttgtttttgtgtgcgcctttcaaaccgggaaacaaaatggttccatatttaaagtggaaccatggaatcttttaaacatcaccatgtgttgacatcaacggtgatgttgaatatgatttttaattgttatggaatatttttcggattattaatatgaatatttgttagtccaggattcggacacagaattttatctatgattgaatcgatatcccatgtatgaaacggttcaaacaatgaataataatcctcatatgaataatcaggataatattcaaccaacgcaaccgcattatccatattcttaatattaaaccatgccataacacggcgtgctttattatatactgcgttcaactattatgtttccttccatacctatgaatgaatacacatgaaaccattaaacataacaagcgtttaaacatagtcatcacgcgttttccctttccttcttcgcgtccgccatcatgcgatagacacacgcgtgtgaggttttaagtctcacagcaatgtcatcaatcgtccagccctgttcacggtattccaatgccttacgcgctttacgcatggtgtaagttttcggacgattacaaaccttacctgaacgcttcgctgcttccctgcctgctgctgtccgttccagtattaaagcatgttccatttccgcaacggcggagaaaatttgtgcgttcatcctgcctgccggtgttgatgtatcaacattctcacggatagttcgtatgttaataccgttcttttccaatacattcatattcaatactatttcattgaaattcctgccaaggcggtccatggaataacaaacaatcgtgtcgccctcgcgaaccgcttttgtgaggttgatccagccatcacgctggaagttcacgccgctcttaccggcatcagtgaaaatacgtttttcttccacaccagcattaattaaagcctgcttctgttcttccaatgaatagccgtgtattgcctgcgttccagttgaaaccctcatatacccgtataacataattattaatcctttcaatagaatatgtgtgttttcactatctatctatcaaactgtgttcaaaagccatagtatttgagaattagcattttcgccattgaaattgaaaatgaaaatccagtgtttttcccgttttttaaatgttgatagatagtattcaaaccgttcatcttattataacttttgaacggtggtatttaaatacatatttcaacattgaaataacatattattcgaataccatttgaaacgctcatttcgattctaacagcgatttttcatgtttcatgagcaacgcatcgaaaacagggtttttcacggtttcaacaaaatacgccgtccacagggctgaatattacgcgctctgtggacggtatcgattttcacggattttcaatcaaatacaatgaaaccggtgatttgtattctcaccggtttcattatgaatatggattaatggattgttctgttattatatatcaaacaatccaatcatattcattaattaatcattttcgccgtatcactggcgctattaattaaatcactattttcattgaacatcaccggagcaatatagacaacaacagcaacgccaataccaatggataggaaattaatgaactgactccattgacgattcaataagaatttcaatgaaagcgttcccattaccattataacaataggactgatccatttctgaaccatgctgttccatacttcttgaagtgtcgctatgtccgctgaataaacaatagtgttaataatcataatccataatcctttgtgttaaaatagtttgtctatcacatctatcaaaaggaaacggcgtgccggtttgttccttacaccggcacgccgcaatatattatttgatgacaatgtttaaatatcatggtttcatttttttaaaacgccgccgtcaggtggacactattctatatatttaagtataagaatccctaccctcgggatataagggaatacggtgatacacggtgtaggctccgccggacactactccatcgtttgccgggctctcgccgttttgctacctacatagaccccaacattagaacaagatttcacattaacacgttgtatcactgccgcgttaatgctatttaaaacctcacctgtatgtctattgcctaccaatgtttgaaccgctacattgaaaacgatcccaatattttaaacaggtttttaagttcttaattcaattatttcatacacatcctttttaatcccattgacggcgtatgacagcctgattctcatgatttcaatctcattgcggctcatgtcagcctgatttacattacattgaaatgctgtatgaaaatgttcattccaatgaatgccattcatccaatcaatccgtgattttcaatctcattgacggttcacgattacctgaaaacaatcgccggattcatctcatgattggattaacaacttatgcgtaatccgacgcggttcatttttatctttatctatgttatcaatttgagaacatgaaccatacttacttttatggaattcgatgattcatgttcatcatgctcatatctatcaaacatgtgtttgaaaccattgaatattgaatagaatcattctatggcggttttaacgcggttctataacaaacatgactaatgctcgtgttcatgctgaaaagccgttagaaggccgtttaaacgcgtttttgaggtatgtatgacacaatccgctgaaccatcccatttgagccatggtttcatacactatgaaatgtgaatatattgtgaatattcatggcatgccgccgcttttcaaacagggcacatgaaccggtatatttttcggtatacttccggtggttttcaatacgaacacaaccggaaaccattgaaaatagcggttttatggcaacagacacggaatcggactgattccaaccgccattactcatatcaagctacgggatcgagcagagcgaacgctactcgcgcaccaagcggatatgctccacatcgtcgcgccgggagcgacggaacagcacgaaacgattgccgatggactgcaccacttcggcgttcagctgctcggcaagctcggcggcggcttccttggcggtcaggccagaaccgtcctgcacggcgcacttgatgagctcgtgcttctcaatggtttcatcggcctgattgacggccgactcggtcaaatcgttcttgcccacatagaacaggggcttcagcgagtttgccatcgcgcgcagctgcttgatttgcttcttggtcaatgccatgggaatttccttacatctttcgtataaccacaccagcatagcaaccggtgctgtctgtgctgtttgccgccctacagcgcgatgatggcggcgatgtaggcgatgacggcgacggcgaacacgagatcttgcgcggcgatggtcagggcacgccagtgggtgcggcggatgctctcctcgtagcagcgggcgtcaagtgcgaggctcaggttgtccgcgtgacgcaacgtgccggcgaaaatcggcacgataatcgcgctcatcgccttgatacgctgggccagcgaaccggtttcgatggaaccgccacgcgcggattgggcgtcgacgatggcacgggtctcgtcggtcagcgttggaatgaatcgcaatgccagactcatgaccagcgcgatttcttgggcgtggatgccgagtcggttgagcgggctgatcagggtgtcgaaggcgtcggtcatggcggtaggcgtggtggtagtgaggaacaccgcgcccagaatgattaccaatgcgaaacggcaggcgtacagcacggctatggtcacgccctgatcggtgatgctcagcgggcccagcgccaccaccggcgtgccggtgcgtaccacaaacagattgaccacgcccatcagccccagcaggatcagaatcggatgaatggattcgagcacccgtaacgggttcaggcgtgccgccgcgataacggccagggtgatggcgatgcccagcgcaagctggaggggcgtgttcaccgcgaacatcgtgaacatggcggccaggaaacccaccatcttcacgcgcgggtcaagtcggtggatcaccgagtgcgcgggtttgtcaggggagacggactcggcggggaaggcagtctcggttgccgagatgctctcagcaccagccgcgccggcaatcggcatacgtaccacgcgatcggcgatatgcttggcctccgctcggtcatgggtgatgatgagcacggtcacgccgcgcgatttgagcgtgcgcaacagctcatggatgcgctccttggcctggacgtccaggctcgcggtcggctcgtccatgatgagcacgtcaggattgcaggccagcacgccggcgatggccaccaatcgctgctgtccgccggacaggtcgaaaggggagcggtcggcaagatgcccgatatgcagcaggtccagtgattcgcgcacacggtcggccacctcggcctcggcgagcccctggttgcgcgggccgtacgccacatcctcggctaccgtgtcagcgaacagctgatgctccggatgctgcatcacgtaacccacatgccggcgcaattgcgccaattgcctgcgattcgccggcttcggacgcgcgttgcgaccgcgtttgccggtcgaggccaccggaacgccggccacctcgatgctgccggcggtcggcgcggccagtgcgcacaacatgcgcaccagcgtcgacttgcccgaaccattcacgcccatcagtgccacggtttcaccgcgcgcgatggtgaacgacaggtcatcgataaccgcccgtttggccgaaggatagcgataggtcagatgcgagacgcgaataatggggtccgtcatatcaccgatgccatcggagagcagcggcagttcggagccgtcttcgcgctcccgctggcgggggctgtcgttcgtaggacgactgggggcggcttctgtgccgatgccaccctcagtctcgctttgcgagacagcctccgctagcggggggcgattatcggcggctgcagtgacaccaacgattcgcccggcctccatgtgcacgatgcgatcggcatgaacggtctcatccggatgatgcgtgacatgcacaatagtggtgccgcgcgcctgcaaatcatccaaaatgcgcataacttcggcgcgtgcggattcgtccagcatggcggtcggttcgtccaataccagcatcgccgggttcatggccagcatgccggcgatggcggcgcgctgctgctgtccgccgctcatacgggtcgggtcggactgacgcaagttcgccaaccccacggcctgcaatgaatcaacgatgcgctcgccgatgagcccgcgctccagcccgagattctccgggccaaaagccacgtcatcctccaacacggtggtgaccagctgatcctcgggattctgaaacaccataccgatgccgcggcgggcagcgcgataggcgtcggcattcgggccggctgcgtacacgcgctgttccagtagcgtcacttcgccaccgtccggcgcggtcaatcccgcaattagacgggccaacgtggacttgcccgatccattcggaccgaccaggcataggcgctcgccggcatggaccgtgagcgaaacgccatccaaagcccatgaagtgccgcggtcatagctgaaacgaatgtccttgagtacggcggcggggggagcgggctcggcggaatcgtggaactcgtcggcgtcgaaggaatggggtgcaacggtcatgaaacagcaatccgtaactgataggcgaaaacgcagaatcccggcaagggccggagttctgcgttcttgttctttgagtggtcgttgagtggtcgttagtcgtggcgggcataggcccgtctcaggccggtcactgctgcttagacagcaggttggagaccggcttgtagatcaggaaggtgatcacggcgtgaatcgccatcttagccacgttgaacggcagcagaatcggcagaatcatcgcggccacagcctggtagggcatgtgcgcgtaaatcggcgtgatgatgaggttgcccaccagcgccaccacgatggccagcaccgcacccaccagaatgccgatggcggcacccttgcgcgtacggatcttacggtagatgaacgcggccggcacagacaggaacagcgccaccagcacagccatcagcgaaccccacgggtcggcgaacatgtgcggcacaaagccgagcacagacacgattgcggcggcggccggaccgtacgcaaagccggcgatcaggcagacgatgccggacgggtcgtacttcagccaagtgaccggcgtaatcgggaattcaatgaagctggtgaccatcgccagcgccacgaacagtgcatacatggcgatacggcgcgtggaccagcggccggaatcggccacaccagtggtgtgcgagccgagtttggcgctggtgctggcggtggacgcgctggccgaaccctcggcctcgggcgccacagaacgaacaacttgcatgcggatacgcgaagatacgctcataatgagccctcgtttcttccatccggactataccgttggctccggaatctcaccggatcagccgcttgcgcgggtcgcgggcttcccgccatccccgttatgaaacccggggtacaggttaccgccagtaaggaattgcaccttccctgaaactgacaggcttattcatacgccatgcgccggacgtacgcaacccgcgtttcactgtgcagaaattcgtcttgtgccggtcaagtgcaacaatgggagccatggctgaagtgaagaaacccaacaacaccattgacaagcttgccctgatcgtcaccacctacaaacgtcagcagctgctcgaggtactgttcgattcgattctggcgcttgagcaggcaccgtggcgcattgtcatcgtggacaatgagcagtccgatcagacggcggacatggtcgctgcgtttgccggcaaggtgaccggccagtggggcaccaccgtggccgaccagtccggcaacgaagagcgcgtggtctatgcgccgcagaccgagaacctgggtggtgcgggcggtttctccgccggcgtggccaaggcgtatgatctgggcgccgcatggttctgggtgatggatgacgatgtggccgtgctgccggacgccattgccaagctgtccaagtggaccgacaagcacgaggtgattcagggatcccgattcgattacgatggcggcccgttctactggcagtacgacttcattgtgccgctgggcattccgaacccgatcgcgcccgccgcatttggcccggccgggtatcgagtgatggacacgctgtgcttcgaaggcggcctgttcaaccgccgtgtggtcacggaaatcggtctgccggacccgcgcttcttcatctactgggatgacacgatgtatggctaccgcgccagcaaggtcaccaacccgattgtggtgcccgacgtgatcctgcgccgtacgcgcgaaatcggcaattgggatatcgccggcgtgcgccagctcaactccacgtccgacatgaaccggtatcacatcatgcgcaaccgcggatacatggcccggtacttcatgacctatggtgacttccgtccgctggtgtttggactgggtaccgtgctcaccgcggccaaggaagtcattcgcctggtgatggtggatcgcgaacacctcaagaccggtttggtgcagattgccaagggctggtgggactcgcgcaagctgatgcacgaccccacctggaagcccatgccgccgcttgagtgacggccatgccccggcccgtccggcgcgtccgcgtgatggtcgcgttagacttgggcgaaatcgtggatcgatgacatatcaggaaaggaaggtcaacgatgattgaaactgcacaggctttcggtgttgacattggcggttccggcatcaaggccgcacctgtcgatctgaccaagggcgatttcgccgagccgcgattgaagattctcactcccgaggtctccacgcctcaggccgtggccaaaatcgtcaagcagcagctcgaccacttcgaagtgcctgaatccgcacccgttggcatcgccttccccgcgccgatcaagcccggccagaagctcgacttcatggccaacctcgaccagtcttggattggcgtggacgttactgaagtgttctccgaagcctgcggccgcccggtcgtcgtggtgaacgacgccgacgccgccggcctggccgaagtccagttcggtgccgccaagggccaggatggtctggtcatcgccaccacactgggcaccggcatcggcaccgccttgatctacaacggcgtgctcatcccgaacaccgaactcggacacatcatcctgagcgccaagcatctggacgccgagaagtatgcctcctccgcgattcgcgagaacgaggaactgggctacaagaagtgggccaagcgtctgaccaagtactacggccttatggaaaagtacttcaacccggacctgttcaccgtcggcggcggcgtgagccgtcagagcgaaaagttcctgccgtacgtggatatcaagaccccgattgtgcccgccaagctgcgtaaccaggctggcatcgtcggtgccgcctactacgccagcaccaagcagcagtgagctgagttatttctgctggcgcaggagccgtattgaccatatgtaaggccgtccaagtatttcgggcggccttttttaatgagtaattcgttcattaggtcgattatgtgttcattaggtcactcccattccaaacctgaattgcaatgggctcggaatggcggcgtttcaagcatcaacaattgtgaggctcgactagcagtgacctaatgagcgcgaaaatgacctaatgaatgtagctaggccgttattcgatgtggattgaagtcatagtatgtctgacgactccgctgccgtgccgcacgattgtcgtagtgctggatgctggtggatatgaggcctcgatatacctggctcggcaggggtggttttatcgtggagggtatgagcgtgcatttctcttctcgtgtggatatttctgcgccgaatcccattgcggcggccgaggcggcagccaaggcaaacggcatcgcactcagcaaactcaacgattccaatccgacccgccacgggttggcacccgaattggtgccgagcgtgtatacggccgacccgcgtggaccgcgtgcggcacgagaatcattggccgcattcctcaatacggcaaacgtggtagacgcaagcagccctcagttggcttcgcccgccgccggcgagggcaggaacgagcgccatgccgctttcaccaatgtgaataccgccatcgagggcgccgacccggacgccctgtacctgctgagctccacgtccgaggcgtattcgtggctgattaagttactttgcgatgccggcgacgcggtgctggcacccaaacccggctatccgctgattgagtcgattgcacggcttgaatgcgtcgatacggtcgaataccagttgcaattcgatggctcctggttcatcgacatcgccgaactcgagcggctactcagcgagcccggtggcgaacgcgtcagagcattggtactcatcaacccgaacaatccgaccggttcgtacgtaaaaccaaccgagcgtgcacgtatcgtgacattgtgccgtgggcacggcatcgcccttatcgccgatgaagtgttcttcgattactctctcgaacctttccccggcgacgcacggctcgcgggggagcgcggcgtgctcaccttcgccctagacggattctccaaaatgctggccgcgccgcacgccaaagtcgggtggattcaggtgtccggacctgccgaggacgttgccgaggcccagcgtcgactggacgtcatcgccgacgattatctgccgatgggcgacatcatcgccgaacggattcccgcattattgaacgccgcgcccgcacagaccagacgggtgggggagcgcgtgcgcaataacctggccaagttgcacgagttgcttgacgccgatcccaacgggctggtcagcgtgctacgggccgaaggcggctggaacgtgctgttacgagtgccttccgtcatcgatgagaacgaactggtgttgcggctgattgacgagcaccaactcaccggacagcccggctacttcttcgacatgacctccaatggatacctggccgtttccctgctgcccgaaccggacgaattcgagcgtggcatccgcgccgtgctcaataccgtcgccgctttgctgcgataggccggtgtttgccggcaccacacctgtactccacgtacaatggcggcatgggattcttgtttagaccgaaagaactgccacacccggcatcgctgacgttcactttggaacaggccgggcatacgtatgatgatgggcacgtgggacttgctcccacggacatcaccatcagcgagcggcgggtggccgtgatcggactgaacggcgcaggcaaatccacattgctgggtctgctggacggttcgttgaaagccaacgccggcacggtgaccattgcgggcggtgaggaacgtcttgacccggctgtgaagaaggacgtgaagcgcatcgataatctggtcggcaaagttcgccgcgaggagattccgaacagtttctaccaagcggcgaatatttccgaggctgtttccgaagcgttgaaaaagcacaaggtgcccgagtcagaacgtcatgcgcgcatcggtaatctgttcgcgcattttgatttggcgcaggtctccaaggccaaggccggcgaattggactccgagaaacggcacctgctggctattgcggccgcgctgagctttgagccgagtgcgattgtggcggatgagccgagcaagggattggatgagattggcaccgcgcatgtggccaaggcgttgttcagctacaacaagcaggtgattttcgccacgcatgacacggatatgatccgccggcccgaatacgccatcgaccgcatactggtgctggacgagcacgcggtcgtgtttgacggagcgccggctgaggctgtggcgttttatgaggatctgattcgccgccgatacgagactagagcatcgtgaaccaagactgaacctgatgccagagcgtcggattgttgtcgatcatcgaatcgctgcgcgactgcacgaagcagctcagtatggctatgcccagcgcccacaatacggccagcaccacgacccagcgcatcagccaacgccacggagtgacgcgggcgatgccatcgcctgaagcggcgtcgttggcccccgccaatgaccggctcggttcgcgcccattgaccagccacagtagccccggtatggacgccagcgagatcagccagccgaaatcggcggaataccgccatcccaaaccgccgacgcggctgtcgaatacgaccagcaccgccgccacggccaagcaagacatcagccatggccgcatgccgtgtgtttccaatctgcgcagcaggggcagcgccaaagccatcaaggtcagtggcgtggccgtgaaaatcgcgccgaccatcacctcgtaataaccccattgcggcatcggggcgggagagcccgccagccacgggaaacgatccatgaagcgcagcggcaggaacaggtaataccagatgttggcgggcatatccgcggacggggtggtataccgggtcatatcggatacggagaactgatacgcattgccgaaattgaacggggaatcgaaccgaaccatgttccacgccatcagaggcgtcacgacgagaatggcgggaatgattaccgccagcggcgcgcgcaacgcctgcaacggcttgatgcggcgtgtgcgcagaccggtgcccagcgcgcgaatctgcggccagaacagggggaacgcaagcaatgcggccaaggtgaacgtcggtcggcatccgaaattcgccgcaatgcacaaggcgcccaaggccagtcgtggcagggagagaggcttggcatcgcccgcctgccatcggtccgatggtctcagcggacggcgggacgtgtccgcgccgagccatagccatagtcccagcgacgtcaacgtcagcgatgcggcgaacggtatctgatagaagttcgtgcgatacagcaaataccccacttgcgcgctcaccaacgatgagaccactactaacgacgcggccgccaccgaagtcttcggcatcacacgatggatgacgcgcagcaccagcaaggagaagaagatgatgaacagcagcacgagaatatactcggcggcggatgtcggcagattatgaccggccagcagacgataggggacgaacagcagcactgcgggcaacacgccaaaataggaataccagtgaccgtcataatacgcgtaatcccagtagagcggactggctccattggcgagtagctgggcacgtgtggctacgtcataggggtgctcggtggcggccagttgttcgggaaccggcaagtcgagccagggccggccggcgaccagcgcatcggccacatgcccatactggtcgaaatcataggtgtaatcgccggaaacgtggaagacgagcgaagacgcgtaccacagttcgtggatgatggatacgccgataagcagggtaggaatcgccagaagccccacgaaagcaagtcgttgccgagtgctggacgggtcaagcgtgatacgccacaggcgcgatcccggcctccagacggcaatcatcagcaacaccaaggccatggcgagcacgcgcatccaattgatgacgaacggtacgcgcacgttggcgcgggcgtcggtgaccggtacgatcgcgtcgcgctcttcctgaatccaaatacgcacgatgccggcacccggcgccttgacataatggctgcgaatagcgtcgggattcatcgactgggccttgccggtgatgccatcgacatccgcgcgcacatgaatggtcgccagcggtttgaagacttccttatcgtcgttcgctttggattcggcctcggcctgctcgcgggccttatcgatgaccttgctgctctcggtatcgatgcgtaggtaatccgacgtgccgtccgcggtcagttcaagataggccttggtcggatcggtgacggtcaacatgccatcattccggcgcgtgagacccgagcccagcgtgttatgcacggcgttcgtatccgtgctcgctccgagcgtacgccagaacggcaggttgaacacgatgcactccatggcggcgatggcggcgacggcggccagcaaggcgatcagcaggcgcaccaaacgcagccggtgccgggtatccgggcggctgggcaggtgccgttcatgattcgacggcatcggacggtctgcgcgagtgtggtctatggaatgcacgcatttattctataggctttattcgggcttgatgtcgggcaaacaagagacaatgtgaatcatgccaaaacgtacatcggaccatgggaagcacaaccgcacgccactgctgggcgggctgaaggattcgatgaacgcgctcgcggccgatctgggactgtccaagccgaagaagcacgatacgaatccgttcggcgatgccttgcgggagaccagtgagcgtaaaggcggcattatcgacgaactgactcgccatgcagtggcgctgagtcctgtaatcaagcgacgcaccttccccgaattggagaacgtgccggaagggctggtgcttggatgggcgcagctgccctccaccagaggccgtggcttttcgcttggcattttccccgaccgcgatcattttgcgcaggtggcgttcgccgatacgcatggccgcgtattcgtgggcaccgaccccaacatggacgtgcaggatatgcaggcgcgattcatgttcggcaaggaaaaggaagtgactctgccggacggtgagcggctgggcgaaagcgacgagccgcgttcacgttccggtttctctcgtgcaggccatggcctgggaagtgcgctgcatcatgggcgtggtttggggcgtggccttggtcatggtgctgacggcgtgaaggccattaccggtggcgtggtggggcgtgacgacaccggacgcatgacgtggctcgcctcatggctcaaggccggcaaccggtacacgcttgagcagatgcgtgccaatctgccgcctgtgatgcgtcatgatttggaataccgcgatgccattaccatcgcgttcttcgccacgtatatgttgccgcagatcaatggtctgctcatcggattcggttccggcaatatcttccgccgtctcaaccgtgaggcgccaatcggtgcgattcgccgttcggtgcgtgacactttggcggcacgagcccacggcatgcgggcctccggtctggaggatcacttcgccgatctgatgcgcgaagccggcgccctcgacaccacgccgggactggaagcggtgcatggcgccgaaccgttgcacctgtacacctcgacgtattcgagcggctatttctttacgtgggataagtccttggcattcgggcaggcgctgaaatccttgaagatcgaaggcaacctcaaccgattcgctgcggtgagcgcttggctggagcgcaacgcttccttggggcgcaaccctacggaagatacggtgacccgtgccgaggccgcgcaaatcgacatgaaactcattgagaaccctgcgattatggcgcttgacccgtatgatggcgagcaggagcgtcgggccgtgctgagcctggtcgatatcgccgcacgcacggctgggcagattcgcagtgaattccctgatcctcgagatgtgctgacccagcagaacgtgccggattcgggtgtgacgaatgctgcgggcgctgaaagtactgagagtgttgagggcgctgtagagcggaccaataagagcgacaccaacactcaagccgctcggccttcgtattcgccggcgaggagcgacgaatgggtgtatcgtcagaccctctcctcactgttgcgccggttacggttgccgtatcggtttgatgtggagttccggtcgcgcttggattcgggtgaagtggccattggcttcaccactgccggcacctcgatgatgcccgatagccggtatgacaccactcgccgtacgtggcgtgcgctgagcagcgccgaacgcgcgtcgatgagcgccgcctacaacctgcgtgtcggcctgatgatggcagcgctgagtttcggcaccagcgaatccgtgcgccaggtgtcgttgcacatcgattccattggtcttgaagaggcgattgccgaacaggattccgccatcgaggcgatgatgagcgaggccctaagcgccttcgaacatctgcgcagtggcgatttggggcgtgtgggttccaaagccgaccccaaagatggtgatttccatggcgacccgacccgccccatcacccatgaggagacgttcgggcaggcggcgtccggtgacgaacgcggcacggccgggggaataggcaacggtaccggaccgtctgcggatgctacggatcaggccgcggccgaatccgctgacgccgatggcgccgcgtccatcgattcgcagttcgaagacctgatgaagggcgtcgatatcgacgaaatggcgttcggcatgccggacgataccggcgcaggcgacgacctgggcggtatcggcggcgagggtgtcggcactgacgatgctgatggggccgccggcatggacgatgatccgatgagcgtgctgcgccgcaatcccaccgtgcgcaatatggtcaccgtcaccttcacccgtgatgccttcctcaagcgactggacaccgatgggcttgacaatcccgaggaaacctaccgcatgttcggtgccgtgatggacgtggacggcgaaggcggcctgaaacccatcagcgccgacttcgacttggcggacagccggttctctcccaccggatcccaggaggagcccgaactggccgaccgtcaattcagcccggcgaccgctcacgtgctgggcgcacagaatagtgccggactggctatccagcgagtggacttactgcagcatggcgtcaacgaattccacgatatcgccaggaacacgtcgctcggctccgtggaaaaggcccagcgagccatgcagatcatcgaatcgatatgcgatcccgaactgaccggtttggcctctcaggtcaccagtgcgttgatcgatggcaaggacaccccggacttcacgttcacgcttgccgacgatcttgacaaggagcgtctgcgcgcccgagacatgctgttctcgggccaagccgatcaggccatcgaagcggccgaagcggctgtggcccatttggatcaggtgtatgcggcaggccatggcgtacctcgatacttcaactcctatgccgagcgcgtggtctacaaccggctgttcgccacattggacgagcgtacggtgctcatcccggacaatctgttctacgcacacatggagctggctgacgtgttgagccagatcaagggtgccgaggcggccatcccgcacctcaaccgtatggtggcgtacgcgcccgcctacccgctctcacatctgaagctcgccatccaactggcccgcaatgaggattgggattcggcacgcgccgcctgcctgaatgctctgcgcgtggccttggaccgcgacgatgccgcgttcgcctactaccggttcgcgtacgccgaatggatgcttgaccggttcgacacagccgccgcagcctacattatgagcgatcacatcgctcccggggccattggttcgttggaaagcgaactgcaggaactggtttcccgtgcggactcgcagtgcatgccggtgcctgaatcggtggagacggccgcccatgtgcttgccacgcatgatctgccggtctggccgcatatcgaagtggctgacatcgtgcgtgacgccgcccgcgtgtgcgtggatgaaggcatgttcgtgccggcccgcacgctctcggtggccgtggcccgcatgaatgacggtgaaggcgacaacatcgacatcatccaagcccagttcctgcgctcgctatccgcgtagccgcctgaggggagttgacggtatatccggccgaggggagccgagcccgctaggatagacaaccatgagcacgaatgaacaactggcatgggatttcgacgatggggatgtggccgaggtccggcctgataccggtattgcacgttttgcccctggctccgaacaatggatagccgcactgcagcccactgacgacgacgcgatacgcctcgaccgtttcgacgtgaacacgatgaccgctgaggccgccgcccgcctgtgggctcgcgtggccgcatgggtggaatccgatcagatcgcctactacatcgacgactcacccgtcagctccgacgccgcctacgacgcgcgcatgcgttgcctcgaacgactcgaagcggcgttcccctcattggacaatccacagtcgcccacccatcgcgtcggcggctccttctccaacgacttcgcctccgtgcgccaccccagccgcatgatgagccttgatgacgtcttctccatcgaagagctcaaggattggtacgactcggtgattcgcgacctcgattggcccgaatccaagcccctgcccatgagctgcgaggtcaaaatcgacggcctcgccctgaacctcatctatcgcaacggcgtgcttgaacagggcctgacgcgcggcgacggcgttaccggcgaagacatcaccctgaatgtgcgaaccatcggctccattcccgccaacctcggcggccccaaggaagacgttccggacttcgtggaaatccgaggcgaagtgttcatgcgctgggatgacttccacaccctgaacaacgagcaggaggacgccggacgagcgcccttcgccaacccgcgcaacgccgccgccggctcgctgcgtcaaaaagaccctcgcatcaccgccacccgtcgcctgagtttctatgcgcatggtctggggcagctcacctgggggccggaccatccgcgcggcacccatgacgtggtcgccgaccagtcgcaggcctacgatctatacaccaggtggggcgtgccggtctccccgcacaatcgtgcggtgacctcattccaggagatcctggacatgatcgagtactacggcgagcatcgcggcgacatcgagcacgcgctcgacggcattgtcgtcaaggtcgatgacctgggcctgcagcgcgccctcggtgccacctcgcgcgcgccgcgctgggccatcgcctacaaatacccgcccgaagaggtcaacaccgaactgctcaacatcaccgtgcaggtggggcgtaccggccgtgtgacgccggtcgccgtgctcaaacctgtctacgtggccggctccaccgtggctcgtaccacgctgcacaacggatttgaagtcaaacgcaagggcatcctgatcggcgacaccgtggtggtgcgcaaggccggcgatgtgattcccgaactggtcggcccggtgcttgaacggcgcaaagggcgtgagggccagctgcgcgaattcgtcatgcccgagttctgcccttcatgcggcgcgaaactggcacccgccaaggagggtgacaaggacatccgctgcccgaatgtggaaagctgcccggcccagttgaccgagcgcgtgatttcgctggcctcacgcaaggcgttcgacatcgagcatctgggtgaacagtcggccatcgctctgaccaacccggaggagaaccggcctgattcggtggcgacctacgcgccgaacatcaccgaggttctggtcgcccccggcgaagagcccgaaccgtacgagccggtggaggggctggaattgccggccgcgcagaagccggtgttgtccaacgaatccgggttgttcgacctgaccgccgccgatctgcgcgacgtgcgcgtgtggcgtgaggccgcaatcgtcgaggtgcatgagacggtcggtgcgaacggtaagaagaaaaaggtgcgtaagcgtgtcggtggctctggcctgtggcatcaggtgcccgccttctggaccgcgcccacgccggccaagaagctcacggccaagcagctggccgaacgcgcgcaagaagaggccgcagtcgaatctgccggaacacagggaggtgccgccagcgagacgaccggcgcacctaccggggctgaggctccacttggtactatgccgggctttgccgcagcctcctatcccgagtatgacgtgccggccgatgcggtcatcgtgcgcgtggaccacaagaccacgcgcaccggcgtcacggatgtgccggtgatcattcggcccggcgaaaacacgcgcaagatgttcgacgaaatggacaaggcccgtcacgccgacctgtggcgtgtgctggtcgcgttgtcgattcgccggctcggtccgcctaccgcacgcctgatcgcctcggcgatgggctcgctggcagccatcgaaaacgccacgattgaagatctgacggccatcgacggggtgggcccggaaatcgccgaatcggtggtgaactggttcgccgccgcccgcgagcccggcgactggcgcggcgcgactttgcgtgcttggcaggccgccggcgtgggcgtcgacgaggccgagaccagttcgctgccgcagacgctggccggcaaaaccgtggtggtcaccggttctctggagggctattcgcgcgactccgccaaagaggcgattatcgagcgcggcggcaaggcggccggttcggtgagcaagaagaccgattacgtggtgatcggcgcaaacgccggctccaaggccaccaaggctgaggaactcggcatccccatgctgggcgaagcccaattcgcccagctcctagccaccggcaccatctaaaatagccccctcagacgcttcattaaccccctctgatgagggggctgtcagcctttaggctgactgggggagagaaaaagcgaatcccgccccagtgtgacttactccactccctctggcatgccgccgcatcacacgctagggtagaacaggccctaaaggaggatacggatttatgagcgacgcacgtcagatcgaagccgacatctacgaacgcctgagcaaggtcatcgaccccgagctcggtcgttcggtcaccgacctcggcatgattgccgctatcgaagccgcgcccgcatcgtcggacgccggcacttacgacgtcaccgtgcacgttgagctgacggttcccggatgcccactgagcgagaccatcaccaaccagatcaacggcgcggtcagctcctatccgggcgtacagctgctgcctcatatcgaagtcggttcaatgagtcgtgacaagctggccgatctggttgccgacctcaaggccgaacgcaagcggaaccccttcagcaagccgggcgtcaagacccgcatcttcgccatcgcctcgggcaagggcggcgtcggcaagtcttcggttaccgcgaacctggccgccacgtttgcggccctcggcttcgacacggccgccatcgacgcggacatctatggcttctcactgccgcgcctgttcggcgtgcacacgcagcctaccaatctgaacggtatgcttatgccggtcaccgcgtggggcgtgaaactgatctccatcggcatgttcgccggtgccgaccgggcgattctgtggcgcgggccgcgactgcagcgctccttggaacagttcctgtctgacgtatggtggggcgagccggacgtcctcttgctcgacttggctcccggcaccggcgacatggcgatttccgtggcccaggcgctgcccaacgccgaactcgtggtggtcaccaccccgcagccctctgcctccgacatcgccgtgcgctccggactcgtggccctgcaggtgccgatgaaggtgcgtggcgtggtggagaacatgagctactacgagcacaagggcgagaagctggagattttcggtgccggcggcggtcagcgcgtgtctgaacagttaagcgcggcgcttggctatgacgtgccgctgatggcccagctgccgctggaacccgaagtgcgcgagatcggcgaggcgggccgtcccgcggtgctggatgtcgatggcgccttgcgcacggatggcgtcggccagaccttccgagggttggctgaacggctgttggcagtgtgagcctgcgcagcctcacacttttgtaggcggcgctggcgtttaagtccggctcgctgctggtgggcgaatcgcttgaccacagcacccgcgacctggtggtcgaggcagtggagcgcactgccggcgtggataggctgcattaacctgcaggccattcacatggacgaggacgccgtgccgcgctgccttggtatgaatgggggatctacgtcgagcctgatgtctggcgggcacctcgcggtaaatagcggcatagcgcattatcggtgcgatgctaagaggtaatggcccatgagcggttccaatcggcgagattgcgttgccgggacaccacgacatgggccatctcgataaaacgatgccgcgtgtcggctgttctcaggtcatccgcagtgacgagaatggcgatccagccgagcagttgcaatgcgtttcgctttgccgcgtcaattcgcatttgtgccggatcggcgtgataggctccctgatattcgaacgcgacgcggcagtccggatatgccatatccaatatgacgtatgagttgccgatattcacgcgatagttggcggtggggcatcccaagcccgaatccttcagcatcccaaacagcgtgttttccggcggagaatccgtgttctctgtcatgtagggcagtgcctcgtggcatttgttacgacctatgaaccgcggactgatttccaagtaagtatcgaaatccttgcgagtggccattctgcgccgtttatcgcggctcatcaaagaggctccaatggccgcaagttcctccaatgtggagtattgggccatctgagcccacatcatgaccggcgaggcaatccagaaatgttcatagtcctttttgcggatatccagttttcccttaaacacatggaagaccacgcctttgattcgtctgcgtttgttggcactggaaacacaggcgtgcacggcatcaacagatagcgtgcaatgtcgggggatgggcgcgccgtagtagttggccgcattgatgtatcccaccagcaatggaccttttgaacggcgcgcagcatcattgcaacgttcacgttctgctcggcgtcggccgacaatatcctcatgcataaaagagctcatgatgcgaccgtaaagctgatttggacttgaatgcaagccaggcagggcaatgtggttccagcttatggagttatccacattgtctatttgcgcagagaacggttctcagtagtatctgtgcgctcaaatgaacaagaacataacaatctcacatcatcgcaaatggcgacatggcagtgattagggcatattccatgtgcgcttcgggcgtagagaagtgcgcacagatattattgagaaccgttctctgcgcgcctactctccggtggagcctctggccacgacctcggtgggcaggaacaccgtgcgctggaacggtcggccctcgatctggtcaagcactagggtggccaagctgacgccgaatgcgtccattggctggcgcacggtggtcagctgcgggtgcagggctgtggcgtcggcgctgtcgtcgaagccggcaatggcaatatcgtcgggcacacgcacgccgcggtcgagcagataattcatggctccagcggcgatgcaatcactgccgcatatcagcgcgtcgatatgatgctcggcgaggagctcgggcacgctggcgtcggcgccggcaagtcggctacccgacggctcagccagcgagtccagcagccgcacgacggcgttgcggccatcgggccgggtccagccgtcggaccgaatgaccagtgccgggtcgaaatcgccggccatcgcatcctggaatccgagcagtcgttcgtcggaacatggcaagtacggcggtccgatgatataggcgattcgccgatacccgcgccccaacatatgctcggtgagcttgcgtgaagcgagtcgattgtcgatatcgacggtggggaaggggatggcgctgccatagccgacgccggaaatggcgaccggcacgctgatattggcgaatctctgaaatagcgggtcatctttatggaacgtgttgagaatccatccgtcggcgaatccgctggaggcgagtctggcgatgcgtgcgccggccgcaggggagtcggagatcagcgtgatgagttgataatcggcattgccgagcgtctggttggcgttgagcaggatggtgttgatattggggtcggcgattagcgaatccggctgcccgtgcaccacgaacgccacggtttgcgtgcgttggcgtaccaatgatcgggcggcgttgttcggcgtgtagttcacctgcttgacggcggcggcgatgcgctcggctgccttggccgagacatgcggattgccgttgagataacgggagacggtggcgtaggagacgccggatgccgcggcgacgtccatgatagtggccggcttacggggtatggccatgcccgtctccttcctgtcctagggccgttcacagtgattgtaccgcgcgattttcctgatgattccgcatggcccatgtccggtgcctgtggattgccgtgccggcgtatgaaagtcggtaaacattctctgccgtaagggtgtacgaagtaaatagtaaaagagatttactgatattaagtgaagtacgacacgcacatgatatttgtaaacctttacgtgagtgttatactccttctcgtaaacgtttacaagaaatcaccagtcaatggagacggccagatcaagcgagccgcaacggttcacaactggacgggaaggaacatcatgaagcagcagcacaacgtacgccccgccatccgcagggtgctccaggccacggccatcgtcacggcagcggcccttaccctcgccggatgctcgatgggcgcaccatcctcggacaccggttcgagcgatggcaagctcaccgtctgggtcatgcagggcgatcaaagcgaggccaccatcaaggccatcaacgaccagttcaccaaagagaccggcgtcgaggtcaacatccagaaccagcagtggaaggacatcagcaccaaaatcaccacggctctgtccaccagcaccccccccgacgtgctcgacctcggcaatacgcaggtcgccggcttcgcggccagcggcggcctcatggacctgaccgaccacgctgacgagttgcgccagggcgtcacctggctctccggtctggaagagcctgccaccatggacggcaagctgtacggcattccggccctcggtgccgcccgcgcagtggtctacaacaagaagacctgggccgcggccggcatcaacgagccgccgaccacctacgccgagcttgaagccgacctgcagattctcaaggacgcgcaccaaggcgaggacttcaccccgttctatgtgccgggtgccgattggaagaccgccatccagtgggtgtgggacgccggtggcgactacgccgtgcagaaggacggcaaatgggtcagctccctgtccaccaaggaatcggtgtccggccttgagcagtggcgtgaattccagcacaagtggtcatccgaagcctcccgcccgctcgacaccgatagccccgacaccagccagctcatggccgagggcaagatcggcgccgtaatcggcaacagcgcctccatccgcgtgattcaggaatacaacaaagacatcaccgccgacgaactcggctccttcccgatgcccggcctgagcggccagaaccagccgtcgatgatggccggctccgtgtggggcgtggcccagaaaagctccaagcaggatcttgccctgaagtggatcaagatcgcctccagccctgacatccagaacgactacgtgttcgccaaggacggctacctgcccaacaacgtcgaaggactggacaaggccatggcctccgacgacttcccgaccgccctgaccggcttcttcgaggccgccaagcgcaccaaggccacgcccgcctccccgcagtggaccaccatcgaaagcgacggctcgctgaccctgttcaaggacatcgccaccgacaccagcaaggccgaggcctccgccaagaagttcgacgaacacgccaacgagctgtatgccaagtgatgggttggaccatgacaagctcaacgcaactcgcgcacggcgaggccccggcctcacggccggctaagaaacgcggcaatcgcgccccggcgttcctgctgacgcccgccggcatcgtcatcatcgcactggtggtcatcccgctgggattcatgatcttcacgtccttcacggatttcagccagcgcacgctgttcaccggcgaattcgacttcgtcggcctcaagcaataccaatccgtactcaccgacccggccttctatgcggccctgctacgcaccttcggcttcaccgcagccctcgtggccggcagcgtgctggccggcatgggagtcgcccagctgatgaccaaactcggcggtgtgatgcgctacctggtcatcttcgtgctcatcttcgcgtgggccatgccgaacgtcgcatcctcggtggtctggaagtggctgttccagcccggttacggcgtcatcaactggctgctcacccagctgcacgtcttcggcgacatgaccaacacctcctggatcgacaacacctggctcgcatttctggagatctggctgctcgtggtctggcaggccgtgccatacatcgccatcacgctgtacgcggccaccacccaggtcgaccagtcctgcatcgaggccgcccagctggacggctgcagcaagctgcgctgctactggcagatcgtcgtgccgctgatctccccgagcatcatggtcatcaccatgctctcgattatctgggacttcaacgtgttcaaccagatctggctcatctcgcagggcggcccacaggacacgaccgccaccatcggcatcttcacctataagaaggcgttcgtcagcttcgagatcggcactggttcggccgcctccgtgcttgtgaccatcgtgctgctcgcactgacctccgtgtacatccgttacttgctcaagtcgggagaggacctatgagtacgtcaatgagtgcaagtcctgcacaggccgtatcgcaggccgcagcgcagtccgcatcgccccgccgccgaaccaaccccggcaagatcgcgcgccgcgccggcaccactatcctcgccctgctgttctgcgtcgtatggttcttcccggtctactggatgattatcaccgccgtaaagcctcgcgatgagatcatgaccacgacccccgtgttctggcccacgcacctctcgttcgacaacttcatcgttgccgtgacccagacctcgttcctgaccaacctcaagaacagcgtggtcgtgaccgccatctcgatcgtcctgtcgatcatcgtcgcgttcttcgcgtgcgcggccctgaccctgtaccgcttccgcggccgcaagccgatcatggtgttcgtactggccatccagatgacctccggcggcatcatcccgcagttcatcatctacaaccagctcgggctgctcaacaaatacagcggtctgatcttggcgtacatcgccatggtgctgccgttcgcgatctggaacatgcgtgggttcttcctgaacatcccgaaggacatcttcgaatccgcggccgtggaaggcgcgaacgactggcagatcctgtggaagatcaccttcccgctggccgcgcccggcatcgtctcgacctcggtgttcgcgttcatcaacgcctggaacgactacatgatcgcctatacgttcatgaaggaccagtcgaagtacacgctgccggtatggctgtcgtccttctcgacacccaccatgggcaccgatttcggcgggcagatggccgcttcggtgatcttctcgctgccggtggtggtgttcttcatgctcatccagcgtaacatcatgaagggcgtgacgaccggtgccgtgaaatagcgtatgccgccgtacctcaccaacgattcgtccgctgatggcggcgcgaccacgtgtcgcctgccattagcggacgaacgataataaaaaacagtatgaaaggaacagctgtgcccacattcgaatatacagtcgatgccgcaacgctgtgtctcaccctgattcccgctccggtgacattggaatacacgcatggcacggctatgatcgggtccctggtgacgatcgagaaacgaattcccgaatatgccgccaccgaaggtgccgatgagacttgggaaacgctgccgattgagcagctgtccagcgagctcgagcgttactgcggcgtcaccgtccgtacgcgccgtgtccgtgcagccacaggtgaagacgacgccagcgccaatgccgccgaagatgcgcgagatgcgcgtgcgggtgcgccggcagcgatgaacggcaccgtcatatccctgggcctagattcacgattggcgcatgacgaatacacgctggatgtgttcgcctcagataccatcgccgtgcgtggcggcggcgaaagcgggctgcggtacggtctgcagacgctgcggcagatcatcgggcagacctcgcgtgccattccctgcctgcatatccaagacaagcccgcgttcgcggtgcgcgcctacagtctcgacgtgacacgcggacgagtgccgacgatggagttcctcacctggttcgtcgaccagctggccttatataaatacaatcagttccagctatatgtcgagcatgccttcgcgttcgtcgagctcagcgaggcgtggcgtggcaccgatccgctcacggccgccgacatcacgtatctggacgagtactgcgcgcgtcgcggcatcgagttggtgccgtcgttggccacgttcgggcacatgtacatgaatctgcgcacccgtgagcatcgtgggctgggtgagttccccgaagacgccgaccgcccgttcagcttcatcgaacgcatggagcatcacacgctgaacgccgccgatcccaaggcccatgatttcgcctcgcgcctgattgaggaatacgcgccgctgttccgttcgaagtccttcaatatcggcggcgatgagacgttcgacttgggacgtggcaggtccgcgcaggacgcgccggaagccggccgcgatgaactgtatgccggtttcgtcagggatttgtgcgaaacgctcgcccgccatggtcggcagccgatgttgtgggcggacatcgcgctcgaaagcccgcgcacgatggatctgctgcccggcgacatcacgatgctcaactggatgtacgagccgcagatcgacgagagcaacatccagaccatcgccgcgcagggccgtcgccagttcgtgtgccccgcggtgcgggcttggagccggttcttccccgattatgcgggtgcctggctgaacacgtatcacatggcattggcgggtgtcaagtatggcgcggaaggcatggtggtcaccgattggggcgattacggccacgtcaacgatccgcgtctgagcgtgccgggcctgtgttatggcgctcagaacgcgtggaatccgattgagatcgatgcgcatgagatgaaccgtcggatctccgttctggtgtatggcgacgagtccggtcgcatcatggattgcctcgtccgcattgactccgatggggtgtcattcccctgggaccttgccgtgcaggtgctggagctggaatacggttccggcaccggcatgctgaatacggatgtggcatcgtatgtggaacggtcgtgcgggggagagctcgtgtttgaccgtacgctgggatgcgccgatgcgcgccgccggctgctcctgcggaaccatgcccgactcgaacgacgccgggattgcgaccgggcgttgatcgattgcggcagtgcggttgttgcggtgctcgatggctcggcacgaggaggattgaacccggaactgctgtgggtgatgctggatgggcagcggttgttcaatagactgggcgaggaactgctggtactggctggcggcgaggacgcctgtgacaccaaggatgtgaccggccgtgcgctggatgcctcgcgccgcgcctgtcttgccgccgatctggagttgtggttcgaacggtaccgtgtgcagtggctgtccatcggccgctacgccgaattggcgcgtatcgcccatgtggtgtggtcgtttgcggacatattgcgtaggggagcgctatagggagctcacagaaattcggtcctgctgagaacaaggtgaggcttacgcgccgtcaaacgcacatggtgatttcaaaaaatggcgaattgctgccattcttgcacctgtgcgtttgatgggaaatgtgcgtatgcctcacattttttgcataaagcatgaaaatgtggcccgttgtctagatgaaagtgcgacaccctttagattggagattgtccagataaccagtgaaggggtgtcgcgccttgggtcaagtgtattcgcacctgtcggaagaggaacggcggatcattcagatagagatcggcaacgggacgagcatac

SEQ ID NO: 3850 - DNA, 21645 bp, Unknown
  R35_2m  MAG No. k141_13455
cgcggcccgcaacggcaactatctgtggagcgggcgcgccaaccaggccgatattctgcctgatgacatctattcgctgggcggcatcgccgtctacctcggctacggcgcccaccgcggccagcatttcgagaacgacctgctggccgtgatgcgcaaatgccgtgacgtatgccagcgcctgttctacgggcagaccgaagacgaggcgactgcggcaaccaccgccacggcctccgccgcaacgcagcagccgcaaaccgcgcctcgcccgcgtatgcacgtgatcgcaccgcgactggagcggaaccgacgccgcgcgcagcgatagacctttcttgtattgcgttcactacgttcattaggtcgattcatcgttcattaggtcggtccgccgccgcataccttgttggaatggcggcattccaacaacagatacgagggtgcagtgacctaatgaacgtcaaatcgacctaatgaatgagctctggcgttccaaagcagatatcagctatacagacacagcatattcgttggattttcaggtgaacactcggtgaatgcggctgtccgaaaaatggcgtaagttatattaggtcacacaagggtggccacctgaaaaccacgagcgaaaaggtgagccttgtctgaagaaacgccaatggtcggcaaaagcgtcgtaacgctggacggcctgtctacaaaccagattctcgacctgctgcataaggccgaatacatcgattcccaccgcaaagaggttgcccatacctgcgatgggcgagtgctggccacgctgttctacgagccctccacccgtacgcgcctgagctttgagacggcaatgctgcgtctcggcggcaaggtcgtcggattcgccggcgcgcagctggcctccgtgaccaagggcgaatccatcgccgacacgttgaagaccgtgtccaactacgtggacgtggtcgccatccgtcacccgaaggagggtgccgcgctggtggcctcccgcgccgcatccgtgccggtgatcaacgccggcgacggcggccacatgcatcccacgcagacgctggccgacctggccacgctgcagtcgcgcttcggccgcatcaccgacctgaccgtgggactgtgcggcgatttgaccttcggccgcaccgtgcactccctgatcgagaccctgtgccgcttcggcaacgtgcgcttcgtgcttatcagcccggacgagctcaagaccccgcagtacgtgatcgaccgcatcaacgccaccgacaactgctcctacgtggaagtgcgcgacctggcctccgtgatcggcgacctcgacgtgctgtacatgacccgcgtgcagaaggaacgcttcttcaacgaagacgactacctgcgcctgcgcgacacctacattctcgacgaagaaaagctgcagctcgccaagccgtccatggccgtacttcacccgctgccgcgcgtcaacgaaatctccgtggacgtggacgacgacccgcgtgccgcctacttcgaacaggtcaagaacggcatgctcgtgcgcatggccctcgaaagcaccgtggtgggcgacgaactacccggatacgaaccgctcaaccccaaggaggttcaggcctgatggaagtcaccagcattcagaacggcatcatcatcgaccatgtgccggccggaacctcgctgaaggttctcgaatacctgaaaatcgacccggccaaaaccaagcttgcgctcatcatgaacgccaactccaagcgttacggctccaaggacatcatcaaaatcgaggatgacaaggacatcgacctcgatgtgctcggcttcgtggcccgccaggccaccgtagacgtggtgcgcggcggcaagatcgtcgaaaagaagcagccgaacctgcccgagcacatcgtcggcgtgatctcctgcgtgaacccgcgctgcgtgaccaccaccgagcctggcatcaagcagatgttccacctcgtgcactctgaacggctcgaataccgctgcgactactgcgacgaggaagccaaactgtgagcatcaccctacgcaacatcaaggtctggaacaccggcgaagtcatcgacctcgtggtgcccgggaccgctgccgcctacttcgccgacacctccgccgtggctgacggtgccgatatcgacgccaccggactgaccgtggcccccggtttcgaagacccgcacgtccacttccgcgatcccggccagacctacaaggaatctatggcctccggctgccgcgcgtccgcatccggcggatacacgaacgtgctcatcatgccgaacacgttgccggcactggatgggcagaccgtgtctgacctggaagcggccggtgcgaaagaggttctggatgccggcttcgacaacgtcatcgacttcctgcagcagtacgatactgcgcacgatgttcaattgccggttcgttacgatctgtgcgtgtgcgcgtccaaggatcgcgccggtcatgaggcaagcgacgttgccgactggctcaggtacgtgcccggattcgaggacgacgccaagacgccggccatgctcacgcaccccatcaccgcaattagcgacgacggttccgctgtgacgccggagatcctggaccaggtgctggagaacgtcaaggcctccgacctgtacctaatcgagcattgcgagcatcacgatacaggtgccgtgaacgaaggcccggtctcgcgcgaacttggcgtgcccggcattccggaagacaccgagctcaagatcgtggcccgcgatatagaagcggcccgccgcactggtgtccacgtacacttccagcatgtgagcactgccatctcgttcgaggcgattcgcaaggccaaggccgaaggattgccaatcacctgcgagaccgcgccgcactatctggcgttgagcgacgaggcgctgctcaagtacggcacgctcgccaagatgaatccgccgctgcgctccgaagcggaccgcaaagccaccgtcgcggccatcgccgacggcaccgtggatctgctggccaccgaccatgcgccgcacacgttggcagagaaggaactcggcttccttgaggcgcccaacggcatcatcggactggaatgcgcgtacggcgtgtgccacaaggtgctcgtcgacggcggcttcatttccgatgagcgtctgatcgagctcatgtccgtgggacccgccgaactcatggggcatgtgccaaccgacgtggccgcgctggtcgaggactacgccgaacccgcgcccactggggatgatccggatggcgtgattgcgggggagagcgacgctcagccgcagcgtgaaggcgtcaaccgactgctcgacctgagccgcgtggatgacgccgacaatgtcgacctcgtggtgctcaacaccgctgaggaatggaccgtggaccctgaacagttccactccagggctcgtaacaccccgttcggcggctggcaggtcaccggacgccccctcgccacgatcatcggctcccagctgatgttcagccgtctgtagataacataaggagcagcatggatcgcctgatcgaagcgattgacaacactcagaaccccagcgtcgtgggcctcgaccccaccgaggcgttggtaccgccgcaggtcgtggcgagctttgccgacgaggtgcgtgactcggtcgaatccccggaggaaatcgaatccgcgcagctggccgtcgcctacttcgaatacaaccgcacgatcatcgacgccatcgccgacatcgtgcccgccgtcaaaccgcagatcgccatgtacgaggcgctcggccccgccggcgtggacatctacacgatgacctgtgaatacgcggcccagcagggcctctacgtgctcggcgacatcaaacgcggcgacatcggctccactgcagccgcctacgcccaccacctgaacggcgtgggcgacttcgacccgtggcatgaggatgcggtgaccgtcaacccgtatctcggcaccgacggcatcaccccgttcgtcgaggccgccgccgaagccgacaaggacatcttcgtgctcgtgcgcacctccaacccgtcctccagcgaactgcagatgctcgacctggccgacggcacgaaggtctacgagcatgtggccgatctcgtggaaggctggggcgccgagaccatcggcagccacggctactcccgcgtgggcgcggtggtcggtgccacccaccccgaggaaggcaaggcgttgcgtgaacgtatgccgcacacgttcttcctcgtgccgggctacggtgcgcagggcggcacggccgcggacgtggcaggcatgttcgacaagcagggcagcggcgccatcgtcaactcgtcgcgcggcatcatcggcgcatggaagaagagcggcaagtactccgaatccatgaccgccgacgaggcgctggaccttgtggcgagcagcgcgcgccaggcggcgctcgacatgcgcgataatctgcgggttgccgtatataggtaggtagattgtccggctgtgggctatacgtgagtgtgggctggaaaccggagccgagtgtgtttaactacccctcagtcaacctgcggttgacagctcccctgataggggggagcttgatgtgctgaataggaatgaaatgacaactttcacccccacccatgatgtggttgcggaggcgactgcggccggattcttcccgccgcgccacaacgtcgaaatcacgcaggttacggaactgaccgaccgcgtgatgcgactgacgttccacgacccgttcatcgcctcccacgccaagcccgcccagttcgtcaacctgttcacgcacgacgacttcatgctcatgccgcgtccgttcggcgtcagcgaagtcgacggcgacgaagtcagcgtgatcttcgccgtcgtgggccacggcaccgaacagttggcaggactgcaagacggcgacaccgtcgacgtgctcggcccgctcggccgcggcttcaacctcaaggaagacgccaactacattctcgtcggcggcggactcggcgtgcccccgctaatctacgccgcgcaaaagctcgccgaacacgacgcctcctttgccaccgccgtattcggctaccgcaacgaccacttcgctgaggaatacgtctcccggtacgcggactggtcgtggagcatcgacgacgccgaaggcaacgtggtcgacctgctcaacaaactcgaacaaggcgacgacctgaaggcctacgatcgcaagccgatcatcttgtcctgcggaccgctgcctatgatgaaggccgtggccgcttgggccgccgaacgcggcatccccgcgcagctgagcatggaacagcgcatgggctgcggctacggcacctgcgtgctgtgcaccatcgacaccgtggacggccggctcaaggtctgctccgacggacccgtgttcactcgcgaacagctcggatggggggagtgacgatgagcgcaaacaaccagtccgcgcagggcagagacaaccacatcaacctgtacgagccccacgtgtggaagcaccacaccaaggtggccggtctggaatggaagaacccggtcggcaccgcctccggcaccttccagtacgccgccgtccgctggttctacgacgtcagccagctcggcgccgtatgcaccaagggcgcctcgcccgtgccgtgggagggcaacccctcgccgcgcaccgccgaatcgccggccgcgaacatcaacgctgtgggcctgcagaaccccggcatcgaccattacttggccgaagacctgcccaagctcaaggccgcgggcgcgttcgtcatctccaatgtcgccggacattgcgatgacgattacgcggcggtcgtggaaaagctcgccgactccgacgcggacatgctggaaatcaacgtcagctgcccgaacgtttccgccggcggcatgagcgtgggcaccgacccggtggccctcgccaatcttatggaccggctgcgcccgatgaccgacaagccgatgatcgtcaaacttacgccgaacgtcaccgacatcaccgtgccggcgcgcgcggccgtggaacacggcgccgacgcgttgagcatgatcaacacgctcaaaggcatgcgcatcaacattcgcaccggccagccgatcatcgccaacgtcaccggcggcgtatccggcccggccgtgctgccggtcggcctggcagccgtctatcgggtgcgcaccgcactgccggagattccgatcatcggactcggcggcatcgacagtggtgagaaggcgctcgaatacctgtacgccggcgcgaacgccgtcgaagtgggtgcggccgcgctcttcgacccggtggccccgctgcgcgtcgcccgcgaacttgacgacctgctggacagccgtcccgaactcgctgctaaactggccgcaggacagacttggaggtaaggaacatcatggcagaaacactcgcacatcgcttcactgaattcctgttggaatccaacgcgctgaagttcggcgacttcacgctgaagtccggccgcaagagcccgtacttcatcaacgccggcgcctgcgacgacggcaagaagatcgccgcgctcggcacgttctacgccgaaaagattagccaggccatcgtgcacaacacgattccccgcaacatcgacaccgtgttcggccccgcctacaagggcattccgctggccgtgtccaccgcgatcgcgctgaacgccggccacaacatgaccgttggatacaccttcgaccgcaaggagaagaaggaccacggcgacggcggctggatggtcggcaccccgctgaccgacggcatgaaggtgctgctcgtggacgacgtgatgaccgccggcaccgccgtgcgcgaagtcatccccaagctcaaggccgaggcgaacgtcgaggtcgtgggtctcgtgctctccgtggaccgcatggagaagaccaaggactccgacctgtccgccgtgaaggccgtggaagccgaattcggcttcccggtgctctccatcgccaacgtgcgcgagatcttcgacgccgccgccaagatgaagaactccgacggcaccccgttgctcagccacgatatccagcagcgcgccgccgcctaccttgaggaatacggcgcctgatcgtcttcaacctaaaaccaaaagcgggcttgcgagcccgctttttttattacgatccatgaacagcagtaccatattaaggcagaagctttggcaaggagcgtgctatgaactggttagttggtatagggctgtttgcgctcgtggggatatgcagttacttcggcatcgagcatcatctggacagcaaagcgaacaagttgtcgcaaggtaatgaagaagaccgccgagatgctgccgaattacgtgatatcgccgccaaaatcgatcacggtaagtattacccgatgctgtaacgggcaatctgggcctaaattgatgctatctccgtttcgaggggctgatgtcgtggtttccagagatctacttccgtttcgaggggctgatgcccaagtagaagcagcatgaaaatggcggaatgacgttggggtgatgccgctcatactcgggatatgacggatgaacagccccttgaaacggagatagatgtctccagaaggccaaatcagccccttgaaggcgagatagggttttaaactctgggaccgactcgcctgtgatgaaaacccactcggcgtagaattaccgtaggttcgttacattcgaacaaggaaggccgccatggggaacatcaccgacgatatccggcaacatttcgacaccttcgccgcactgccgttcaccgaggcggacagtctcgccctgtcccagctggcctacgcgcgcatgccggataacgtgccgcgctatcacgaggattcggcggacgtcagcggcatgattcccacggtctccatccgcgacctgctacgcgccgaatgctatgacgccatgttcggcaaggtgtggtcgccgcagatgaacgtcgatctgctgcgtgcgatgggggagagcccgcgctggcgcgacctgcgcgtcggcgaatacgtggatgaattcgacgctgaaaccaccaaacagttctcggcctgcgtcttcgaactgggcgacggcacgctgtacgtggctttccgtggcaccgacagttcgatcgtcgggtggaaggaggatttcacgatggccttccgccgtccggtcgcctcgcaggaggccgctgtgcggtatgtgactgatattgccggccgctgggccgggccgattatggtcggcggccattccaaaggcggcaatctggcggtatacgcggcggccaatgtgcccggcgaaattcagggacgtatcacggccgtgtattcgcacgatggtccaggcttcgatgaggcgttcttcgatgaggatgggtacgcgcgcattgcgccgaaaatccataaatcggtaccgggatcgtcgatcatcggcatgctgtttgagactcgtgagcatgtggaagacggctatacggtggtcagcagcgacggtgccagcatcatgcagcatttcgcattgcactggcaagtcgatcatggccaattcgtacaggctgatggactgacaagtagcgcgcgatacctggcgcgcacgatcaacggatggatggcaaaatacgacgacgagcatcgccgcaagttcatcgaaaacctgtttgccatcttcgaggctggcggatacgacacattcggcgacctcacttcgcatttgacacagtcactgccgattatgctcgccgcggcccgcaacattgatgtcgaagatcgcgacgtgatgattgaagtgctcaaaggcttcgccacgacagccgccacgtcggtaatctcggccaagtagccggaggccatcaaactggttttgccagtcagtctcaatagcgcaagagccggcccctgagatactcaggggccggctcttacttccatttccccagcggggttggcttaatcgcagtatatctcactgctgaccatgcctgttttacttactcctaatcgatgagcttgtagccgtggtcggcgactacggacttgagcttggtgaggtaggtttcggcggccttggagagcttggaacgctcgttcgtgatccagccgaccaacatcgtttcgtcggtgtcgagcggcacggtgacgatcttctcgttgttgaggtcgccgttgtcgatgccggtgcacaccgtgtagccgttgaggccgatgatgaagttcagaatcgtggcgcggtcggtcacgttgatctgcttgggggagtattccggccagaccgcctcctcatagaagtagaacgagccttcctcgccctgttcgtactggatgaacggatagggcttcagatcctccatggtgatgatcttcttggcggccaatgggttgtcccgtgagatgaacacgtgcaggggggcgcggaagagcggatggaattcaaggtgtttctcgcgcaggagtttgccgatcacgtccttattgaagtcggacaggtagatgatgccgatctcggactgcatgttcgccacctggttgatgatgtcacgtgtacgggtctcacggatcgtgaactcgtattcgtcggacttaatggagttgatcatctccacgaaagcctcgacggcgaacatgtagtgctgggtggagacctggcacagctgcttgcgcggcttggcatgcttgtaacgctcttcgagcaggtcggcctggtcgagcacctggcgggcgtaggtcaggaattccgcgccgtccacggtcagggcgatgccctgcgaggagcgggtgaaaatctcgatgcccagctcgttctccaattccttgaccgacgagctcagggccggctgggagacgtacagggcatgggaggcctcgttcatcgagccgcactcgacgatcttgacgatgtatttcagctgcagcagtgtcataaagtctatttatatcgctagggatggtcgccacacgggtttataacctcatcaatccactatggcgacacaatatgagatgcctcgcatatcgcggacgctgtgtaacgggatatgcgccacattggtaacctgaggcaggaccagtacgatgccatccagaccttctccttctccagtatcgaccgcttctccacgccgagcctgatgaccaggctcggcgccgacgtgatgaacatccagaacgccttcatgatgattctgcgcatggtgccgcgtgccgcgtcgttgaagtgctcaccgaacagtgcgacatgccggtcgccaaacggccggtcaccgtcgtcaaggacgggtccatagacttcaactgccgcgacgcaatatttggcgacttacaggcgtacgccgagttcggcgagcgattcgcgcgcctgcgacgcgttctcgaagaggatgctgtggatgccgacctcgttggcgccgacgatgttcttggcggtgtcgtcgaagaacacgcagcgctcggccgtgagaccgaagcgggtcaggaccagctcgtagatgtcggcgttcggcttgtgcatcttctccacgccggagaccacggtgccctgcagcagctgttcgaggcgcgggtacttctcgaaggccaggtggaaggtctcatgcgaccagttggtcagaccccatacgccgtagccgtgggccttcaaatccgccagcagttcgaccatgcccggcagcgtgcggggcagcgcgtccgcgtagtggccgatgtagaacttgaagatgtcggcgagttcctggccttgttcgcgtaccacatccgggtagatgtccgcgaaatcctcgccggcgtccatgcggtcctcgtagtggaagaagccgcaggggtcgtcgtcggcgcagatgcgttccacgatttcatcggggaatcggccttcaaggcatgcgcgggtgttccagtccagcagcacgccgcagaagtcgaaaatcacgtcggtgatgggggagttggccatgatggttccttgtgtgtttgggtcgttgggtggggtctgcgatttagtgtacggggtttgtgtataggtcggggtatgtggagtttgaggcttatgtttctctccctccgtctcggctttgccgagacacctccctcgtcagagggaggtcaacaaggttatgcgatgacgtcggcgatggcttcggggatggcgtggatcacgtcgccggccacgattgggtggccgagcgtcatgaagcgctggcgatgctcgcggccgatcagttccggctcctgccagccctgctgctcggattcggaggcgatcgccgccgccaggccatgcaggtaggcggccgaggccacggtctcgcccgtggtggccacgtcatcctgctgggcgagtagggcgccggtcagaccggccagtacgtcgcccgcgccggcggtgcccagccaggccggcgcactgcccgacgcatagacatggtcctcatccaccacgatggtcaccgcgcccttcagcaatacggtggcaccggtgagctcgtgggcgcgcttcgcgctggccaacgggttcagccgcacgtcgtcggcggtgtacggctcgtgcgaatcggcatgctccgcggtgctggcggcggtttcgaaccggttgagcagtttcgccatttcgccggcatgtggtgtgatcaccacctggccgggcacacgctccggcagcaggtcgagtgcgccggcatccaccacgattggcggcatgtcgtaggcgtccttgttctcatcctcgctgccgagcgcgtaatgcttgagcaatgcggcgatggtgtcccgctgcatatcgccgtcggcgccctcgacgctagcctcgggcacgccggaccccacgacccaggactgcacatgtcccttgccgatcacggcttccggcagtgcggtgagcaccatgttctgcgcgcgctccgggcccagataccggaccatgccggtgttcgcgcgggcggcggcgccggtggtgagcacggcggcaccggggtagcgctgcgagccggtcaccagaccaaccacgccccgggaatatttggaatcctcgaaccgggggagacggaccgcgtcggacgcgaacgaattatccaccacctcgacgtccggatccttgtcgtcgatatcgaatccgaaatcgaacaactcgatacggccgcaggcgaacgtggcgggcggcagcaccgcgcacggcttcatcgcgccgaacgtgaccgtgaccgtggccggaatgtacgggccgggcagagaaccatcgttcacaccgacgccggatggcgtatccacagcaagtaccagcggaaaatcgcctgacgactcacggttcggcagggcgggctcatcgggagactcgccgtcgagaccaagggcggaggcgagcgcggcgggaatgccgcgtagcgagccttgaatgccgatgccggtcatcgcgtcgatgatcagatgcgatttcctggccacggcgatggcggtctgcagtcgctcgccggcctcaccggcggaaaacccggacgcgcaaccgggaatatcggctgccgggtcaagcaccagcaccttgccgccggcgcgcacgagcgcggcgaatccggcctcatgcagcgaccggcccacggcgatggcagtgacgttcgcgccctcctgggccagcgcggcggccgcgaacagaccatcgccaccattgtctccggccccggccagcagcacgatcgacgtgtcctccagcgccagatcctcgtcgtccagcatgccggccgccatgtgggccgcggcctgggcggccatgcgcatcagcggcacgcctttgtccagcaggggtcgctccatggcccggaccgtatcggagtcataggcgctgtgcagcagcagttcgcgacgatcggcgtcttcggtgtattccatggcaacccctttcttgtgtttgttacttgcggcccgtgtttacaggccgtacacctcgtgggcgaacttttcgagcacggggatcgaacgcttgactttctcggtgtcgatgcagtaggccatgcggaagtatccgggcacgccgaagctgtcggacggcacgaggatcaggtcgtattccttggccttcatgcagaacgccacggcgtcgtcctctaacgccttggggaagatgtagaacgtgccgccggggcgcaccacgtcgaagccgatgccggtgagcgcatcgtagagcaggttcatgttcgtctcgtagacgttgaggtcggcggtctggtcgatgactttggctacgcccagctggatcgagctcggcgggcagttgtggccggtgccgcgcgagatttggcccatcatcggcacgagcaggtcggcgtcggtggctgcggggttcaccgcgacgtagccgatgcgttcgcccggcaggctcagcgacttcgaccacgagtagcaggtcagcgagttcgcatagaagctggccgggtagggctgggtggctccgtcgaacacgatttcgcggtaaggttcgtcgctgatcaggaagatgtcgtggccgtactcggcctgcttggcggtcaggatcgcggccagacgcttgagcgtgtccgccgaatacaccgcgccggacgggttgttcggggtgttgatgagcgcggcctgcacgttcgggttaagcgcggcctcgaacgcctcgaagttgatctggaagttctcggtgtcggccggcacgatggtcagcttggcgccgatgcccttgacgtacggctggtattcggggaagtagggggcgaaggtgatgatctcgtcgcccggcttggtcaccgcgcgcatcgcgtgggacagcgcgcccgccgcgcccgtggtcgggaagatatggttgccggtgtatgccatgccgaaacgttcgttgaggttttcggcgatcgcgtccttgacggacgggatgccgagcgagggggagtagccgtggatggccgcaggatcgccgttttcgtagaggtcgaccatggcgtcggtgaaggatttcggagccggcaccgagggattgccaaggctgtaatcgaacacgttctggtagccgatttcagcaccgcggctcgtggcgtactcgctcagcccgcgaatcacggacttgccgccaagcatggccttgtattcctcattgatcatggctgttctcctcgcatggttgtactggtatgcaccacgctactactatcgcggccggtttgcgccatttgccgcgccgtacctaagccggctgttctatttgttctattagtggagtttgaaccggcatatacccttgcaataaagccatttgtagggtctgaggctttccggggttgcttgtctcatagattttcggcctcttgatatttgcggttgatagctgtgatgtgtgtgggcgatggctgttgaggcatcatggggatctcttcgactgtccgccgtcgccatgccgccatgatgcctacagaaagtcgagttgcgtatttccgccaagcagggtggtgaccggtggggggcgatcggtggggggtgaccgacacccgctataggcagcaggcagccgcacacatcccaatatctgtgggacggcagacgagtcaatcgtttgtcgtccgcgccgtccctcaagagcgcgggatggcagacaagtcaaccgtttaacgtccgtagcgtcccacaccgacgactgtagaaaccgcggaataacgccgattctcgctgcagctccatgattatgcacaaccgttcatagcgagcgctgtgggacggcgggcggaaaacggccgaatccgcgtgccgtcccacacctcgtacaatccgcgttttgggaaagcatcaccgtaaggctgacgcgcatccgcatccacagcaggagccttaccggccgtaatcccgcactcgattattttttctgacaggaaatcgaacccgaaacactaacccatgcccgccccaccgcaaacagcgaataaccaaaaaaatgcatgatctatccttggtgccgaataatgagagcctgactgtagtggctacgggtagctatatcggagaaggattcgatcagaagcgtttcgacacgctgctgcttgccgctccggtctcgtttgagggtactctctcgcaatatgtagggcgacttcatcgcgagaatgatggcaagaccgaggttcgtgtctatgattacatcgacgtgaccgtgcctttatccgctgtcatgtatcgaaaacggctgaaggcatacgcaaatcaaggatattcggtaaatcctgaccatactgacaaaatggacatgctcagtgcaaaggcggaagcgttgcgcgcttgcatgacggccgcgacgcagggcgaagatgctgcggatgcgttgctcgacacccggtctgacggattattcgaaggcagcatcgttacagccacgaattatgcagagatactccgcaaggatattgccggttgcgcacgttccctgattatctcggctgaatatgtatcacaacagggactcagcgcaattgacgatgaattgctccgactggccgacaggaaagcgctcatcgaagtttatgtccgtttgccggcgactgctgcggtggcaaccagaacacgaatagaacggaatattaatcggctgcgtgctattgggtgcattgtccggaccgtcgaatcgtgttccgattttgccataatcgatgacggattgatttggtttggaggcatccctttacttggcaatccaaggagtgacgactgtgcacttcgattcaaagatacgaaaatcggcgagaatctagcagatggactgaaacgacggtcgtcctgagtcaatattcagttaagataatcgcgcagtacgagggcgtgattgatgtgcgggtccttggcggcatagagcagggtcacgtcgggatgctccgcgcagatgtggcgcagattgtccacggcggcattggcgtcgagctcggcgatgtaacgcatgcggaattccgcgaatttggcggggtcatggccgaaccatttgcgcaggaggggagagggagcgacgtccttcagccacaggtccaacgccgcacgctctttcgtcatgccgcgaggccacaggcgatccaccagcacccgatacccgtccgacgcagtcggctcttcatatatacgtttgattgcaatacccatacgccccatgattggcgtgcgcttgccggaagtcaaggggagacgcgatccatctacccgttcgatttctgggtgttctgtctaaggccttgtgctatgacagctagcgattcagcagcttttggtgatatcgtccaaccggaccgccttgcccctgtcgaaggtgttcatagtgagatcgacgggtttggtcttgatgaacgctgacagcgcggtgtgcggcgggttgtcgatcaagtgggtgatggggcaatcgcctcctcgacgctgacgcccacaatggcgtaaatggcacgcgccagcagcttcatcagtggcgaatcgaaactgttcaatgcctcattgctgcgcacggcccaagggttgaacaacacatagtggatgcggcctccggtctgctgttggttttccgcgaagagcactcccagcagatcgttcagacgactcgtacagatagtcgcgcaatgctagaacgtgattgatgtgcacccttcattgacggtctctcaattgatctcctgcgattcatgccgtataaggaagttctcgaccaaggcgatcatcgtgtccttccccgcaggtgcggacagcgcaatcatcagcgtcatcgccgccaaggcgttaccctccacaagcaggggagtcatcgttgcccagtatactgttgccgttcaggaaatacacaaacagtgcggcggcacaacgtttattgccgtcggagaacgggtgatccttgacaacttgatacagcaggttcgcggctttctcctgggtggaacggtacagttcttcgcctccgaacgtctggtagagtcctgcgacgattccttggaacgaaccgttgcgttccctcccgaacagatcggattgcgtgtagaacggcatcgaccggatgaacagcatcgcgtcctcataggtcaagacccactgggactcgtcgcccttgggtatagggacattgcctgtgtcatagtcgttaagcagcacaagactcggcaaatatcgttccaagatctctgcggtgccagcaatttccggttcggtggacctcgatagcaccttgacgacggcgtgaagtgcgtcaagccgcttgtgattgatggtgtaaccatcaacgagatgctgcttcagaactgagttggcccatcgccggaaattagatgccttccttggatttgacgcggtatccgaccgacaggatcatatccaagttgtaatgctcgacttggtatgtcttaccgtcagatgcagttgtcgcaaattttgcgacaactgaaaatccattgagctcttccctcaatgcattgccgatatgcttgccgattgttttgatatcgcggccaaacagcaatgccaattgctgtctgttaagccacaccgtgtcctcgtccaccttcacatcgaggtgcacggtgtggtccgcgctctcgtactgccggtcgagaaccgggtggcaagggcggccaccaccagtatagtcaccacaccggcgcacaggatgccggcgatggaggccacatccgaagcgatgtccgcacctgcggccggcagcagtgtgccggaagcgtagtcgaagcgcgcgatgtacaggatgtagagagcgaccgtcaccaccgtctgcaatgccacgtacacggcgtagataccaaacagggcaaggattttcgcattgatgatcgtggcgcggtccagatccttgtacaggaacatgcggccggaggccacgggcgtatagatggcaccagccaccagataggccatgaccaccatcggcagcatcagcatgttctgtacgacgaactcgccagcgaggaaatccagcacactcaccgaaccggtctttccgctgactttcatgaaatcggagttgaacaggttcacggccggcagaatcagtatgaatgacggcggccggatccaaagccgcgaccgccgcacgtttcgcgacaccgagcggccggccaagctcgataaccgtgatccgcttctgttcgccggcgaattcgtccgcaagccggccgcctttgatgaacaggaatcgcccgcccaactcctgcaattcgttgagctgatggctggagatgagcatggcgatgctgcggtcgcgataccgccaaagccccacaagttcaagcaccgggcggatcgggaggtgcgggcggcgggtcggacgattacagtgtgagccgaatacgttcatgaatcatcgaatcacacggcgaggcggaccgcaagtattcgagagtcgccagttcggtcgatttcaatgacaatggtgtggacgattacgcggatatcgtggcgggtgcgcgcaaggacgccgaaaaccatccggcttacgattccggctactatcagggcggctatccgccggccgatcgcggggcgtgcaccgtacgtgattcacaacatggcgcagcggcagcgcgaaaacgactacttcgccttcaagaagcacatgacggtcaccgggcactaccgtttcgacgcttcgaaagtgctgtagagcgtactcagggcttggcggtgacggtcggagcggcgtcggcattgccggctttggctccggctgcatcagctgaatcggtgccggccgcactggcgttagcactatcgtcagcgttggcaccgccggctttggccttggcatcagccgcgctcccgccatcgatcaccagtcgcagataatcgcggtcggcggacttgcggcgcggcacgaaccgactgatgatggagtttttcttgccgcggttcttcacgtacaggaagccgaacacggagaacacgaccgcgccgatgaagttgacgataagatcctccatcgtgtcgatcagaccgatgtcgaggtagccgccgaggcccaagtcttggccattgaccgtgacctgggtgatgtcgttgatgcgaatcgcatggttggtgtgcgtggggtcgagcatcaccgagctgatggaatgcacgatggcgtctctctgcatgtcgaatccgaacaactggtccatgccgaattcgaagaactcccagatcacgccgatggtcatggagaagcagaaggagacgatcgccagatacaggggcgaaagctcgaacttcacccggtcggaccggttgagcaggtcgaccagcgagaagccgatcgccgcggcgaggaagccgttcatcgtgtgcaacaccgtgtcccagaacgggaagatctcatagaacgaactgatctcgccaagaatctcggacgagaacacgaacaccagcacgatgacttccagcgccgaaggcagctcgatgcggaactgcacctggatgaacgccggcgccaacagcaacagcaacgtcaggatgcacaggaacacattttcgtagtcgccgttaaagaactggagtattgccatggcgagcaccagcatgcgcagcaccacatagaccgcgaatgagcttttgtgttcgcggatttccatgcctacggctcggctcatggtcttccagcgtacgcgccaggacggtttgcgttgtgcgtcgtgctgttgtgaccgtttccgggtcattcttgcctctttctcgcattgttctcgcgccagtctatccgaacctgcttacaggcaatcggcaagaacgggcgatagtctggccgcatgaaccgaatggaaaccgatgctgcctcgattgtggaccgcacgaatcatgcggcgatgctcgataggacattgtgccggcggcacgccaccgcgtgtgctgattgcagtgctcgccgtgctgctgtaccgccgtatgggcatgattacaccgctgatcgtggctcatggcatgtatgacgtctccgccgccatgaccaatctgaccggaatcgccggctcctcatggtcactggtcgtagggctggcaatcatggccatgccggtggtttgggctatcgtgaggtgtgcgagataggctttgtaccggttggcagcaaatcaaaccagtgagacaacggaatgaacgaagcgaaaggaacggtatctgatgactccgattgaattgtcaacccgacgccgggttacgggactgacttcggatgagttcgccaggctgttcgtctctttgcaacgcgatgtggacggcgaagccgcgcattggagcgccgcggacgtcgaatcctgggagctggtcggcccgccggtgaccgccgaacagcatcttatcgacacgttcgccgcggccaacgaattcgtggccacgcttgcggaccgtctgtaccacacgatcatgccagtcacggaagaatcggtcatcaccgcatacgctgatgacctcacattctgggcatcgcatccggaccttggcggagtgccgtgcgcattatggaacatcgccgcactgcaggcggccgaatgggcccgcaaggaaaccggcatcgcctgtgaactagacgtgcgcgaaccgctggtgtgacagctgagctcaaacatgggcgtaggtaacggcatggtttgaggactatggtgttgcgttaccggtcggaaaggatatgatggtggggcgtcatagcaaaaaagcgcgtggacagtcgaggagacatgcgcgaaagccctccgtttggagtgaaattcgcggctatctgctgacggtgatcgcggtgatgctggtcgtgttgctgggacgcaccttcgtgttcaacgtctatgtgattccatcccgtagcatggaagacacgttgcaaatcggcgaccgcgtatttgcctcgcgattgactccgagactctttgcactgcaccgtggcgacatcatcgtgttcaaagatcccgcagactggatggagggggagcagcttcccaccaatctgatgtcgataatcgacagcaatcgttacctaatcaaacgtgtcatcggtctgcccggcgataccgtcgcctgcaagggatccggggagcccatcacggtcaacggcaaacccattgatgaaagcgcttatcttaagtccggcgtgaatccaagcgacagtcctttttccgtaaccgttactgacggcaacgtgttcgtgcttggtgataatcgctccaattccagagattctcgataccatcttgacgacggcaacaatgggctagtgccatacgacgatatccaaggtgtggcgttgttccgcttctggccatttacgagaatcggcttgctcaattgagtttggcgtgaatacgcaagttgacatgtgtcgcacggcccggtgcatcctgcagtcggaccgtttccggaaccctccccccgaaatctgacgacccccctgtctcacagctatcgtacagctccgatacgggaaacgtgcgggtgattccataacgactacgtacttcaggaagtgacgtgtatcacattatgatgctcctatacattgtcaagcgtttgggtgtgttgttttgggttggttgtcgagtgtatccactggatggcccgttgctcgagttcgggaaggtcgcgtgcgccgcgttcgatctcgctgatgcggctcgagggcacg

SEQ ID NO: 3851 - DNA, 27009 bp, Unknown
  R35_2m  MAG No. k141_13460
aattacaccacaccccaatttggcttggcgtagcaactccgaagagttgttcgtcgtacccccaaccggatttgaaccggtgttggcgccgtgagagggcgtagtcctagaccgctagacgatgggggcatattcagtttttcaaccggctgcgaggcgaaccgcgcaacaggtagatatattacgcgctaccctgctctcacgcaaatcccggcgtgtcgcgccattttccgccgttctgcgggaacaccccatgcaacgcgaaagcgggcatccgtatgtacggatgcccgccatgcgtcacgctcccatcatccgccggcgtgcggtggacgacgcatcacagatgcgcccgcaggcccttgagacgggcgacggtgatcggcttgccaacgatctccatcgattcgaacaacggcggggagacacggcggccggacatggccacgcgcaccgggccgaaggcgagacgcggcttgtagccgccctcctcaaccagagccttgttcagggtctcatgcaggttgtcggtcttccaatcgacctcctccacgccttcgagagcggcgatggcggcatccagcacttcgccggcggaatccttgagctgcttcttggcgtcgtccgcaggctccagatactcctcggtggacagcagggagccgaccatgccggcgacctcacccagcaggcgcacgcgcggctgaaccagcggagcggcggcggtcagcacctcacgctcacggtcggtcagggcatcccaagaatcggcggaaaccacaccgtcgcggtgcaggtacggcaccgagcggcgcaggaagtcctcgggctcgagcatacggatgtgctcggcgttgatggagatggccttgtcgatgtcgaagcgggccgggttggccttgacgtcgcgcacgtcgaacttctcgatcatctcgtccatggagaacacgtcgcggtccggggcgatagaccagccgagcagggccaggtagttgagcaggccctcgcggatgaagccgttgtcgcggtggttgaacaggttggactccgggtcgcgcttggagagcttcttgttgccctggcccatcacgtacggcatgtggccgaacaacggcatctccttggcgatgcccagctccatcaggtaacggtacagcacgatctggcgcggggtggagctcaggaggtcctcgccacgcagcacgacgttgatttccatcatcgcgtcatcgaccggattggtcagcgtgtacagggggtcgccgttcggacgcacgatcacgtagtccggcacggagccggccttgaactcgatggtgccacgaatcagatcgtcgaaggcgatgtcttcatcaggcatcttgatacgtagcgcaggcttgcggccctcggcgcggaaggcggccttctgctcatcggtcaggttgcggtcgtagccatcgtagccgaactcggccggacggccggcggcaaggttgcgctccttgatttcctcgggagtggagaaggactcgtaggcgtagccggcttcgagcagcttggcggcaacatccttgtagatggcggtacgctcggactggcggtacgggccgtgagggccacccacatcgatgccctcgtcccagtcgatacccagccaacgcagggattcgagaatctggttgtagctttcttcggagtcgcgcacggcgtcggtgtcttcgatacggaagatcagcgtgccgccggtggcgcgagcttccgcccagttgaacagagcggtacgaatcatgccgacatgcggggttccggtcggcgacgggcagaagcgaacacgaacgttcttgggcagttcgggtttggtgttttcagcatcagtcataatcccctattgtgccgcgcgcgccggacgcggagagcagcgctcctcgctcttttgcttcgttattgacatttcgggccaacaccatcccaaaacggccattttccaacgaaatctcttttgcctgtctttggtagtgcccgatatcttgatgcctgtcttcacacctgttttgacacctactttggcgccatccacacgcccgcacgcaaggcttcgacaccatttggcgcaactgttgagttttttacccaaacgatggaagaataggagtcgacgcaatcgtcttatgaaaggggaatcaatgaccgatcccaacaacgtgccgttgccgcagatgcccgcgcccaacggtaccccggcccagcagaatcccagcacgccgcaatacggcgcacctgctccagcccccgcacagccagattatgggcaattcaacgctccggcccccgcacagccggcctacggccagcccgcatacgggcagcccgctcccgattcttccgcacccggcgcagcgcccggtgcaactcccgcctatggtcagcccgccgccgacccgtacgcggcgaatgcggctccgcaattccccgctcccggcgcggctcctacctacggccagcccggaccggacgccaacgcttacggtcaggtgccacccgcatacaaccagtacgccgctcccactgccacagcagccgtgccgttgaacaagccgtattacgactgccccttccctgaggcattcctccgtttctggaagaagtatgtggtcttcaagggacgtgcctcccgcagcgagttctggtggtggacgttggcctctgtcggcatcagcgtcctgctgagcctcctcagcagtgccacggacgacaagctcgggttcctttccagcatttggagtctggccatcctgattcccagtctggcgctcgccgttcgccgtctgcatgacacggacaagcccggctggtgggtcgccatcttctatggcgcgatggccctcggcatgatcatcatggttgccggcggtggcgcagcactgtatggcgccttcggcagccttagcaactccagctatggagccatggcaaccggcggcctcggtgccatggccattggcggactgattacgctcgctggttcaatcgtctacatcgtgttcatggctatgcccagcaagccggaaggcgcacgtttcgacgatgacgcagtagctgccccgatgcctcagggtgcttacggcgcaccgtacggcgctcccgcaaccccggacttcaaccaggccgctccgaacttcgccgctccgggcaccgctccgaacgcacccgctcctgacttcaaccagccagccccggcctatggtcagccgaccgcaccggctcctgactacggccagcccgctgtgcctacgcccgattacggtcaggtaccggttccgcagtacggccagccggagaccccggccccgcagtacggccagcccgacgctcaggccccacagtacggccaggttccgccgattcccgaaaacgttgatgatgggtccaccgtgctgtctccgcacacggctcccaccgatgacaacgcacagaaaccctggcaaggccagtgactgacgccggcgaagttcgcttaagaagttcgcctcatcactcatgaagcccaacaatgaggccccactcatcaagcggcggtagtattccccgccgttcagtaagccaatgccctgtgtactggatcattccagcacacagggcattgtgcgttattgcggcccctctcttcgcgcaacattccccggaatgcgttacggtggaggatggacgctgcgccgagctactcctacaagctgcctacggagagcgtttgggagatcacatgggattctcccgggcccagcgtcacgatgcggtcgcggcataccgccgcttcaaccgccacgaaaccgcgccattcgcccggcttggtgtagctcatattgtcgccgtccgctcccggattccacaccacggtttgcggcgacccggtacggctgatatgaatcgcacgccccaacatgtcatcgcgcagttccagacgcgcatccgagtaatacacacgattcaccggctgctcgccaaacgtcaccacttgcgcgtcctgtgttttcggcggaaacccttcttcggtggcatccagatacgtcgctccctgcaatccgaccagctgagcaccggacacatcgccgacatgcagataggaatgcaacgcggcctcgtacgacataggcgccgcgccggtgttgatcacggtcaggctcatggtcagcgcattgcccgtttgcacgtcatacacggcatgaaactgagcacccggctcgtcatcgaaccaaggcacttcattgtcgttcagctgctgcgaatccaacacataccgtatgtggctgtcgtcgaatgaaccctcgtccaacgcccaccgacgcagacgtgcaaaaccgtgggatggattgagtgccagctgcttgccatgcgcaaaacccgggccgaaccacgggaagcagatcggcactcccccgccgagcgacttaccggcttcgatatgccacgtactcggcgtccacaccacatccgcctgcccgaccggggcccagcgcaacagatgcgctccgtaatcgctgattaccacgctgccgccattgttggcgagcatacgcaaatcgacaccattgcccataagtttcccattcccattgtgcgaacgatacttttcactaaataggatacttccttaacaaaaaagaatcgcaaagtatggccgcaggatgcacaaaggccgtgccaccccattcgccgacgaccgccacgcgccaatcgtgcgcaagatcatcggatgcgactggcaatagatgctggtcacgcgggccagtgcccggctcaagcacgacttccccctcgcgcaccagttcgccgtgctcccaatggtgcacataaacgcgatccgcacccaaatcgctggtcagcacgcggccgtccggcactgactgcacccagtgggcgacggcgcgtccgacagcagccgttcgcggcgtagcaccttggcgtcgccactgttatcgccgccggcatccaataccaattgttcgatgccggggcaagccacatgatgcagtttgccgaatccaccaaccagaatatccatgaggatgttccgttttactacgaactacgaaactcttttcgccacacaatacgccgtcgccggcggggcaaaatatgccaaaattagccaattgcagaaaaagggcgatccccgtataggaatcgccctttgcgcacacactcaggcggagggaagtgcctcaggccgtcaaaccggcgaagagcgccgaccagtcctgagactcatcctcaaggtcgaatcgttcggtgttcatcagtgcctccttcaccggtccgggagccctccccgcaagtttgtgtattgagtaatcggtgagatcactgatcgtggcccccaatgcccatccggaatgcggcaaatacacgtggaattggattgagcagacgaagacgccgacagtgatcatcgaacgtgatctgccgctgctgggttcccgctacgtcgattcagtgcgcaccaaccatccctatggcgtgcgtaaggcggcggtgcgcttcctgcaacacggtcacacccgtgtgggcgcggcgttcaccgatacaccgacttcggagctgattcaggatggctggaagcaaatcgtgacggaaagcgacgccatcgaatgcccgttcaccatcaccggcattcagccgtacaacaccagggacgtcaaccaaatcgtggacaccattctggattcgggcgtgacggccatgctggtgcactccgattatctggcgatcgccatcgcgcagaccctggagcgccgcggcaagcgcgtaccggacgatatctcgatgatctccgtcaacggctttgccacgcccagctcccgcccgctgaccgtactgcgctcgtccgataaggatctggccgaggcggccatcaacctgctgatcaaccgcatccaaaacccggattctacaacccgccacatctacgtggacccgacgctgaccgatcgcggctcggtaatcgataagcagtaaccccacctccctctgacgagggaggtggcatcgcaaagcgatgacggagggagaggcaccaggcctctaaccgttacgagcgaagcatcggccagagcaacgcccttactctttacaactccacggtctctttgccgggatcatccttgacatgcgcgaacttggcggccagagcctccttattgcgcttttcgtcttcttccttggcctgacgcttagcctcgtccgggttccagagcacatcctcacggtgcttgttccattcggcaacggccagaggagcgatgtattcggcggtggcggtcagggtgtctgcgtcggcggctttggcacgggcattaagcaacccgaggatctgctcgtcggtcaggcagatgcgcggcaccgagcactgctcgcgcagttcgttgacgtagagcagaatcggcagaatcttggcggcagcattggcgacactgtccgctgaaccatcggccacagcatcaccggacacctcacccaataacgcatcgcacacggcgagcgcggtggcgaaccgaacagccacatcggcgggcttggcagacgtggccagacgaccatcggcttcagcgtcggcctcgacctgggcttccatggccgcgaccgcctccctcaccgattccgccgtcgcggaatcccagtcgattcccaacacgtcggccgcctcaacgatcagcctggcatcaccggactcggcgtagtcggccatcgtgtcgtaggcgtcattggcggcgagcagggcgtccacgatgctctgcgggcgaccgggaatctcatcggcaccctcatacacgaattcggcgtcgggcacggtgacgtcctcgccggtcagtacgcgggcgaacgcgcgggtgaggcgcacctgcagattctccgcgtacttggcgtcattgtccatttgcatggcttcggtcagcggccacaggctgatcagcgccgagccggcttcggcggcctcagttaccgccggcaatgccgcgacctgtgcgattgcctcacgattgagttcaatggtcatctatgctcctttgcgtccaccactcgattgcagtgcgtcttggctcccctctctgaggggagccaatgtcctaacaccagtgtgccgttacttgacgttggctgctgggtcgacatacgtgattgacatcacacggccggtttcgttgtcgtacgtcaccgaggtcacggaggcgagcgccgtgtgccgcaggaacatccagtgctcggggtggccggtctccagataatggcgataactgaaaatcggcgattcgtggctgaccaccacaatctgctcgccggggtgctgggccaccttctcgcgggcgaagtcgtccatacgcgccgcgatgtgctgataggactcaccccagctcggcttgtacaggttggtgacgagcttccagttgccgttcttccacagcgcgccctcgccatggccgatgcgcttgccacggaactcgttgccggcctcaatcacccgttcatcagtggtgagcgtgagcgaagcctcgccacgagcctcgcgcacggggttcagcgcatcgagaatcgcgccggcggtctcgcgcgtacggtcgagcggcgaggagtagacggctgcaatcgtattggtttggggattcttggccaagtacgtggcggtggcttgagccatgcgacggccaaggtcggaaagatggaagtcgggcagtcgctcatagagcagatggtcggggttatataccttgccatgccggacgaaatggatggtggtagcgctcatgagccgcctttctgcttcccgccctgaagggcatgagaacgttgtcttaatatctccaatctaccgcgtgtcgcggagtggacacccgtagagtatccgtgacgcaaatatgcggatgggaaaatccgacgcaaactttgcgcgaccatggacaacacatcattcgatgagggcttcgccggcaacgccacgccagcgggggacatccaatcgggagcggaaaggagcgtagtgctgttatgtccaataactcgtccaactcgaactcgagcaccattctggccggcatcaaggaagtaggccacaaagtctttggtgggtatgcggaactactgcgcattccgcataccgcccgttattccatcggctcggtcatcgcctgcatgccattcccgatggtcggcatgaccatcaccatttccgtacagcattattacggcaactattcgctagccggcatgctcaccgccattcaggcgattgcgctggccgtggccacgccgctgctgggcaagctgaccgacaagttcggccagaggcaggtctcgattccgacgattatcgtttggattgtggccgccatcgcgctggtgacggcgattaccaaccgcgcgccggaatgggtgctgtactgtctgacgccgttcctggccgccattccgccgtggggcgcgatgagccgcgcgcgctggaccaagattcttaagggtgaccgggagcgcacgaaccgcgcgctgtcgctgtgcggcgtgctcgacgaatgcatgtgggtgatcggtaatccgctggcctccacgctggccgtgatctccggtttgctggcgttctcgttcaccggcatgtgcgtggtggtcggtgcgctgatgttcctgaccgagctgaccactgagccaccgtcgcagaccgcgctggcgcgtgccgagggcatctcccgcaaggaataccgtgagcgcgaggccgccaaggctgaggcgctgaaggtggaaaccgccgccgaggagacccgccgccgtcttgagcgtgaaggcgtgaccgatgaggccacgattaacgcagccattaagcaggcggtcgccgatgcgcgttcgggcaagaaggcgtccatttggggtccgggtctgattgcggtgtgcgtcacctggttcggtttgggcgcgttccagtcggctacgggcatctccatcatcgcgtttgccaccgaagcgaatatgaagcagtacacgggctttgtgtttgcctgcttctccttcagctcgctgatgggcgcattggtgtatggcgcgaagaactggtcgattgccctgtggaagcgcttctacttctgtctggccgtggtgaacatcggcatcagtacgttcctgttcgccaagcatctgtgggtgatcatgatcatctacttgattattggcgtatgccaggccccgacgtggatcaacggcaaccagctcatgttgcatctggtgccgccctctcgcttgaccgagggcatggcgtggatgggtgcgatgaattctatcggctcctccgccggttcggcgattgccggccagttcatcgaccgcatgggctcgcacggaggcttcatggtggtgaccaccttggcactggcctcgctggtgattgcactgatcggcttcaagcagatcaagggctccaccgagcagccgaccctgactgaagtgagtgtgtgagacgtatgctaagcccccctctgacgagggggcttagcatacgtcaaaacgctacttcggccagcctttgggcgtgtgctccaaggaccagatgccgagcttgtgggagaagctgttctgccacttggcttcaagctcctcggcattcagtcgattttcagcggacttcagacggttcatcgcattggtgtgcgtatcgtcgagcagccacttgcgaatcaagaagttccagatcattaccacggcagtggccaccaacttgccgatattggtgcgcaacagatattcggcatgctgcgatacataggcatcatggttcataccataggtggaaatccagataatcgcgtcattcatgaacagaccgactacagcgcccgccacgaagataaggatctccatccagcgtgccatgtcatcacgatgcttgaatacgaatttcatgctcgccagatagttgaaaatcagcgagatgatgaaagagatggtggcagccagcacgttgtgcatgtggaatatgccaaccaataggttgaggataccccagtcgataacaaaggcgataacgcccacaatgccgaacttcatcagctgttcaatcagttttctcacaagagtattcaacactattgggctgactgcggaacgtgtattggctggaaaggccaataatatccccaattggccttgccccggtccgttctgcaagcagcttcctacgtccgcatgccatgttcaacagcagccgctgaggctagactggaagtgaaccgaatcaaggaggaattatgcccgttattcacactcatgtgtccgtgtccaccacccccgagcagcgtgaggcactgaaggccgcctacggcaaggcgattaccgctgtgccgggcaagtccgaaggctggctgatgtgcccgttcgaggacaatatgccaatctacttcggtggtagcgatgaccagcccgccgcctatgtggaggtcaacgtattcggccgctctgtgccgggctctgcttgggaaaagctgaccgaaagcattatggccgcgctgaactccacactcggcattcccgaggaccgcacctacatccgctacaccgccaccaccgattggggctggaatggcggcaacttctagttgccaccattcccctcgcagcatagctgttcgcatcgcctacggaaagcccagtgggctttccgtttaatggctcagggtggcaactagtttgcgtattctggctcccctcagtcagcttagctgacagctccccctcaaagagggaagctcagatgtagaaagcccgccggtggcgggctttctacgtttcaaggggctgatttccaacattcagaagctctactagcgtttcaaggggcttttaaaacaagaaacccggagtataaacattgcaatttcaatggtcatactccgggtttcgcaatcgaagagcccctcgaaacgcagatagacctccggaaaaccggaaatccgcccctcgaaagcgagttacctcacctcatgcctgtcatcacacaatcttgggcatgggggtggtgaggctggtggtcaggttgacgtggaccagaccggcaccggcatgcacctcgaccttcttcagggtcacggtgcgctcttcttcgggggcgcggtcgttgtcggtcatggtcgccggggacttgaccgccacgaacgccagatcatccagcgagatgcctgcgctctggcacagttccatggcctcggacacggactcggtgaagcccggcttgtagatcacgcgctcggccggtacgccgtaggcgttctcggccacccacttggcgttctcggtcagggccatgcccttgtgcgaatgcggttcggccggcatggagccgttctgcaacgcatcgacgaaaccgtcaagctgcgggaccagcgcctcgccgccgtcgcggaacagattgccgacgatcggcgtgcggaagcccagctcgtcggcggtggcctgcagggacggaacctgatcgtcctcgccttcccacaggttgatgagcgggaaggtcggaatgtccaggttctccaggcgctgcacgtggaacgggtagcgccaggccagctcgggatcgtcgcgccaggtggaggcgcgggtcaccacgatggcggcggacggccactgcgcgccatactcgcgacaggcgatgtccagccacttctgggcaccggcgtcggtgccgtaaccggcttcgacgacaaccacgtcatgcagagcgcaggccatttccacggaaaccagcgtcggaatgccgatggacacgttggcgaacgggccaccgtgcacgtagaccggggagccgttcacggtctcggtcttggccggcttgaccgcgtcggccagaatgccggtgatgcgccacaggtccacgaactcgccgaaggtcacggccttgccgtccttggtgccggcgatcatcttggatacacgctcggaaatctcgtccatcgagcgggagagcaccatgatctgcatgagctcgcaggtcggcgtgagcacgaccttctccggcacgttgcccttgccgtagtccacggcggtggagcgcagggagcggctcggcacctcggagacacgcggcacgagaatcgtgtcaagcttgccttcatcgatggccctctcggcgaaggagacgagcaggttctgggccgcctcgatggcgcccatttcgccgcacagaccccagtcgatgagctcggggtgggtcagggatgccttgccgccgccggaggcaccgcccttggaaccggctgcggtgatgcccatgctcggctgacgcagcacggcggccgcatcaatgccacgcttgttcagggcgtcgatcaaggcgatggtcgtggtggtcttgccttcgccgcgcgatgccttgagcggcgtatcggcggtgacgagcaccaccttgccgtgcttgcacggggcgtccgggttctcggccaggtacttcatgtaaccgaatgcgtcgatcttctggaccaggccgtactggctggtgaagtcttcgatggtggtcatttaatgcctttctgtgctgatgatggcggagcggggtggtggggcggccgccgccgcctcttcgcctagaaacagcccactgggctgtttcttaacagcttagcccctcagtccgcttcgcggtcagttcccctcagggaggggagctcaatacggactaaaagtcggacatgtggaagccgttcttcatttccatgctgcgagtgtacagcacggagtcaagcagcttgtcggtttcctccttgagctggtcggccatggtctggttggcggcggcgagaatctcgcgcacctcggggttacgcagcgcggcgatagtctcgtccggggtcatcggctgcacatcgccatccacgttgtcggcctcgaattcctcttcagcggcagactgcgcggcttcctcggcggccgtcaagcccagacgggcgatctgctcgtcggtggcggcgaccaagcggtgacccatcgcaccggtcttctcctggtagcgctcgacggcgttggacgtggagcggaaggcgccatcgcacagggcggcgatgatgcggttggcccagtagaagttctcggacgtcacgcgggtggtggtgtcctcaaggtaagcgggcgtggtgtccacgttcgggaagaacggcaccagcgtgttgaacgggttggagccgtatgccatccactggatggcgcgggaggcctgcgggcggtacgggcggatctgcatcaccgcaagctggctctggcggttgatgccgatcgtgcggtacatgtggcgggtgcgctcatcgcccagctggccgtatggatcgaacggggtgccctggtagtgggagctcaacacgtacttgatgtcctcgatggtcaccttgcgctcgggctggcgggcccacggaatgtcgtcggaggtgggcttgtggtcggcgtccgggccgtcccacacctcgtcgtacgggttgaggaagcgctgcatgtaccaggcgcgcggggtgttgtacacgtggtcggagtcggagtgggagccgaaggcgtcgcgcgggttgaacggggtggtgttctccaccgcgaggtccaggtggttggtttcgatgaattcggcgagatcttcggagcacatgtgcgcttcttggtcgcccagagcgtcctcaaggtcgaattcgtcgataccgagctggttcggcatggtcacgtaggcctcgtccggcactcgcttggcaatccagtgatggccgcccacggtttccagccaccagatttcgttggagtcggagaaggcgacgccgttcatctcgtaggtgccgaactcctcgagcagtgagccgaggcgctggacgccctggcgtgcggtcttgacatacggcagcacgatggtcaggaagtcctcttcgccgatgccgccgggcacctcgggctcatcgcccctggccggcgtgtattccacgaacgggtcggcgccgagcacgcgctcgttggtggtcagggtctcggtggcgctcatcgccacgttcgcctcgttgacgccggcctcgccccagatgccttccttgaggtccgcgttcggcacggcggtgtactgcagcgggtcgtccggcagagtgatggtcaggtgggagatcactgatttgtattcgcgcggctgttcctccggtttcacgacgatgaagcgcttcgggttgaactcgccgttcgcggaatcctcgttgcgggcaatgatggtcgaaccgtcatagctcgcgtctttgcctaccagaatcgtggtgcaggccatagtgtgatggtgtcctttctcttattcaagctccccttgtcaggctgagccgttcagcaaacagcccggtgggctgtttgtaggcgagggtgggagataagtcccaccacagatgttgcgggcggtagcccgtccgtaattgcaggacgagctgtctcgcaaagcgagactgaggggtagtcactctagctgtctctcccccaatccgcctacggcggccagctccctcatcagagggagctcacatacgccaactaaaaatcacgccttaccggtcaggaagatgccgtcggtgtcgggcgcttcgccgctgttgcgcagcgcgtgcaacagctcgttgagccagaagccctgattcaagccgggcaacggcttcttggtggcccacacctgcaggtagtactcgtggtccttgtccggcggctgcggaccgttgtaccgcatgatcaccgctgggtcagtgctgcggcccaagaacttggaggccgaagaattgcggccttgcacggtctcgggaatcatggccggcagctgacgggagaagtccggcgggatggccaacgcatgcgaatcattgaagtcgtacatcagcgcgtcaatcggcagattggccacggaccagtgaatccactcgaagccgcagaccggaatcgaatccgggtccacgaactcccagtgcaggtaacgggcctcggggttcacatcaccgatgtagaacgggaaggagacgaccggcacgccgccgttgaagtactcaggcgcggcggccttggcaaaatcgtccggaatgacggtgaaatcggcggaaatcttcatatgtcccagtatcgctcatatgtgtgacgtactgggggctgtgcgttacgggggtctctcccccagtctcgccgcgctcgacagccccctcgtcagagggggctggttgcgtcgggttatggaattagggcgcagaagagggattcgaataccagtagtgggttgccgttgccggctagacgcttgcgggcgtgggccacttcgtccagacgggtcacggcaccggcccggttcaaccgcaccgacaattcggtgatcggcgagcggttctccaggttgatgaggcccaccgaatcctccgcattgttctgcagcaccgccacatcccggtagatggaggcgatggagttcagcgcacgatccaatacgtcgcgcgtacggcgggtgaccaaacgcttcacatcgtctttcttggcgatctggttgaacgcgccacgcagtttcggcgggatgcggtcgttcggtgccagtccgttgatgcggcggaattccgcttcctggccggcggtgatgcggcttgcgtccgcctcggcctgggccttggcattgtcgataaggctgccggccagcagcaccgcgtccgaggcgcgagcgaggttcagtacgcccaccaccaattcgtcgcgatccgtcatcacctgctcgtcagtggcgtacaacttggcgatgccgatgtgtccctcggccagacgggccgcacgctgcgccacttttggctcgacattggtggtggaggtcaggaatccggccaccgcctgggtggagggcacggcgaggttcacgatgcgcgtgcgcgagcggatggtgggcagtacatcctgggcactcggcgcacacagcagccagatgcagtgttcagccggctcctcgatctccttcagcagcacgttggtggtgcgctccagcatgcggtccacatcctcgatgatgatgatgcgccatggtgccgtggcaggcatttgctcggaggcggtgatgatctcgcgcacctggtcgatgccgatggtcactttgttggtggccagcactgtgacatccgggtgggtgccagcgagcacctgttgggtgacgcgcgtgggctcatcgttcatgccgtggtcggggctttccagcgccgccgcgaatgctcgggccatattggaacggccggagccgggaggcccgcaaatcagccacggctgggtgatctgacccgggtcgccctgcgcgatgcgactgagcatgtcgattaccggctgctggccgactagtgaatcccatacgctcatcggacaccgcccatcgtcacggctcctgtagacgccccggatcgcgccatcaccgtatccacatctgcaacattgtcccgcagcagtgtctgaatgtccgcttcgatggcggaccacacctgttcgatggactggctggcatcgatcacgtggaaacgattcggctcggccacggccaagtcgaggaacgcctgacgggtgcgggactggaagtcgctgccggccgactccatgcgatcttcggcatgctcaagacgattgtgggaaagcgccggatccatatccagcagatatgtgcggtcgggcagcaggttgttggtggcccacatgcttaaggctcgaatctcttctggcgtaagttcgcggccaccggcctgataagccaaggaagagtctaaatagcggtcggtgatcaccacttcaccgcgctccaatgccgggcggatggtttcggcaacgtgctgggctcggtctgcagcgaatagcagcgcctcggcgcgcggtgcgatgtcgacggcgcccccatccacaccgtgcaacagcagttggcgaatggccttgcctagcgcagtgcctcccggctcacgggtaacgaccacggtacgcccctgagcctcaagatacgcacgcagccgctcgacttgcgtggtcttgcccacgccatcgacaccttcaaacgaaacaaacagaccgctcatgctattgaccttagcgttaggcgcagagttgcgcccaacaggcagttaaaccagctctacctccgtttcaaggggctgatttggtcttttctgaaggtctacttccgtttcgaggggctgttacccaagtagacaacgtcccaaaacggcggaatgacgttggcgcggagccgttcatactcgtggttcagcagatgaccagccccttgaagcggaagtagatattctcaaaacgagaaatcagccccttgaaacgcaagtagagcaataattccgctcagccacgcttgggaattacggcggggcgctcgtagccctcgttggcggtcagccagtcgacatccttcttgacggtggcggcggtggagctgagcttttcggcgatgcgttggttggaccagcccttgttcgccagcttcttcacctcggcacggcgttcggcgcgcctggcctcctgcgccgaaaccgcagccgaagcagcgcccttcttgcccttgccggcaacggccttggcgccaccggcacgcccagcaccgcgacggccacgggtggagggaccagccgcacgcttttcggcgagcagtcggaaggcgtcatcaggggtgatggattcaggcgtgtactgacgcggcaccgtgcggttggtctcgccatcggtgatgtacgcgccgaaacggccgtccttgatggtcacgttcttgccggtgttcgggtccttgcccaaatcacgcagcggcggcttggcggcaccacggccacgcccgcggccgtacttaggctgcgagaacagttctttggccttgtcgatatcgaccgtgaagatctcgtcttccgaggccagcgagcgggtctccgacttgccgtcggcacccgtcttggtcagataggggccgtagcgaccgttgttggcggccaccgtgcattcggatacctcgccggtttcggcgttggtttcctcgtatgtgcccacttcgcgcggcaggctcagcagctttagcgcgtcttccagcgacagcgattcagggctcatcgtcttgaacaacgaggccatcttcgggcgcgacgcggcggcggccgcggccttcttcgaacccttcttggccgcagaagcaccagcagtatcgccagcagcgccagccgaagcctcagccggcggcaccagcgccacatacgggccgaaacgcccattgcgcacctcgacggtaccgccggataccgggtcaacgcccagctcgcgcggtccaccggagtggttgtcgatcaaatcgcgggccacggccaccgtcagctcatccggcgcgatggtgtccggcagagacgcgcgcttcgggttgccttcgacgtccagatgctccatgtcttccagatacgggccgtaacggccgacgcgcacgtgcaggccgtcgccgatgtcgatggtgttgatggcgcgcgcgtcgatctcgccgagctgcgcgacctgctgttgcaggccttcgtgcgcctcgtcggcgttgcgggcggcgccctcgccggaaccgaagtagaagtgggtgagccagtcgcggccggattcctcgccgtgggcgatgcggtcaaggccgttttccatctcggcggtgaactggtagtcgaccagcttggggaagttcgtctcgagcaacttggtcacggagaaggcgagccagctggggatcagcgcacggccacgctcatacacatagccgcgatccataatcgtggagatgatgctcgcgtaggtggacgggcggccgatctccttggcctccagcgtcttgaccagcgtggcctcggtgtagcgggccggcggctgggtttcatggccgtccggttcgatgtcgcttgcctcgacctgctggccgacgctcatcggcggcagggaggtgttggattcggaggcgtcacccctgacggccttgacgtccgtcttgccggcagcagcctggtccgagccagccccagcgccgggaacggcggccttgggcttgcgtccctcccccgtggccttcataaagccggggaattcgatgacagtgccggacgcttggaacacggcctcgccctcggtggggccggccggcgcagacaggcgcacggtggcggtggagccggtggcgtcagccatctggcaggcgagcgtgcgctgccagatcagcgtgtataggcgcagctggtcgccgggaagtttggaagccagctcatccgggtcgtggaagcgcgagcccgccgggcgaatacactcgtgggcttcctgcgcgccagcggttttggtggcgtactgcttgggctcggcggagaggaacttgtcgccgaaatggtaggagacggcgttgcgggcggcggtgatggcctcctgcgacagcgtcaccgaatcggttcgcatataggtgatgtagccgttctcgtacaggctttgggccgcgcgcatcacgacgcgagcacccatgccgaggcgattgccggcggtctgctgcaaggtcgaggtggtgaacggcggctgcgggcggcggcggtacggcttggtttccatcgacatcacagtgaaatcggcggtcctcagcgcttcagccacggcagtggcaccagcctcatcaagctggcgaacgttcgccgcgaacccgtccggggtcagctggccgtcggcaccgaaatccttggagccggcgagtcgcttgccgccgagcgcgatcatgcgggcggagaattcggcacgctcccccagcgcgtcaggcgcggccaacatggcgacgatatcccagtacggcgcgcgcctgaacgccatgcgttcgcgttcgcgttccacgatcaggcgggtggccacggactgcacgcggccggcggacaggcccgggcccaccttgcgccacagcaccggcgacagctcatagccgtacagacggtcgaggatgcggcgggtctcctgtgcgtcgaccatattgccgtccacgtcgcgcgtgttgttcagggaggcgttgatggcgttcttggtgatctcgtggaacaccatgcgcttgaccggcaccttgggtttcaaggtctgcaccaagtgccacgcgatggcctcgccctcgcgatcctcatcagtcgccagatagagttcgtcggcgttcttcagggccgatttgagttcgctgaccgtacgcttcttgtcgccgtcgacgatgtaatacggcttgaacccgtcgttgacgtccacgccgaacttgccgaacttggccttgtctgccgcgggcacctggctgggctgcgcgaggtcgcggatatgaccgaccgacgccatgacggtgtaccccttgcccaggtagtcaccgatcttgtgggccttggtcggagactccacaatcaccagtttggtagccatacccactccttatgtattgcgcgaaacacacgacgtttctggcgtcataatactcatgaatcatatccaactgccaaattccgccgttgtgccgggcaaattcggccgttcgcacctcatgttttaccgtttgggcggtgccggcggagcgccgatcaggcccagcctgcttaagggcgctgcagtgatctgacgtagggccagcaacagtccgaatgcgagcatggccacacccgtaatgcccacaacagcgctgacattcgccccctgaaccgcccaactggcgctgacattgagccccggcaccacctgccagatcacataaccgctgtaggcgagcaacagcaggcccccggtaatcaacacgctgccgacgatctgcacactcactgaggagacgcggtggcccggctcgtccatgccggacttgcgtgtaaccgccagagcgagcagggccaatcccgccaccagcaggatggacatcgccacatccgaagggcgatgccattgcccgtatatcacagagacaccgacggtcgccgcccaaaccacgccgatgacgcccgccaaagctcgaaccgcgcgaggcacggtaagcagcagaatcaccgcacaggctgcggccagcatcgtgtgtccggaaggcgcggaattagcggcaggcgattcagtgttgatgatgaacggacgcggcaacagacccttgatacgggtgacggccaagcagaccacggcgaacacggcgatttgcccggccaaccaccagcggcgtcgaatcagcgccgtaataatgccgattgcggcaattgtgcagctgacagcgataaccagccaggattgtgcgacggcgttcatcatgccggtggtccaggacggtacatcgttgtgcaggtttttccagaccagttcgtcgtacgattgtccgttttcggtaaacacgcacccccaccacacgccgaagccaatagcgatcaggagcagaccgaataccacgcacagtacgcggctggagattcgcgggcgcacggtaagcgggtcaagccgggccaagccacggtcgatatcagatgccccatccgcatcgtccatgcccagcggcctgaaatcccctaaggagcctgatgtggatgccgatgcatctgaaccggagaccgggccgagcgcagccaatgggtcaacaacgttcgacgacgagtcaggctgcgctgcgcctgagccgaccagattgaccgccgcatgcgggtcgcgaattctaggggtctgtgcgtcattcatacgttcgactgtacggccgcgccccggacagggagccgtgctcgtgccagctcacggccaaatccgcacaaatggaaaacctccacgcacccgtcagaggccacttacccttgctgcattcctgccctgggggagttgggtgacatagcgccgcgtggaggctggggataagtctatggagacgtatggaccagcgcagcgacacgaaacgtgcgcgccgagtcgcacggcaggccaaccagcgcattcaggcaatattcatgcagcatcaaggaacgtgcccaattgtaagaattccggaaaaataccggcataaatgcgtgtggttacgctcacgtcaaacgattgttcaaggccaacagttacggtggacaccatggcttcttatactcgtcgtgcacattcgggaggcaatggccccgctctgaggcaaccgcgcaccgcgcaaagcagagccgaccactccgcacaggagggcccctatacgccccaggagagccgttcccgccacgcaagccacaaggcttccaatagccatcgagccccgaacaggaagaaaaagaacacaggaaaaggcaagcaccgtgtactgaaatgggtgctgggcatcttcttctccctgattggactgggcttgctggccggtatcgcagtattcgcatacctgtacaccaccaccgaggtcccgcaacccgaaaagttcgcgttggccgagaaaaccaccgtgtattacgcggacggcaccaccgcgatcggctcctacgcggaacagaatcgttcaatcatctcttgcgaggggctgccggactacatcggcaacgcgattgtggcgtccgaaaaccgtacgttctacacggataaaggtcttgatctgaggggcatcgcccgcgcattcattaataatgtgaccaagggcacgcgccaaggtggttccaccatcacccagcagtatgccgagcggtattacatgggcgaaaccacatcctatgtgggcaaggcgcgcgaggccatcgtggccatcaaaatcgcgcaaaccgagtccaaggacgaggtgctgtgcaattacatgaacaccatctatctgggccgcaactcctacggcatccaggcagcggccaaggcatacttcaataaggacgccaaggatctgacgctgtctgaagcggcgatgatcgccggcattattccgtcaccgtccacgtgggatccggccgataacgccgatatggccaaatcgcgcttcaagcgtgtgctgaacatcatgcaggaggatggttacatcactgccaagcagcacactgatgccaagttcccgcagactgccgcggtggcgcagcaaaacgaatacgcggggccgaacggttatctgctggatatggtgcgccgtgagctggtgcagtccaaggcctttaccaaagaggatttggataccggcggatacaagatcatcaccaccatcgacaaaagcaagcaggaccttatgcagtccatcggcgacacccgtctggacgacatgcctgaatccctgcaaatcggcggcatagcgctggacccgaagaccggtgaagtattgtccgtatacgccggttcagattatctgtccaagcagctcaacaatgccgatcaggccgtattcgaaccgggttcgactatgaagccgttcgctttgctgggggccgcgcaatccggcgtcagcttcgatacgttgttcaacggcaattcccaccagcacttcaccggcttggatcaagaagtgaataacgctctggagaacaactggggcaacatcaatctgtatcaggccaccgccaactcggtgaacacggtgttcatgaacgtcaatgagcatctgacgccgaagcgcacggccgcaatcgcccatgaagcgggcattcagggcgatatcgatgaaaactccatgtacaacgtgctgggcatcaacgccctgaccgtgtgggatttggcgcaaggccattcgaccatcgccaacaatggtgtgaagagcaccttgcacatggtgtccaaagtgcttgattccaacaataaggacatgtacaacgcgcccagcaaaggcaccaaggtgttcgatgccaacgactgcgctttggtgcagaaggccatgcagggcaccaccacgtacggtacggcggccggcacatccaacatgctgggccgacccatcgccggcaagtccggtaccgccaacgacgaaatggcttcgtcgttcgtgggatacacccccagcatgatgaatgtgtgggctatctggaacccggacgataagggcaatccgcaggcggtgccggccttctccggatacggcatctcttccactggataccccgcccacctgttccaggagttcatggctcaggccttgcaaggtaccgaggtggagcagttcccggccgctaaagacaatggcaagatcggtggacccgacggcacttggggcttgggcaagggacagagcagcggcctgtccaacaacaccaacaagcagtccaccgaagacgcgcagaagcaggctgagcaggacgcacagcagaaggcggccgaagaggaagccaagaagcaacagcaggcccaggagttcgcccagcagtgcctcgccaatccgagctattccaccgagtgtccgaattatcccggcaccactaccggcggagatggcaacaatggcaacaatcccagcaataccggcgggaacaacgggaacaataccggcaacgataatggtaattccggaggcaccggcgggaacaccggcaccaacggcgtcacccagtagtaagtaagcacagacaacaaagctccctctgatgcaatcagagggagctttgttttgttgttagcgctcagcgcttgcgctgggaacggttgatggcagagataatcgacttcagagcgctggtggtgatcgacgaatcgatgccgacgccccacacgatctgcgcatcatcggcctcgccgacctggcattccacgtacgaggcggccatggcgtcggtgccgacggacatggtgtgctccacgtaatccataatcgaggcgtcaacgccaaagttggaaatggcgttgaggaaggcggcgatcggaccgttgccgatgccggagacctcgcgctccacgggcgcatcgaccccgacgttcacgccgcggtcgagcaggcgagccttgagcacggtatcggagccatcctcaccggagctgacggccaccttgagcagcttcaagcggccccacggtgcgagcgaggcgtcatgagtatcgcccacaaccacaccggcggcggtcatgccggactgttcgatcggcaggtactcgtccttgaacagacgccagatatcctcgtccttgacttccttcttggtcgtgtcagcgtagtcctgcacgatcttgtcgaattcaatctgcagacgcttgggcaggtcaagattgtggttggtcttgagcaggtaggccatgccgcccttgccggactgcgagttgacgcgaatgatggcctcgtacgtgcggccgatgtccttcgggtcgatcggcaggtacggcacgagccacacgaagctgtcaagatcagcgccagcgcgctcggcggccacctgacgagcctcgagacccttcttgatggcgtcctgatgcgaaccggagaacgcggtgaacacgaagttgccggcatatgggtggcgctcggagatcttgatctgattgcagtattcgaccgtcttgcggatctcgggcacgttggacaggtcaagctgcgggtcgatgccttgggtgagccagttgaggcccagcgtgaccaagtcgacgttgccggtacgctcgccgttgcccagcaggcagccttccacgcggtcggcgccggccagcacggccagctcggtggcagccacgcccatgccttcgtcgttgtgcgggtgcagggagagcaccacggagtcacggtcgtcgaggtgggtggaaacatactccacttcgtcggcgaacacgttcggcgtggtcatttccacggtggcgggcagattgatgatcatcggacgctcaggggtcggcttgatgacgccgatcacggcattgcacacctccacggcgtactccggctcggttccggtgaaggattccggcgaatactcgtagtacaggtcgatgcccttggcttcgccctcgagatccttgcacaactcggcggcgtcggtggcgagcttcttgatctcttccttgttcttgcggaacacgacctcgcgctgcagcacagacacggagttgtagaagtgcacgatggcacgcttggcacccttaagcgcctcgtatgtgcggcggatgaggtgctcgcggcattgggtgagcaccacgatggtcacgtcgtccgggataagctcacgctcgatgagcatacggatgaagtcgaaatcggtctcggaagcggacgggaagcccacctcgatctccttgaatcccatggagacgagcaggttccagaaacgcagcttgcgttcggaatccatcgggttgacgagggcctgattgccgtcgcgaagatcgacggagcaccagcgcggcgcgcgctgcagtcgcttgcccggccacgtgcgctccgggtaatcaaacgggatctgctcgctgtatgaggcgtacttgttgtacggcatacgactcggcttctgcggatcgccgatgaatcgtgccggaggcagcagcgggtcgttgttccccccattggacgccgcagccactgccgcgagatcaaaaacggatgattgaccctgacccattgttcctcctttactggttattgcgcgggccctcttgcggacgcgactgcggcgttgtgccagggcggcgccgggccacgcggatttgtcaatacgcacgtaacatcctacaggccggttcgggcaaacccgcgggaaatgccgtatcgtggcatttgcttatgcacctggctgatatgagggcactcagcgtcgtcagcggaccacgctttgactccggcacaacaccccgcctgcgataccccaccagatggccctccatacgtcggcggcgggccaaatattggtactgcaccgacagccaaactgctcagcgtcgtcagcggaccaacttatggcgaaataccgactctgggaaagcttatcgtcggcaaattgccaggctatggcacactatcgacgctacgaggcccacaaccatcggcaacgcgacaaatattggcccaccgccgacgctagcctctttgagcgtcggcgccgggccattccatgaatcagtaacgacgccaatggtctcagaacgtcagcatagggacgc

SEQ ID NO: 3852 - DNA, 30088 bp, Unknown
  R35_2m  MAG No. k141_13741
ctacgcggacggcgtcatcgtcggctccgcgctcgtgcacaccctgctcgcggacgacaacaagaccgcacgcgacccgaaggaaggcttgaagctgctcgccgccaagagcgaggaactggccgaaggcatccacaacgcccggtgaacacccggtgcgcctcacgcgggttgtgccgtgacacggtagggtagtcacagagcatcaagcacaacccgcgcgtggacacaccatgagcaccagcaagtagaggcacgatgaatctggcttatattccctcgccgaccttctccaagttcgagatcggcccgttcactatccacatgtacgcgatctgcatcctgatcggcatctgcgtggccgtatggatcctcaccacgcgttggaagcggtacggcggcaccttcgaccagattctcgacaccacgctcgtcaccgtgccctgcgcgctggtgggcgcgcgcctctaccactgcatcaccacgccggccgactacttcccgcccaccggcaacttggtcaacatcctcaaggtgtgggaaggcggcatggccatcttcggcggcatctccgtcggcaccttggtggcgttcctgtggtgccgacacaagcactatccgttcgcgatcttcgccgatgccatcgcccccgcgctgcccgtggcccaggccatcggccgactcggcaactggttcaaccaggaactctacggctggcccaccacgttgccgtggggcctgaagctcaacgacgcggacgccatcggcaaatccgaaatctgctattccggcgcgcaatgcccggactacaggaccacgctgttccacccgacgttcctctacgagatgatctggaacctcatcggtgccgcgctcatcatctacctcggccacaagctcgccgaccggctcaaggccggccagcagttcgccatgtacctgatgtggtacggcctgggccgcacctggatcgagaacgtgcgcatcaactactccacggtgatcctgggcctgaggaccaacgtgtggaccgcgatcatcgtcttcgttctcggctgtatcctgttcgtcgtgctctaccagtacggtccggaccccaaggcgcaggcgcgcgggcttgcggcggtcaccgccgacgagctcgaacgccagagcatcgaagaggaacagcttcgccagaagaagcaggccaagcgcactaagtgacaccacaataaacagcgccgaaacagcgcgaaacacgggaccccaagtcccattgcacagataaggtaggaaaccatgagcaatatcgcaatcgcacccagcatcctgtccgctgacttctgcaacctcgaacgtgatctcaaggccatcgccaacgccgacctggtccacgtcgatgtcatggaccatcatttcgtgccgaacctgaccctgggcgagccgatcgtcggccgcatctgtcaggtcaccgatctgccggtcgacgtgcacctcatgatcgaggacccggaccgttgggctcccgaatacgccaagctcggcgccgcctccatctccttccacatgggtgccacccacgcccccgtgcgtctggcccgacagctgcgcgagatgggctgcaaggcctgcttcgccgtgcgtccggccgaaccggtcgagccgatcttcgatatcctcgacgagttcgacatggtcctcatcatgaccgttgagcccggcttcggcggccagaagttcctcgacaaccagatggccaaggtccgccgcctgcgcgatgagatcacccgccgtggcttgaagacccgcatccaggtcgatggcggcgtgagccccaagaccgcgcacatcgtggccgaagccggcgccgacgtgctcgttgccggttccgccgtgtacggcgccgagaatcccgcccaggccatcgacgacatccgcaccaaggccgaggccgcgttcaaggcctgagctccaagcctgaaccgcaatccacctttcatccataaccgcaagaaaagaatctgaatcacatgaagacgtttgaatccctgttcgccgaactgtccgaaaaggcccagacccgccccgaaggctccctgactgtcgacgagctcgacaagggcacccacttcatcggcaagaagatcatcgaagaggccggcgagacctggatggccgccgaatacgagggtgcggaccgcaccgccgaggaaatgagccagctgctctaccacgtccaggtcatgatgatcaagcacggcctgacgcttgaggacgtctacaagcacctgtgagaggaacgcaaatgctgagaatcgcagtgcccaacaagggcatgctatccgaacccgcgtggaacatgctggccgaagccggctaccgtctgcgcaccaaccctcgccagctggtcgtgcaagatcccgacaatggcatcgagctgttctacctgcgtccgctcgatatcgccgtatacgtgggccgcggcgccatcgacgtcggcatcaccggccaggatctgctcaagaactccggtaccgccgcgctcgagcacatgccgctcggctttggtgcctcgaccttccgtttcgccgcaccgaacgaatccccgatcaccaccttggaggatgttcagggcaagcgcgtggccaccacattcgataagctcgtacacgactatctggtcgagcacggcatccaggccgagaccatccacctggacggtgcggtcgaatcctccgtgcagctgggcgtggccgacctcatcgccgacgtggtctccaccggtaccaccctgcgcaacgccggcctgcgcgtgtttgccgaaccgctcatgcactccgaagcctgcctgattcgctcaccgcgtctgaacgagcaggatccgcgtctggccgtgctgacccgtcgtctgcaaggcgtgctcactgcgcatcagtatgtgctcatggactatgacattccgatcagcaaggtcgccgccgccgtggccgtgacccccggctttgaaagcccgacgatctccccgctgcacgacaaacagtggaacgccgtgcgagtcatggttcccaaggccaaggtcaaccagctgatggatgatttgtacgaagtcggcgcacgcggcatcatcgttaccgctctgcaagcctcccgcatgtagactgttagtcgatatgaccaaccagaaagtcaacgccagatacagtccggaagcacgtgacatctatttcaccgtgcccaatttgatcagcgcgctgcgaatcatctcgattcctttcatcagcgtgctgatctccaagcatgaggtgattgcggcgctagccctgatcgccatttcctcggcttcggacggactcgacggcatcatcgcgcgcagattcaaccaagtgagcaagattggtcagattcttgatccgatcgccgaccgactgctcattttctgctcgattctggccctcagcgtcgccggcatcatcccctggtggatgctgattatcgtgggactgagggatctgtggatggcgattcaggtgctatggcttgcccagtacggttatggtccgctgcccgtgcatttcgtgggcaaggctggtaccgcgctgctgatgatttccatcgtcggtcttattttcgccgatttgggcaccagtacgttcttccacttgctctacatcgccgcgctggccgccggcatctggggcatcgccatgtattggctcgccggatatatctataccaagcagggcgtcggattgctacgcaaggaactgggggagaagtatggcgcttgaggccatggccccggtctcgttccccatacccaaggagaatgagccggtacgacgccgcgccgtgttctcccactcagtccgaggcgcggaatcgcatcatgcgctttccccggatgacgccgccgccatccgcaccagacgtcgccgtaaaaccaacgacgattcgcttcagctcatcgatgatcttgtcaatcgtccgatggatccgatgttctccgactcacgactggtccatgagcatcgttcgaccttctccatctggtttaatcgcatcgtcgtattcatcatctgcgtcggcgttggctttgcctgcagcctattcgtgcaacagttgcaatccgatccgcgtaagcaggtacggcagactttggccacgcaattggagaatcgcaactcgcagatagacgaactcaccacggacgtcaataatttgcgatcccaagttgacgaacagtccaagaaaatctccggcagcgtgaaaagcgacacgcttatccaagacgaaatggtcaatggtgccacggtggtcgaaggcgaaggaatcaccatgacgctggccgatccaatcgcggcaagccagtcggatcaatcctcctcgacgagagtcggcacctccacgaacatccgagtcatcaccgatctggatctgcaacaactggtctccctgatgtttcaaaacggagccgaagccattgccatcaacggtaataggctcggcgcgcaaacctcgatacgcaaggccggcgggcatattctcatcggcatgaccgcgatacaaagcccctataccattgaagccataggcgataagagcgccttggccgaagcgatgggggagaagagacttgcaagtctttacgattccttcaaggaagccggtatctacccgcaggtgagcaaatccaattcgattacacttgaggcagcagtcactggcgaagtgaagtacgcggaaaggaatgaataatggcagccgttctgggactgatcatcggcgtcgtcatcggcgtgttcgtcaagccggacattccgatcatcgtgcagccatatctgccgattatggtggtcgctgctcttgacgccctgctgggtgccgcgcgagcctatttcgagcgcagcttctccgaccgcgtgttcgtgatctccttcctcgccaacgtggtgacggcaacactgctcgtgttcctcggcaaccagctcggcgtcggttcgcagctgcagacggccgtcatcgtcgtactcggcatccgcatcttctccaacgtgtccgcgatcagacgcttcatcttccgaggctgacaagggtactgacgtatggcacgtaaagcacaatcagacaacatgctggagaaaatgcgcgaccagcatgcacaagacaaggtcaacgaccggatggaaaccgggtcgttccccacggtgcgcaagaagccccggaaggatctcaaccgggccagcaacaaatcacggctactatcctcgattctcattgctctgatgtgcgcgctgctgggtttcgcctacatgagccagatcaataacactaaatccacgtacgaaacgatggacgagagcgaactggtaaggctgctgaacgagtcgaatacgcaaatctcgaatctcgagcagcgtaaaacccagttgaacagccagctcaactcactgaaatcggcggctaacgagcaggagcaggcgcgtaagatcgccaagcaaaacgaagagaccagcggcttgatctccggcagactcccggcgaagggccaaggcgtgaccatccggatcggacgaggctcgacgactaaagtggacgcctcaatcatgttcaacctcatcgaggaactccgcaatgccggcgccgaggtaatcgccatcaataacgtgcgcgtcatcacctccacctacattcaggacgccgaggaaggcttgatcgtggatggcaccaccatcaagcccacatacacggtgaaggccatcggcaatccgcaggagctgtccaacgcagtcgatatcgccggcggtgtgggcgctcagctccaggtgaaatacggatccaacgtcaacgtgcagccttctgacagcatcattatcgacgaagtacgcgaagctacgcaaaaccagtatgcaaagacggtagaataggggattatgaccaacccgattcctagcgcaggcgaaaccaccattatcggcctgcccgcgattaatgtactgcccattaccaccaccggcgatcgaccgctgactcaagaggatctggacaccatcaccagattgtccgagggaacggcattgctgatttccgccaggggagcggtctcaggttctcgttacttgcttgacgaggatgaaatcaccgtcggtcgtgattcgcgagctgatattctgctcgacgactccaccgtatcccgtcagcatgccgtgttccgcagggtcaacggtcagttctttgtggttgacgcaggaagtctgaacggcacctacgtgaaccgtcagcgtgttgatcaggcgtcgctgaagaacggcgacgaaatcatgatcggtaaattccgtctcgtgttcttcacgaaatccgccattatttcccaatagtccacacccagcacggggttagactgattgcagaaattgcaatcatgtgattacaccagtgtgagtcacatgcgagacacgcatgagttaggggagtgccatgggacagacagggctgcatcttcatgtttcgcttgaggaccgtcagaatctgaacgctgacgcgattcagggggagttgttctccaatgtcgatactgaggagatcaagcgcggctaccgtggcactgtggcctccaaggtggccggcatcacgtaccgacagctcgattattgggcacgcaagcagattgttgagccgtccatcacgccgtctcatggctccggttcacgccgactgtactcgtttaaggatgtggtgattctcgctgtatccaagaagctgcttgatgccggtgtgaatctgcagaacgtgacggcggccatcggattcttgactcaacgcagcaccgatcagctggccaatgtgaccatcatgtgcgatggtcaaaacgtgcacgaatgcactaccagcgaacagatgctcgaactgttgcaaagcggtaaggcagtgttcgccgtgtcggtgggttcgttgtggcaccagattgagacggccttggaacaggaagaatatattgatcttgaggctaagccgctgacgattgccacgggccgtccgattgatgaactgactgccatgaggatgcgcaagaagctcgaggcacagcgcttgcaacgcgcaaccgcctgatacatgtatggttgttggcgacttgccggctttggtcggcaggtcgctttgttgtatgtgttgcttttgttgcctgccatcttatgtttttatatgttgcggtgattattatgactgattggaggaccgggtgaacgggattgttgtcggattgttgccgggcgttctgtggatggtcgccgtcatctttgctgtgtccatcatcactataacggtcagccgaggccatctgttcacgccgaaacgccggcgaccgccggtcgatccggtcgactggtcgatggtgaaaacgcatttcatgtcgtttgcggcggcgctgattccgtttcccgtattgacgttcaccgcagatctgatggatgctcgcatgctcgcgttctacgaccacgcgcaattgcccggagcaatcatcatattcgtgctggtgctgctggaactcatcgccatgtatctgcaggcacgcaacgcctcagaaaccgaaatggacaagcgtttgggcgttgcttctcaccggaataaggatgatgttgcgaagtagccgattctctgcggcgaggctaatccgcagctagatactactggttcggctaaaatcaccacatactattaaccgataacgtacgttatgtcagattagttatccttgacgaggattcagtcgcctgtatcaactagtccacgcataccaggccgacagccaaaaggccgacagccaaaggagcaccggagcgaccaccgcaattgcaagaatcgccgtgcctttcagccaatccttgtcatctcgtttccagtggaatgctcgccaaatgaaccatatcagcatgggaatctcatacagcgacagcaatggcaaaccgatgaaaaccaggtcgaagcccgcggcgcaggctccatcgcatcccatcatgaagaagtcctcgccgttgtgtttcagtgcgtttggaaataacggtttacggcgtcttcgagctgctcaggttgctcaataatttcgtaggcaccgtgttcctccatctcaccggccggagcgtagccccagcggcagccgatggcgtccaaattgcaggcgtgggcgccgtcaatgtcggtgtagcggtcgccgatcatcacggccctgtcccccgctgcagcatcaaaaccgatttcgtcgaagcagtaccgaatcacctgatctttgtccagacgggaattgtctttggaagcaccatagatgccgtccaacagttcggtcaggtggaaatggtcgcagataggcatgcactggtattcgggcttgcagctggccagtgccaggtagtaaccgtcggcatgcagtttgagcagctgttcacggatgcctgggaatacgacgttcaccagtcgtccgggcaccttgttgccgggctcgttcggatcgtcgaacacggcacggtctccgtagtagctgcggtagatgtccacggcccgatccagatcttccgcaggcacatgattgcggcgcagagattcaataatcgccggtccgatgaagcgtcgcagttcggcggcgtccggaaccggtcgaccgatctcttcgaaggtcttgatgacggagccgataatgccgccgtcggacttggtaagcgtgccgtcgagatccaacaggaccactttcatcggatgctgtgccattgagattccactcccccttgttcatgtcgactgctttgaatggtcgtcaaacaatgcgacttgttccaacaatgattatgcccagtcgggatgactgggcatcaagttcacgtgttgttcagtaggagatcactcgtagtcgggaatccaaccgtcacggtgcatttgcaggcgcttttcgagcagggtggccagttcctcttcgctacggcgttccagcagcatgtcccagtgggtgcgggtgggtttgctgatttcgtcgccctcacggtcggcgtcgccctcacggtgggccacggaaccacaacggcactcccactcgtccgggatttcggcaccctcggcaaacggcaggatggtgcggtggcccttcgggcatacatacgccacatcgtttcgcgcggcgaaatcgacgttgtcgtcggactccagcgatttcgctccgatgctcatgcccctgaggctacgttctgccatatcggcatcctccttgaaagatctttaaccctattaatttacgcaacagttcggacttggccgctattccaaacttccgacgtcggctgacaaactcccgtcaaacagccccgtcagtccacgccggagtaggccaccacgccacgattgacccggtcggccgcttcgtgggcgaggcctgccagccgctctcccccgtcgaacggcagcggctgggcgacagcaatctgctgcagcacgtcagccagtcgtttggcagtgcgcacgaagtcgccgccggtcatgtcggtgccgtacaggcacgatcccagcgaaccgccatccgcccattcatacatgatgtcgagaatgccgaaatccggccgctgcatctcgtccagaccgtgatcctcgcacaggatatcgatgtcttcacaaatgcccttgagcttggacgaagcgatggcgatgggcccggagatgccgcccgggtagtgcctcggttcgccgtctcccccgcgtctggcctcgtataccagtgaagagagcacagcggccagtccgttggcgtcgagcttgtcgaacgtgccggcgagcagcgcctcgcacagttccaggtcatgttcactgtagatgcggcgcagcagcagacctttgtcagtcaacgtcatgtcaatgtggccggccgcattgacatgacgttcgaggtaaccaagcccggtgagaacatcgcagatgcaatcgaactggcgtgccacggacccggtgcgggagtcgtagcgatcggtgacgcgctgcagttctcgagtctcgcgggcccagcggtggccccatttgaggtgttgctggaggtccgggcagttgcggcatggatgctcgtgttccgccttgcgcaaatcgcgaatgcgctggtcgaggttctggaaagcgcgtgaacgctcctgatcggtcaggaacacttcgtgcttcagtttgcggcggccttccttttcgatgtcgctcagctccatacgcagggtcatgaactgtttgaagtcgccgtgttcgcatgcgaacgcctgttcgtatccggccagcgcgttcttcagtgtgttaatctgcgattccagctgccaggccgattcgttggcctcccactgggcaaacgactggtccagggtgacgcgcgcggtctcgtagtcgctggagttgagcaggttcacggccatgttgaacgtgggtcggaagctcgagtgcagtgggtagacacgcttggatgacagcgaggcggccgtggcgggcacaaaaccgtgatggtcgaccacgatggcgtggccgatggtgtcgatgccgcgccgaccggcacgaccggtgagctgcgtgaattcgccgggcgtcaggcccacatgaccggtaccgtcgaacttttcgagtttctctaccaccacgcagcgggccggcatattgatgcccaatgccagtgtttccgtggcgaacaccattttgaccagaccttcttcgaacaatcgttcgactatctgacggaacagggcaatcatgccggcatgatgcgaagcgaagccttcttccaatgcaaagcggaacttggagaactgcagggctttcaggtcttcctgagtgagttgcccctccaccatctcatccacgatgcggcgaatcctggtcacttcctcatcggtggtgagctccagtccagcgttgatacactgttccacggcctggtcacagccgttgcgcgagaagatgaagtagatgccgggcaacattcccaggaagttaagctcgtctaccacggcccagcggcgcggggtgtggcgttccgctttcggggcacggtctttggcgcctttgccgccgcggcctctgccgaagcccttgcgcttatcggggcgttcctcgccgcgccggcgtgcggccttgcggtccaactggtcgagccggttgatgagttcggcgttgagtttggtggtctgctcgccgttgccgtcgcggcgatagaggtccagcacctcgggctcggtgtgttcgtccgcctgcacgatgacgtgctgttccaaaggcacggggcggtgttcgctgatcaccagttttgtgtcgcctcgcaccgaggcaatccagttggagaaatcctccacgttggacacggtggcggacaggccgacgatcttgaccgtcttgggcaggtggatgatgacttcctcccacacgggcccgcggaatcggtcggccagatagtgcacttcgtcgagaatcacgtagcgcagtgcgttcagcgtggtggaacgctcgtagagcatgttgcgcagcacttcggtggtcatgaccacgatgtccgcctcggaattgatcgaggtgtcgccggtgagcaggcctaccttgtccgggccgtacacgtcgaccagatcatggtatttctgattgctcaacgccttgatcggtgtggtgtagaaggctttgacgttgcgttcctgggcgaggtaaatggcaaaatccgccactacggttttgccggcaccggttggggccgcgaccagtacgttgctgccggcttcgagcgcgtcattggcttcggtctggaagtcgtccagttcgaaaggcagggattcggcgaatcgcgctgctgcggacgcccgatggcgttggaccttttggaatgatgcgtaccgctgcgaagggctcagcgtctgggaatcggcattgcccttatggtgttggtgacgtgccattgctgctttccgttagttgttgaatcgcttccagcgggcccatgcctgggtgtggcgttcgcgcttggcggccttgctgcgaatcacgttcgcatgggcctcggcataacgattctgtgccacgctgagcggctgagtgaacagaggcggctcgctggtgtcggcagaggtgccgggctcccccatcgcggccacgcgttcaccgagttggccgccgatgtcggacatgtctttcaaggcacggagtccatgaagggctgcatagatgagtccggcaacaatcatggccagcatgaacagggccagaatcagccatatccaccaaggcatgaaaggctccttacttgttctcgctgatgctcagttcgcgttcggcgcgtgccacgatcatggtgcgcaacgtttccggggcgaccgccgtgatatgacgcgcgtgggcgatgcagaaggccacgaaccaggaatcggaggaaacggtcagatgcaccttttcaccggcaccgcattgttcgacggtagcgcccggcaatgtcttgatgaatgccagatcgcgctgatcggtgatgaacaccgcgtcggtaccgttgtcgaaactccacttgcgcagttcgctcaccggcatgttcgggatgttgatctgcttggtgggcttgaccagttccgccttttcgatacgggccaatcgcagtacctgccagatgcgcggcttgccgttggccttgtcgagggtcttgtctttggagacgtaggcctttttgtccttgggtgcggcggaaccaacgtccgtgtagacggcggcataatacacgccttcgtcaatgaagatcttggcgggggccaccagcttgcggcgggtacgacctgtaccgtcggtgtactccatgtccaacagcgaatcggtgttgatcgcacgcttgacgatggagaagcttcggggctccagctcatagccggtcaggctcagccacggggtctgaccgggactgacatgacggcgcaaacgctcatacagggattcggcctgcccacgctgcttgtccggcagcaacggcgaatgcgccaggtagctgaccgaggcggtgagcatgctgaggtattgcggcgaaatgccggcaagacgttcaaggcccagcgaattggtggcggaaacaataccctcggcatccagcagcggccagtcaatatcgaagaactggctgccggccatctcaccatcgtcggaaacggtggtcagggtgttgatgtccttatggatgatgttgacgaatttcttgagttcatcatcgttctttggcttgccgatgaagcgttcgcccagctcgctcatcgagaattcctcgccgaggtgggcggagaggaacagcatcagacgcaggcgacgatcaacctcactgcccgtttggaaagcggagccgttcttcttgttctgagccttgatagactcgggatcacccggctctcgcacatcgcgactaatcgacggggaaaccaccgaagcgctcacaggactggcggattcgtcggccagagtgaaccgactggcggcgtgcaaacggcgatgataagcgtccacagcctcttgcgggctgacaatcgtggcccccggatgctcaagcacaaacatggccaaatcgtcggaatcggtgtatgccacgttcaggtgttcgccatccacgtcaacggtggcggcgaaacgacgcgaatcaataaccttgaccagtgaatccggaatgggctgcgtccccaagccaggcgcaatcgaatccaagccaagcccgggaatcggggtctgcggcacacgcggcgtagtgcgcgacacatgctgggtgagctgggactgatccggctcggaagaaatcgacatcgaacgagccagatagttggcggcggcaagcaccggcatatcttccggctcgaacatcaggcggatgcgcggttcgtcgcccaactgcagacgataggacgcgaagtcctggccttccgacttggacgagtactcaggctgccgtgattcgatggcaatgcccatcgcagcgagcttggcgcgatcacgctggaactgcttggcgaacgcggccttggcggcctgatctgccagctctccatacgagtcggcgtaagccttgacgcgctgcgcaatttggcgggatgtgagccattgcgggaacgcggatgacaacacagccagtacgtccagctcgtgcttgccccatttgtcggaaaaacgccgacgtccgcttgtgccctctgccattagtcctcacgtatagttattgtttcgttataagtgcgtatgagtttccccacactcactctatcttagaggctttttccacagttgagcgccatttcacaaaaataatatcttttttatcgttcgaccgtgttgtaaatcacacccaatcgtccggttcgatgccttgcgggccaacgtattcgccgttcggcacgtagctcggctcacccttatcttcaagtttggcgtcggcgaacatcatgacgtcacgtccgaatgtccagtcgccctgaatggaaaccgagttggctgcggccaaagatggcacggcgtaggggaaccgttcgtcgaaatcgcggatgttcttgtagtatcgcggatcaagttcgacgttcgggaagatgtaattgccgtcttccatctcatacgtgtccgtcaggtggaagcgatcggaacgcataatgaacaaatcattggtggttttcaccggaaggaagcgcatacgatccacttggacgcagatagaaccgttgaacagaccgattgcggcacccatggcggtttccagctgaatcacctgttcggagttcgggtccgtgggattcacggtctttttgttacgaatcaccggcaacggcaacacaccatcgcattcggcgagcttgtctttcaaagcgtcgatgcgaatccagatcgagttggtgttgaagtaaggatgcttggcgatgtcttgggccgcttccttatcatccggatggacctggctcatttcacgcagtatcaggcgaccagtggccttgtctcgcgcgatatggcctcccttgcgatcggccttggtgcggatagccacttcggccatgaacggggcacctgtgttttcgaagtgctgggccaacgtacgcgaggggcgtgcaccgagattgtcggaattggagatgaacaggtacttgaagccgcgctcctccaatacgtcaagcaggccggactcccagatggtggagaacaggtcgccgtggccgggcgggcaccattccagctccgggttcatggggtagctcaccggttcgccggtggcggccacgagcttgggttcctgatgctggatgatttccatcggcacgtcatgctggctgaacttgcgatgatgcttgagcgccttcatcgtgtccgccgaagtgcggaaagaattcatgaacgtcagcggcagttcgacgttcaggcgggtgcgagcggtaagcacctgaccgatgatgatgtcgatgaagcgcatctgcttggccttgtgcctacgcaccggcaacagcgacttggccttgtccaatcccatggaggtgcccagaccgccattgagcttgaggaatgcggtcttggcgaaggcgtccacggccttgtcgtggttgatggtctcatagacgtcgtggaagctgggcacgtggccaagcggctcgatgtcgtcctcacgaatccagctggaggcttcttcatggcgccatacgtcatacaaatggcggaactggttgatggcggtttcgctcatgccgtgctcgcgcatcttggcggccgaaagctcgaaagtctcatccacttcgggggtgtttacggtttcttcggggatatccgaggtgacggcgtcggtgtcgtcagcggcggcgatatccagttgggccttatcgtttatttcggtcaattcgggtccctttcatcaaatcaataggaatcagtctagcccctgtttggggcaaacacatacgacgggggggcggaggcggtgaattgtcggtgataattccaataacacgccaagatgaagtccgtgtttaatccattacgaatggcttacaaaggtaagtccgtcgtcatgttgtctcatgttgtctgaaaacggaaaagccccggaaggcaaccactcagaagtggcggaattccggggctaatcggtcgggctggcgggatttgaacccgcgaccccttgacccccagtcaagtgcgctaccaaactgcgctacggcccgatggtgcaaaagcaccgagtagataatctaccagatatatgaaatctggcaaattacgcgcgtgtcacttccgcttcttcttctcgcggatgttcacggagatctgaatcggcgtgccttcgaagccgaattcctcgcgcagggagcgttcgatgtagcggcggtagccgtgctcgaggaagccggtggcgaagatcacgaaacgcggcgggcgcgtggacgcctgcgtggcgaagaggattcgcggctgcttgccaccacgcaacgggtgcgggtgggcggcctggatcttgccgaggaaggcgttgagtttgcctgtaggaatacgctgatcccaggattccaaggccttatccatggctcgcgtcagacggttggtgtgccagccggtcttggcggacaggttcacacgctcggcccacatcacacggtcgaattcggtgttccacaggcgttcgagacgctgcttgtcgaactcgtccatcgcatcccacttgttgaacacgagcacgatcgctcggccggcatccacggcggtggacatgaccttcagatcctggtcggacaccggctgcgaggcgtcgaacaggatcagcgccagttcgcatcgttcgatggcagcctgcgtgcgcagagaggaataatattccgcgcccgtgagcttgtgctggcgtcgcttgatgccggcggtgtcgatgaacagccagtcctcgccatcgatgttgacgatttcgtcgacggggtcgcgcgtagtgccggccaaatcgttgacaacggcacgttcttcgcgcgccagctgattgagcagagacgacttgcccacgttcggacggcccaccagagccacgcggcgcaggccggaaggcgtgaggtagccggaagtcttctcggcctgcttgagcttgtcgagcgcaacgtccagcaggtcgcccactcccctgccgtgcatggcggaaatcgagtatggttcgccgaggccgagtttccagaattcggcggcaaggtattcgctggcctggtcgtcgatcttgttgacggccagcacgacaggcttgccggcggcacgcagcatcttgacgatgcgctcatcggtggtggtcatgcccacttgcccatcgaccacgaataccacggcatcggccaaggtcacggcaatctgtgcctgtgaggcgatggcggattcaatgccttccacgtcggcttcccagcctcctgtgtccaccagcttgaagtcggtgccggcccattccgcgtcatagctcacacggtctcgtgtaacgcccggcgtgtcttccacaacggcggcacggcggccgaggatacggttgaccagggatgatttgcccacgttcggacggcctacaacagccagcacgcccactggcttgggaccggccttgcgcgcgccttccgtgaaaccacggccggaaatcagatcctcatcgccttcgtccagctcatagccttcgagattggcggcatactgctcgtattcttggttctcgatggcgtcctcgaccacaccgatgagcagatcgagcgtgtgggcgaagtccagatcggaattgtcgatggtggtaacgccatcggcggcggtcaggaagctggtgaccttggaatcggccttgtcgcgcgcggccacatcctcagcgcccacgcccttgacagcctggccggtgcgacgggcctgacggacctcctcacgggcggtcagcagcacgcgcacctcggcgtccggggacaccacggtggtgatatcgcggccctcggccacgatgcccaaccccccggagaaggagtcggccgacgcctcgcgggcgatgtaggcgcgctgggcggcgatgagcacgttgcgcaccgggatgacgttcgacaccttggagacatggctggagacttcggaggaacgaatggcctcggagatgtcctcgtcgtcggcgaatacgcaggggttgtccgggtccacggagatatcgaaatggtcgccggtgaagaactcgcccaccgcttcggtgatgacacgctcatccacggtttcggcgtccagatcgatgccctgcttcaggcaccaccaagcgcaggcacgatacatcgcgcccgtgtcaaggtaggcgtatccgaaatacttggccagcgccttggacgtggacgacttgcccacgccggcggggccgtcgatggcaacgcgaatcacaggccaacctccttggacagcgaacggacttccgtctgggacagcacgcggtaggaaccgggcttcagatcaccgagtttgatcgggccgatctgggtgcgcaccaagcgcttgaccgggaagccgattgagccgaagatacggcgcacgatgcggttcttgccggagtgcagcacgaccttgaccatcgtgtggtcgcgtgaggagtcgatgatcgcgcagtggtcgagcttgatccagccgtcgtcgagctgtacgccggtggtcacgagtcgacggcatacggtgccggagatcttgccttccagtgtggcgacgtaggtcttttcgacctcgtacttggggtgcatgacgtgctgcgagagttcgccgtcgttcgtcatgaggataagaccctcggaatcgtagtcgagacggcccatgtggaagatgcgctcgtacttgtcgcccacgatgtcgcgcaacgtgtagcggcccttcgggtcgtccatggcggagagcaccttgcggggcttgttcagtgccagagtgacgtggttcggattgacgcgtacgcgcgaaccgtctacgcgcacctgctgcttatgggggtcgacgcgagttccgagctcggtgaccagttcaccgtcgacctcgacacggccttcggtgatcatgtcctcgcacttgcggcgggaaccgaatcccgcttgggcaagcagcttctggagtcgaatggaattggaatcgtcttgcgctttcgcagcgcgggaatatgcgtttggcatcgttctcccaacgtggccggacagactctgtcatcgcagagactgtcgatttgtatacatacttcagagttggcggactggaatcccagccaattccaacctatatatcataccgcaacgtaggactgctgctagactggcaaccgtttgtgcgggttcgcccgtcttccaacagatgaaaaggaatgaacaatcatggaagaaaccaagcaacagccgctggccctgcgcgtgtgcgccgaattggccggcagcttcctgctgtgctttgccatttacgccttctccacatggggttcggccgtgtatggcatcaatatcgtgttcttcgcgttggctaccggcttggcatatgccgcagtcaccgccatcttctcccgcgtgtccggtggccagctgaatccggccatcaccgtagcctccgtgctggtttccaagacgaaaatcctggatggcatcctctatgtgatcgctcaggtcatcggtgccatcgccgccggcttcgccgtggtcaagctgctgcccacatccgagcaggtagctgccaaagtgtggctgactccggccattaacggtttcgagaacggctccgtgtcttactcgctgctgacccagtatggcattacgttctcgattacgctggcgattgtcgtcgaggtcgttgcctctctgattgtcgttgccaccgccatgtcttctctgggtgatcacggcgagtcctcggaccgtcatgtcattgccatgggtcttgcctatggtctggccgccgccatcagctacccggttaccggtgccggtctcaatcccgcccgttccaccggtatcgcactggccgcgatgaatgagggtcttacgcaaaatccgctgcaacagctgtgggtgttctggattagcccggtcttggccgccgctgtggtggcgttggtcatgatcatcgcgcagatgatgaccactcccaaagtgccggctgccgccgatcttccacagacggatgccgatgcgaacgcggacacgctcgacgatggcgaattcttcgatcaggccgcctcgtctgatggcgattcagcggaaaaagatgttgccgaagagtccaaagaagctgaagtaggtaatcagcaggccgattcccaaggcgatgccgatgaaggagtcgaacgccactgagcgcactttccatgggcttttgtcctgaagaatcaggcgaacaagcccggtgatgatggccgtcacggcaagtatgaccgtggcggccatcgtatatccgaaagcaaccagcagtgtgatgacggcgacgacgccgagtacgcaccattcaaaccatggcttgccctcatgcgcttcggatacatagggatggttgtgcatgttgcgattccttctgtcgaacggttacatgaccacaatagcaggcgaatagcaaaggtgggattccgcttggacccgttgacgggtcaggcggaatcccacctttgtgcgttttggctgagctgttcccctcagagagtcccgatcagtggaagaagtggcgggtgccggtgaggtacatggtcacgccggccttcttggccgcttcgatgacctcctcatcgcggatggatccgccgggctgcacgatggccttgacgcccgcgtcgataagcacctgggcaccatcggcgaacgggaagaacgcatcggatgccgcgaccgcaccggtggcgcgatcggcaccatcggccagcgtgttggcgcgctcgacggccagatggcaggagtccacgcggttgacctggcccatgccgatgccgaccgtggcctggtcgtgggccagcaggatggcgttggacttcacgcagcggattgcacgccatgcgaacacgaggtccttcagcgtgtcggcgtcggcggcatcgccggccacgagcttccaggcgtccggatcgtcgccgacggcgttgatcagatcggtgtcctgcacaagcaggccgccatcgatctggcggatggcctcgtggcccttcggtggctcggccaccttgaggatgcgcaggttcttcttcttggtctgcagcagttcgagcgcggccggctcatagtcgggggcgacgatgacttcggtgaaaatcgggcgcacgctttcggccatctcaagagtgaccttggagttgcaggcgatcacaccgccgtaggcgctcatcgggtcgcaggcgtgagccttcttgtgggcctcggccgcggtcgcgccgatggccagaccgcacggattgttgtgcttgactacggccacggcaatggcgggagccatatcccatacggtgcgccaggcggcgtccgcgtccacgtagttgttgtagctcatcggcttgccgccgagctgctcggcgtgggcgaaaccggtctggttgagcgggtcattgtagagggcggcctgctggtgggagttctcaccgtagcgcagggtgtgcgcacgatcccaggtgcgggtgaactgggccgggaacttggcggaatcgacttcagtgccctgatcgtccttgtccacctcgacggcgtccagagaggccggcttgggccagtgcttggcggtccactcgttgatggtggcgtcataggcggcggtgtgcgcgaaggccttggctgcaagccacttgcgctcgtcgagggagaagccggtgccatcggccacgcgggaggcgaccagtgcataatcggccgggtcggtgacgatggccacggtggcgtggttcttggccgcgccgcgcaccatggaggggccgccgatgtcgatcttctcgatggtatcggcctcgttggcgccggagcgcacggtgtcggcgaacgggtacaggttgacgaccaccaagtcgaacggcttgatgccgaactcctcgagctgcttggcatgctcggggttggtcatatcagccagaatgccggcgtgaatgtacggatgcagcgtcttgacgcggccgtcgaggcattcggggaatccggtgacatcggacacctcggttaccttgacgcccagttcggcgagcttcctggcggtcgaaccggtggaaacgacttcggtgccggccttcacgaacgcttccgcgagtacttcgatgccttccttatgaaagaccgagaccagtgcccgacggatcggtcggttcgtgtttgtcatcctgttcctccttggattcttgtggttgtgacgccagggaccgcgcctgacggacgatgacggtcttcggggtcgcggcggtggtgcgggaatcattgatcctcccaaccaaccagcctatcgaaaaaacgagcgctgtgccaatcagcgcgagcagccatgccgcggtaaatcccaatgcggtcgaatgaccgacgactctggtggaggccatgacgtcgacgccaatgtgagcgagacgatgatcgccaagcgatccattggacagagcgaacagcaatgtggatgcaagtgagatcagcatcgcgctcaggcagaatgacccggcggagtagatcagcgaaaccagtactgggccgcgggtggacgcattccgtatattcaacggtctgcaggcgaatccttgcggcaggaatacagccagcaggcccacgagcgcagcgatggcgagaggcgcgttcaaggcaacggtacgccatagttcgctgctgaccggttcgggcagaataccgaatatcggtattgcaggaagctctttggattggccgagccataacgtgaaactggccaaatcaccgatggcgaatccgccgccgaagagccaggaaacagcccagagcatgacgttgggtagccagatcagcatggcgacggtggtgagaattcgtgaaccggtttccatcccggacaattcgaacaacgatacgacagcggcatggttacgtaccgaccatacgatgacggtaatcaatccaattgccaggtatatgcccagtatcgcgacggccaagacgacgccgattttcaggcagtggcgtatgtccgccggcacctgcttgcgagtccagtccctgaatgctcgcatcttggctgattccggtacggctgcgcataggaaaccgatcgagaatacgatggctgctttcagcaacaccagccactggtcatcgacaagacctaggtgtacggattgccggaatgcctcgttcaacccgagccaaacattcaatccggcaacatacgcatgcggcccgtatgctttgattcgcatggtgagtgcattgatcagccatatcagcagtatggtcaacatcaatggcgtgatggtgagggtgaacgaatcggttctagagcccgatccctcactcagaagcacaacggcctgtgtcagcgaggttgtgccgacggtgagattgtcgccgccctcttccatggagacaaccaataacatcagcgctgtatagcaacctaatgcaacggcatagatggccatggatgcgagggcgactatggctccccgcacccattggcgaatcacggctttcatcacgattggttggaaccgatcagtcgatgttggccttggcgagtatgtcgcgcatgatttcagcggcctggcccggggtcttgcccacggggatacccgccgcttcgagcgcgttcttcttgtcctgggcggtgcccttgcctccggagacgatggcgccggcgtggcccatctgcttgccttcgggggcggtgaaaccggcgatgtaggcgacaaccggcttggtcatgtgctccttggcccatgcggcggcgtcctgttcggcgaagccgccgatctcgccgatcatcatgacagccttggtgtcggggtcggcttcgaatgcctgcagggcttccagcagcgtcgtgccgacgatcggatcgccgccggcgccgagacatgcggtgaagccgatatcggacagttcgcccatgagctggtaggtgagggtgccggatttggagaccagtccgagcgggccgcggccgacgatgccgtcggggatgatgcccaagttgacgccagggttgccgagcgtgatgaaaccggggcagttcggtccgatgatgcgcacgcccttcttgagcgccagttcgacgaagtatgcggaatcggccaccggaatgccttcagtgatgaccacgatgagttcgatgccggcttcgacggcttcgaccacggcggacttggcgaacttcggcggcacgaacaccacgctggccttggctccggtggcttcacgtgcttcgccgcaggtggcgaacacggggatgtccacgtcggcaccgttcttggcaccggggaaggtgacggatgtgccggccttgcgcgggttcacgccgccgacgatattggtgccggccttgagcatgcgagccgtgtgggtcatgccctgatggccggtcatgccctggacgataacgggagcgccgtcttcgatgaacagcatcagcgaacctccttggactgggtcgcctcaccggcgagctgcgcggccttggctgccgcgccttccatggtttcggacacatggatattcggattgttggcggaagcgaggatatgcagaccctcggcggcggcgttgccatcgaaacgcacgacgatcggcttggaaccgccgagcttggcgaccgcttcgaggatgccgttggcgacttccacgcaggaggtgatgccgccatagacattgatgaacacggattcgacctgagggtcggacagtacgatctccaggctttcggccatgacggctgcggaggcgccgccgccgatgtccaggaagttggcgggcttgatgttggtgccctgttcctcgccagcgccggagacggcatccagggaactcatgacgagtcctgcgccgttgccgatcacaccgacctcgccgtgcaggtgcacgtagtgcaggccgtgttcgcgggcgcgctgttcgaaggggtcgggaacgatgagatccacgaaacgcgcccagccatcatggcggaaggaggcgttgtcatccaaggagatcttggcgtccaaggcgctcagctgcttggtggattcgtcatccgggtcgccgatcttggcgagcggattgatttccacgagcgtggcatcgttgtctttgaagcagcgccacatcttgagcagaatctgtgcggcctgatcgacgtccgcgtggtagaagccgatgctctgtgccatttcggtggcagcggccaggtcgaagtcgccgagcgcatcgatgtgcaggcgcttgacggcctccggatgttccttggcgatttcctcgacttcggtgccgccgttggcggtggccagcacgtcgaagtcgcgcgaggtgcggtccacggagatggacacgtaatattcgtgcaggatgttcttggcttcggccacaagcacgccggaaaccttgtgcccgtggatggtcatcggcaggatggactcggattcaagaatcgcctcgtcgcggttatgggcgatcttgacgccgccggcctgaccacgatgaccgatcttgacctgcgccttgattacgcagggatagccgattttgtccgccgcttcggcgacttcatgggagttctgggcaaagatggcgtccggggtgggaatgtcctgttcctcgagcagctgacgcgcctggtattcgtaaagatccatcgatccttccctgactatgtaattggtccggcatataactgtacacagtacatgccggaccttgaaaactaactgtacgttgggtgagacggaatctcaggccggcatcgcgatcagcgagctgctgggcttgccgccgagcttatccagaccgtcgagaccatcgagccgcatcacaaaactgaagcccaccacagtgccgcccgccttttcgataaggtcggcgccggctttggcggtgccgcctgtggcgatgagatcatcgacaatgagcactcgctcccccgcctgtacggcgtcggtttcgatttcgacgctggccgtgccgtattcgaggtcataggattcaccgatggtttcgggcggcaatttaccggccttgcgcacggcgatgaaacccttgcccagatgggcggccatggccgggccgaacaggaacccgcgcgattcgagaccggcaatggagtcgaattcgctcggggacaccggcagagccgtttcaagcgccttgagcagaatcttcaagcccttggggtcggcgagcactggcatgaaatcacggaagataatgccttccttgggaaaccccggtatggaacgcaccaaggacaccagatattcggcgtcctgttgccctaccttgctcaatgcgtcgatggtgatgtccgactgtgccatagtgctcgccccttttatgcctttgcgatgcgatactcggatggtgctaccgaatcgaacagcttacttcgtcttggtttcgttgtcgtcaccggtctcgtcagcggtgtcttcctcggacacgacggacgcctcgatcggaacctgaccagcctcatcgttagccggagcctcggtgtcttcgtcgggcagcgggttgccgttctcgtcgacctcatcatcggacacataggccgggcgggtgtactcacgggcgatggcgttgaagccgaaacgcagcttggagccttcggagtcgatgacgatctcctcatactgctcgtcgacttcgacgaccttgccgatcacctggccgatggtgatgacctcggtgccgggctgcaggttgcgacggaagtcctgcttctcctgctgttgctgcttggccttcttggactgccaccacatcatgccgccgaacacgacgacgatcacgatgagcataatgtactgttgttccacgaaacaactccttcaaacgagcgacattgacgaaacgccgccaagtgtgcaaacaggagaaagtctagaagagcttgctgacatcatctttgggcgtaattcccaaatgctgccatgccttctcggtagccacgcggcctttgggcgtgcgaatcataaaaccttcgcgcacaagatacggctcgcacacggtttccacggtttccgattcctcgcccaccatggccgccagattgttcaggcccacgggtccaccgttgaagttgcgcacgatggcattgagcacggcgatgtccagccggtcgaggccttcggagtcgatctggtacagggccagcgcctccttgacgtcgtccggccgcaccacgatcaggtcgtggacgatggcccagtcgcgtacacggcgtaacaatcggttggcgatacgcggcgtgccgcgcgaacgcaacgcaagctcatgagcggaacccgcatcaaggtttacgcccagtacgttggccgaacgttcgatgagcttttccaactcctcatgcggatagaagtcgagatgtgcggtgaagccaaagcgtgcgcgcaacgggcttggcagcataccttcgcgcgtggtggcaccgatgacggtgaatcgcggcagggtcagcgggatggagcttgcgcccgggcctttgccgaccatcacatcgacgcggaagtcctccatcgcgatatacagcagctcttcggcggcgcgcggcagacgatggatctcgtcgatgaacagcacttcgccgacgtcgagggagctcagaatcgaagcaagatcaccggcatgttgaaccgcagggccggaagtcacgcgaatcggcacttcaagctcattggcaacgatcatggccaacgtggttttgcccaagccaggagggccggcaagcagaatatggtccggtggcacatcgcgtttgcgggccgcgtccaggaacagttgcagctgggccttgagccgtggctgtccgataaagccttcgagaacatgggggcgcagctcctcgtcgctgaccggctcgttgccgatcggctgggaggagaccatgcgcaacgactcttcgttggcaccggtgtttgaggtaccgtaatccgttgtctcgctcatcagcggcccctatccatcagcgccaaagccagacgtagcacacgcggcacatcgtcggtggcaagcggcgtgggaatatcgttttcggcgcaagcctcggcaacggcctgctgggcgtcctgctgacgccagccaagtgaaatcagtccttcgacaacctgttccgtaccggtatccactggagacttggatattgccgcctgagcggaagcaccctcgatctgactcaaatcaatagagcccttaagctcgaggatgattttctgtgcgcccttcttgcccagccccggagccttggccagcgcggtggcgtcgttgtcggcgatggcgtgggccagctgactcggcgtcagtgtggagagtaacgattgggccactttaggtccaatgccggagaccttgatgagttgcagaaaggttttcttggcgtcccgatccaggaatccatgcagggtaatggcatcctgagagaggttcatataggtgaagacgcgggtgtcttgcccggcgtgcagacggctcaggtcggtggcggacatgcgcacttcgtagcccactcccccaacatcaatcaatgcggtatcggtttcgaccgattcaacccgcccggtcagcatgccgatcatacaggtactccttcagggctccaggattcaagactcgaacaactgttcgaaagtatactacatgcctcggtcgtggttgatgcggcggcgcgtggatttctgtgcggcctcagcccactggcgttgcgcggcggtcagatgttgttcgcgttcgccgccctgcaatgcgcctgccgggcgcagcgcatggcaaatggccaaagccaaggcatcggcggcatcggcgggagtcggcattttggtgaggttcaaaatacgtgtcaccatacgctccacctgaatcttctgcgcctgcccgttaccggtgatagccagcttggcttcggtaggcgtatgcaacgccacgggaatattgcgttgcgcggcggcgagcatggcgaggccggcggcctgtgcggtaccgagtacggtgttgcggttggattgtgcgaacactcgttcgatggatacggcatcgggtgcgaagcgatccattttctcggacaggccgttgtagatggccagtagacgcagatcctgggtgatatccggtgaggaccgcaccacgtccacgtgaataaacgaaagccggcggtgctcgccggcttcgatcacgccgaccccgcaacgtgtgagcccggggtcgacgccaaggataatcacgaggattactcctcgtcgagctgggccatcacctcgtcggaagcggtccagttggagtagatgttctgcacatcgtcgaggtcatcgaggttgtcgatgagcttggacaccttgcgggcatcgtcgaggctcaactcgacctcgttcttcggctgcatgacctggtcggcggaatcgtagtcgaagccggcgtcctgcagagccttgcgcacggtgaacaggtcggacggaccggtcacaacggtgaacacctcaccgtcatcggtaacgtcctcggcaccggcttcggcggcggtttcgaacagcttgtcgaagtccacgccctcggacggcaccacgatctggcccttgcgctcgaagttgaaggacacggagccggaggtggccagggagccgttgcccttggtcagggtggaacggacttcggcggccgcacggttgcggttgtcggtaaggcattcgatgatgaggccaacgccggcaggagcgtagccctcgtagacgatgtcttcgtagttggcggcgccgtcttcagcaccggcaccacgcttgacggcacgagcgatgttgtcggccggcatggaggccttcttggccttgtagatggcatcgtacagggacgggttgccgtccgggtcgccaccgccgaggcgggcggcgatttcgatgttcttgatgagcttggcgaagagcttgccgcgcttggcgtcgatggcggccttcttgtgcttggtggtcgcccacttggaatgacctgacataatgctcctagca

SEQ ID NO: 3853 - DNA, 19436 bp, Unknown
  R35_2m  MAG No. k141_13975
gtcccattccgaacccggaagctaaggcctggcacggcgatggtactgcacccgacagggtgtgggagagtagcacgccgccgcaccacacgtacaggaagccccgatacccctcaaaggtaccggggcttcccgcatatcaggacacttgcgcgtgggggggggtatctcgcgtccttgggccccggcaggagtatcccgtcggggcccagtgcgttttgggcggcaacccgctgaatacccggtaagatgtctgaggtatcaacaaacaggtcaggaggtgacgcgcatggtggcgccaagccgtgatgaccgtagcgtagatgcattggtgaaatccaaggcagtacttgatgtattggcggaactgggaccaagcaccgcaaaaaccataagcgaacgtactggtgaacccgtaagctcaacgtatcgtttgctggataatctcgtcgcagtcggttgggtggaacggggcatcaatcgtggcgagtatcggcttggcatcgattgcgtacgtatcggcggccaaatcgaaagcagactggacattcagcagatcgctcgccgtactttccgcgcccatcacggccagttcggcatctggggtctgttcgttcggaggcgattgcgcacggtgtgcatcgagacacgcacccgtgagacattgcaaagctatgcacagctggtgggcaatagcttgcctctgagcatgagcgctccctctcatgtactgacggcctggcttcccccggctcgctacgagcagctgttggaacactatgcctataccaacgagctcggcggcacattctccacgatgcgtgccacagcaatgggacaggctcgtcatatacgcgaatgcggcttcacctatgacgtcggccagaccatggccggctccgtgactatcagcgtaccggtattcaatcacgccggagagattcaagcggcaatcgccctgagtggcctttcccgctccttggaacctgagctggcctgtctggtagatgggcaaccggcaacggcatcggctcaagacatggtgcgattggtgcagactgccggccgtgaggtgtcgcgaggccttggatacagtggtgatcatcttggcctgaacagttgaatatgatgagtcagggataagtcaggggaaggaacgtcgacgatggcggaagacaaacgtgaaccgacccgcgctttagacaaggcgagtcgtgtgatggacgcattggcggcggagaatggcctgtcgccggcagatatcgccgacgcctgtgatatcccgcgatcctccgtataccgcgtgctggatggactggtcgatgtggggtgggccgtaacggatacggatggtaactactcattatcactggactggctgcgattggctgatgccgctcgcacgtctcgtaccgaatggcagcctgcgattgcggtcatgcatgccatcaccgcgcaaaccggcatgacctcattcctcagtgtggtctccggcactgaattggtatgcgtggaatgtgcgcaaggtcatgccatcgattcgctgatcctgcgcccgggccgcgtgctgcctctgcatgctggcgcggccggccgcgtggccttggcgtatttcgaggatgccgatgtcgaacgctatcttgcaggagcgccgtttccggcatataacgagaacacgctggtcagtgtggaacagttgcgcgaggatattcgcttgactcgcgaacgtggatatgcactgtcggatgaggatgtgacgttgggtgtcggtgccgtcggtgtaccgattgtggacaacgagtccggtcgcgtgatcgccagcctgtccgccggtggattcgtggacgaagtgttagccactcaagaatccttggccgcgttactgcgcgatggcgtacgcgaaattcaggcagcctgattcggcccgctaggctgtcgggctggacggttatgtccggtcagctatggcctttgccggctacggttctgctggttatgcttctgcccgactacgctgcggtccgttacgcttcggccacacgacccaacgcgatggcggtgatcagcacgtacgcctcgcgcgggtcggtggcatcccagccggtggattcggcggcgcgcttcaaacggtagcggatcgtattgggatgtacgttgagctccttggccgtggtttcgagcgaaccaccgaacttcaggaatgtggagacggtgagcagcgtcggatcatccgggcctgctgctgtcaggcttccgtagaccacgcggaccagttcgtcacgggcgtccgcgtcgccgatcaacgcacgttcgggcagggcgtcgtcggtgcgtaacgggcgcggcaatggctgcacggtggcggccagagccggcgcggcctgaagacagtagagtgtggcctgaatcgaacgcatcgcgccatcggcaccggtgcgctgcggacccaaggcgattggccgatcggcggcgaacgacggggcgatggtattgcagatgatttccggcgtggccgcaccgaccggacgaatcaacgccactacggcggtgctgttgccgatcgggcgcttggcggtcagacacacaccgccgaaatcggccacgattttctcgatttccttggccgtacgtgcggcggaccgggcagggtatccggcgatggtgtaacaatcgaagtcatgctcgaaaccgaggatggtgaacagggactccactcgttcgtcggccagatgattgaacaggcactcgaacagcacggtgcgtacgcggttggtcgcggtgatgccgggtgcggccgaatcggatgaatcgggtgcacccggtataccggatgcaccggacgaatcggcaacgtcggcagcaagaagttcgagaaaatctgacatagtcactagtgtagcgtcgctgattggcgttgcctttcagccaaagactctcgccaatacgtcagcaccacgaatccgaatacaaacgcaaccggcaacatgtgccgctcgaaattattggccggcgcggtaatcatcacgcccatcagcagtagcagcggaatatgggtcatgagggtgagccaacgtcggcgaatcacctcggccgcgccgatcagcaatgtcatcaccacgtagaaattgccgtgcgtaggccagccgagcacgggaatactgccccatacgcgagtgaagccggcgatgtgctcacgccagtcatggttgtaatccttgatccatgtggagtttttctgcacgtaatcgctggccacgtaataatccatcgatacgtacggctgatcgttcacattgaagtatccgaagcatttggccagcaacgcatccagcgcgatgatcggattgtccttgacgatttcgaaccatgccttgttgaaattggtcatatcctcgggcgtcaccgtgcgccacttgtagctgaccttcttggcctgaataccggaggatttcaccgggtcggcatcctgctgggagtaagcgtcggccatctgatcgagattgaagacgggcgcgaggttctttttggcttcgtctgaaataccgtccggattgcgctgagccacgcgggcgatcatttgcagctgtacgccgcggctttcgattggatcgccgccgatgatcgcaccagaggagatggcgaaggagatgccgccgtgaatcagtacggtggggatgagcagcgccacgacgtaagtcgcccagcgtttgcggtcggcgatcagagccagcacgatttgcagagcgatgatgtaccacgcatatttcgcggaaatcagcatcaccgacgtggccaggatgaaggcgatgaagctgtggcacggcaagtggacgggcgtggcgatggcaggggtctgaggatgtttgcgggtgccggcggggtgccaggtctggacgagttcataccagacgctgaaccaccagacgaacgagaacgcgaacagcggcgatttggtgatggagatagtggaaaacacggccagcgggcagaccatgaagaacagcagaatcaggaatctggccaatcctccggcctgtgggggaacggcggaatccgttgccgtttttcctatccaaggccggttcaggaatcgattggcggcggcagcgcagcagaacacggcgaacagcgtctgcagggcagccaacgtcacgatgccggcatcgtttgagccggtcagatgcctcgcaaacgtgactatcgcgccatagaacacagtgagtaccacattgtgctggtcggtcagatacgtgggatcggacggccacatgtagtgcgcggtggggtagatgtccatcggcacgaaggagaagaagccgatatagggctgtttcaggccggtccactggttccaggcccagctgaattcgcggatctgtgagcggaggtccgcgccgaatgcggccagcagagtggtcggcacccaaagccagccgacaaaaaacaccagcataagcttccagaaccggttcgtgccgcgtgtgatccagcggtccagaacagtgacggtggacgtgacgatagcgcgaacggtacgacgggtcttggctggttggctggcctgctgatcggcggcgggccgtgatgtttcgctattctgctgatggtggcgtaggcgctcgccgatggtcttcggcagtatgcgctggcctgctgcgaatcgcgccatcagcgtgatgattccgagatatatcaggaacgacacgacgaatattgcggtattggcccagttccaatgggcgagggtgccgttctcctcgtcccggtacagcgggccgaccgccgagcacagtgcaagccacaggcaggccagcacggccagtgtccagcgcgcggcagcgcccacgcgcgcaagatgcgggtgggactggcggctggatacggcggcaagcttcgcggtggctggtgacgtcatgacaatatatggtagccgcacaggtcaacggttgatattcgatgtctgccgggcatcgccattgttcgcaagccaatacgacggccggatgcatgtgtgggctcggcgaatgcggaatttccgaagttgtgaacgctaacacgggctgtccggcccaaaatggttgattttgtgcgcttttccgtggaatatcgcgggcaaaaaacggcgcaaccgaggtaacgtagtgtccatgatgattgcattgaaagctgcaacgccgcagctacccagaactacagccgtcgcggatcatgtggtcgccgtggacgaaaccgattcgaccaacgcgctggccgcgcagatgatcggcgacgggtcgttgacgctgcccgaccaccaggatggcgaactggcggtggccgtggtggccgccgaccggcagaccgccggccgtggccgcaatggtcacaagtggatcagtcagcccggccgttgctcgacgatgtcctatgccgtgcgcattccgcgcgcgatcgccaccgacgaatccgtcaatggctggctgcagatgatcgccggactggtcacgctggatgccctgaacggcatgatcgaggaatacggtgccgcgccgaaccagccggactgcttgctggaactcaaatggccgaacgacgtgttctgccacgggctcaagctgggcgggctgctctcggaactggtgattccgccgtcgtccggtactgatgctgatgccgatgacgacgtcgtcatcgtgttcggcgtaggcctgaatctggcgctgggtgcctgttggctgcccacgccgcagtcgacttcgctgcagctgcatgtcacgggcttgccgtcgtttggcgagatgcgcgatgcggtggccgaacgtcaggtcgagggcttccgtgaacgactggcgaagttcatcgccgacccgaagggccaggccgagtcgttgcgcgaggaaatgaaggcggtgtgctgggcgcgcggccgtcaggtcgaggcgcatttcacggacggcaccacgctgaccggcgaagccatcggcctcaacgaagacgcctcactgatcctgagaacacaagacggcacggaccatacggtccgcaccgccgatgtgggagtgctgtaatagccggccagtagctagctagtagctcaggtcagcgaccgagcttggacaggccggcggcggccagagaggccaccacggccttgatggcgtcgccgacgacgaagcccatggaggccagggccacggcggcgagcggcgcaccggtcaacgcggactggatgatgaagccgaaggcgtacaccaccacgacgccgccgaccagcgcggccagcaggtagcggcccgcggtgcgcgcggcggccgcgaaggacgaagtgtcggacttgccgcgcagcagggcgatgaccaccacacccggcaggaagccgaagaggaagccggcgctcgggccgaccagggccagcgtggaggtgccgccggcgaacaccggcaggccgaccgcaccggccgccagataggtggcgacggcggcaccggcctgacgccacggcagcatgagaccggcgagcatcaccacgaacgtctgcagcgtgatcggcaccggcgtgcccggaatcggaatctcgccggcggccgcggacagccacatcagcacggcgaacagcaccggcttccaggatgcggcgacgatacgacgggcgagcggcgtggtggccgctgcggatgcggtggtgtgtgaagtctgcatatcaataacccctatgttgtgtgatatcgccgtgaacggcgggcggtatgcgatggatgaggggaggttccggcgggccgtgcggtatccccgacagcccgaaccgtccatatggtggacggtcccaaatgaatccggccctgtgcgggcgaatcgtgcggcgatggaccgatgccggtccggtcgccttccgttcgcccgcagatgagccttcccccgaacttacggttgccatcgtagaggtgttcgatttcgtgcggtttcgtaccaacttacaaaattgtcgatttcgatttgtcataagttgacgaacgcaaccgtaacgtcaacttcttgaaccggcgcgcaaggatgtgcaatcggcggatttgcaacgtttttgatagccggcgccaacggttacgttgccggaacctacgcgcgcgtttgttcgtagcctacaaaagggcgtgaaagcttttgtgcgaacgcggcttgccctctcctttatatggagagcacaatttgacactatggctcatactgtcaaaaaactgctgattgcgaaccgaggtgagatcgctctgcgcgtggtgcgcacggccaaggagatgggtatctccaccgtggccgtctactccgaacaggaccgcaatagccgctatgtggacatggccgacgaggcatacctgctctccggcgacacctacaaggacacgtacctcaacgaggatctgctgatcgacatcctgcgcaagaccggtgcggacgccgtgcaccccggctacggattcctttccgaagtgccgagcttcgcgcagaaggtcgaggatgccggtgccatctgggtgggtccgcatcacaccgcgctggtggatttgggcgacaagatcaccgcccgccgagtggccttgcgcgccaaagtgccgccggtgcctggcctgtccgaaccggtgaccgacgtgcgaacgctgctcgacttcgcacacacccacggctacccgatcatgatgaagcgcactgatggcggtggcggccacggcatcaccgtggtgcatgacgacgaggagctgcgccgcttctacatgaaccacgacgcgctgcaaggcggcgatctgaaggaatacttcatcgagaagttcgtggacaaggcacgccacgtcgagacccagtccgggcgcgactcgcacggcaacttcaccgtgtactccacccgtgactgctcgctgcagcgccgcaaccagaaactcgtggaagaggcgcccgcgcccttcctgtccgaggaaatcgtcagcacgctggaggaatactcccgccgcctgttcaccacggtcggctacgtgggcctcgggacctgcgaattcatggtgacaccgaacggcaaagtgtacttcctggaagtcaacccgcgtctgcaggtggagcacaccgtctccgaagaggtcagcggcctcgacctggtgcgcgaacagctcaatatcgccgccggtggcgagctcacccgcgcccccgaaccgcgcggccacagcttcgaactgcgcatcaccagcgaagacccggccaccaacctgacccccggctccggcaccttggagaagatccagtggccggccggccccggcgtgcgcatcgataccggtgtggaacagggcgacaccatctccccgaagttcgattcgatgatgggcaaggtcatcgtcactgcccagaaccgtctcgatgccgtggcccgtgtgcgccgcgtgctcgacgagctcgtgatcgaaggcgtgcccacgccgattccgctgttcaaggagatcttccgcaacgacgacttcaccgccgagcatggccatccgttcgccgtgtccaccaagtggctggagcgcacgtacctgaaccgcacaccggcttccgccgcctccggccagccggcctccttggccaccgccccgggtgccgctgccccggccgcgcccgacaagtccaagtcggagacgttcgtcatcgagatgaacaaccgccgcgtcaagctcaccgtgccactcgacatcgtggagaacatcaccggctcggcccgcgcccgcggtgccaagcgccccacccagccgttgcgcggcgcaggcttgcacaacgtggcctccggtgccgccacggccaacgacggtgccaaatccggcgtcatcgcctccccgatgcaggccgtggtcacgcgcatcaacgtgtccgaaggccagcaagtggccaagggcgaccttctggtggtgctcgaatccatgaagatggagaactacgtgtacgcgccggccgccggcgaagtgaagaagattttcgttggcccggccgatggcgtggaggccggcgacacgctggtcacgctggacgtgaacgccggcaaggccaaggccgccgacgccaagaaggagggcggcaatgactgacatcatggattcgccggccgtgaaggccgcggctgcggcctcggccgccaacgccgcccagccctcggcccaccagccgctgcgcaccgccgtggtcaaggccgccgaactggcccgcgccgccgaagagcgcgcccgcgacaagcagcacgccaaaggcaagaaaaccgcgcgcgaacgcctcgacctgctcttcgacaccggcacgttcgaggagatcggccgcttccagggcggcaacatcgccggcggcaacgccggtgcagctgtcatcaccggcttcggccaggtctacggccgcaaagtggccgtctacgcccaggacttctccgtcaagggcggcaccctcggcaccgccgaaggcgagaagatctgccgactgatggacatggctatcgacctcaaagtgccgatcgtggccatcgtggactccggcggcgcccgcatacaggagggcgtggccgctctgacccagtacggccgcatcttccgcaagacttgcgaggccagcggcttcgtgccccagctgagcctgattctcggcccctgcgccggcggtgccgtctactgcccggctctgacggacctcatcatcatgacccgtgagaactcgaacatgttcgtcaccgggccggacgtggtcaaggcctcgaccggcgagaccatctccatggccgaccttggtggcggcgaagtgcataaccgggtgtccggcgtggcccactacctcggcgaggacgaatccgacgccatcgactatgcgcgcaccgtgctcgcctacctgccgtccaacagcgaaagcaagccgccggtctacgcctacgccgtcacccgcgccgaacgcgagaccgccaagcgactcgccaccatcgtgcccgccaacgaacgtcagccctacgacatgctcgaagtgattcgttgcatcgtcgattacggcgaattcgtgcaggtgcaggaactgttcggcgcctccgcgctcgtcggcttcgcctgcatcgacggcaagccggtcggcatcgtggcgaaccagccgaacgtgctcgccggcatcctggacgtcgactcgtccgagaaggtcgcccgattcgtacgcctgtgcgacgcgttcaacctgcccgtggtcaccctcgtggatgtgcccggctacaagcccggctccgaccaggaacacgccggcatcatccgccgcggcgccaaggtgatctacgcctacgccaacgcgcaagtgccgatggtgaccgtggtgttgcgcaaggcgttcggcggcgcgtacatcgtgatgggctccaaagccatcggcgcggacctgaacttcgcgtggccctcctcccagatcgcggtgctcggcgcggccggcgcggtgaacatcatccaccgccacgacctggccaaggccaaagcctccgggcaggacgtcgatgcgctgcgggccaagtacatcaaggagtacgagaccagcaccgtcaacgcgaacctgtcgctggaaatcgggcagatcgacggcatgatcgaccccgaacagacccgtgaggtgatcgtcgaatcgctggccacgctcgccaccaagcggcgcgtcaagcgcaccaccaaacaccacggcaaccagcccctctgatttctgaagacatcaaccaaacacaagtaaggaaagcaatgaccaccttcttcctcaatcgcctggccaccgagccccatgcgctcgccttcgccggccagtccaccccgtggccggtagccctggcagaccagaccaccgatcccagccttgacgaggccctgcgcggccatatcgccgcagccaaccgactgctcaccccggtcgccgccgacctgctgaccaccaccggccgtccggtcgacctgttcggcttcactccgaacccggcccgcctcggcgccgcagccgacgccaccgcgtccgtggaaggcgtggcactgacccagctcggcgccctgctcgacctcgaacaccttggctacagcgtggcccaggccaagccgctcgccgtgctcggccactcccagggcgtgctcgccgtgcacatggcccgcgccatcgaggccgccggctccatcgaggccgccggcaagaccctcgacgagattctggccgtcgccgccctgatcggtgcagccggcactcgccgcgtgcgcgaactgggcctgaaccccaagtacggcgaagccagcccgatgctctccgtcaagggcgccacccgcgaacaggttgaggctctggtcaagcgcgtgaacaacgcccgaggcccgatctccatcgccgtcaccaactccgacaaccaccacgtgctttccggctacccggaagacctggcagcactcgccctcgaagccgagcgcgagcacaagcaccaggccaagctgcgtgaacagaagctccacggcggcaccgtgttcaacccgaccctcgaatacctcgaagtcaccctgcccttccactcgccgctcatggccgaagccgtcgagcggaccgtggcctgggccggcgcctgcggcttcgaccagaagcgcacccgtgcgcttgccgaggaagtgcttctgaaccatgtggactggaacgcccgcgtcaaggcgctgttcgacgccgccgacccgtccaagctgtggatcgtggacctcggccccggcaacacgctcggcaagctgatcggcaatgtggtgcaaggcaccggcatcggcgtggtcgaagccaccacgctggccgagcgctccacgctctccacgctggaaagcgagcctgagcgcacccagaactggaaggcattcgccccgcgcgtcatcaacaccccggccggcgccaagctggtcaccaagttctccaagctcaccggcaagccgccggtactgctgcccggcatgacccccaccaccgtggaaccggaaatcgtggccgccgcggccaacgccggctactgggccgagctcgccggcggcggccaggtgaccgccgaagtgttcgaccgccacatcgccgccctcgaagacgagctggaggaaggccgcacggtcgaattcaacgcgatgttcatggaccgttacctgtggaacctgcagttcggctcctcccgcatcgtgcccaagaagcgtgcttccggcgcgccgatcgacggcgtggtcgtctccgccggcatccccgagctggacgaagccgtggccctgatcgagtcgctgcaggcggacggtctgccgtacgtgagtttcaagcccggcaccgtggaccagattcgccaggtcgtgcgcatcgccaaggccgtgtcccccaccaccatcatggttcaggtcgagggcggtgaagccggcggccaccacagctgggaagcgctggacgacctgcttgccgccacctacgccgaagtgcgcgcctgcgacaacctcgtgctggtcgccggcggcggcatcggcacccccgaacgcgcggccgactacatttccggccagtgggcccacgcctacggcctgcccgacatgccggtcgacggcgtgcttatcggtaccgccgcgatgaccgccaaggaggctcacaccagccccgaagtcaagcagctgctcgtcaagacgcccggtattccggccgacgccaagtccgacgacgtgttcgccccgcaggccgcccactgggtgccgtccggcaagtccgtcggtggcatgtcctccggcctgagccacctgcacgccgacatttacgagctcgagaacgactccgccgaatgcggccgtctgctcgtgcgcgtcatgaagcaccccgaagagctcgactcccgccgcaaggaaatcatcgaagccctgaacaagaccgccaagcctaacttcggcgacctggcctccatgacctaccttgagtgggcgcagcgcttcgccgaactcgccttcccgtgggtcgacccgacttacgccgaccgcttccagcacctgctgcagcgcatcgaagcccgtgtgaacgacacggactccggcgaattcacctccaagctgttcgccgctgatggcgtttctgctgaagaggcagctgccgctggcctgctgacccacgacgacattctcgccgacccggcccccgcgctcgaaaagctcgcactggcctacccgcagaccgccgaactcaaggtggtcccgaccgacgtggcttggttcccggtgctcgtgcgcgaataccctaagcccatgccgttcgtacccgtcatcgacaacgacctgctgcgttggtggggtcaggaccagctctggcagtccgaagaccagcgctactccgccgattccgtgcgtgccatccccggcccgatctccgttgccggcatcaccaccatcgacgagccgatcgccgacatcctcggccgcttcgaaaccgccgccatcaagcgcgtgcagggcgaacagcaagccgccgatgccgctgagaacgacgatttcgccgcacttggcgaggccaccagcgccgaagacttcatccgcaagtccccgaacatctcctgggtcggccacatcaccgacaacccggcctacggcaccgccctgggcgaccagtactacgaaatccgcgcgtttgacgccgcggccggcaagtacgatctggacatccacctcgacacctactgggacaacgacccggacggcggcacctccaagcacgccgtgcgcgatatcgtcatcccgctcatcgtggaaggcaccgagcccggccgtgtgccggtcgtggaccgcgaacgcctgattccggacgtctacgcgatgctcgccgccaccgcaggcatcggcaacaccgccatcaccggcgacaagctcaccgagatgccgaagcttgacgacaagacctctgacgagcgtccgttcggtaccgcaaccgcaacctacaccctatccgccaacctcggcttcgaccacgaagcggccactggcgccgctctgccgaccaccctgcagcccagccgcatcgcccccgatgcgctggtcggccctgcctggccggcaatctacacggcgctcggctccgtgtacgtcaagggctatccggtgattgaaggcctgctcaacgccgtccacctcgaccacctcatcgaacttgaggtgaacgaggaggacctgctcaagcacaccggcgaaaccatcaccctgaagtcttgggccgaggattacttcgagtccgcctccggccgcgtggtcaccatccacgtgacccacaccgccgccgacggcacgccgcttgcccgcgaaaccgagcgtttcgcgatccgcggccgcgtctactccgatgctttgcctgcagacgcccccgagtatggtggtgccctcctgaataaggaagcggatggctccgtcgccggacagtccactggactgtccgcctcctcgcgcggcctgcaagtagtgcaggccactccgcgccgtctgctgcgccgcgtgaaggtcgtcgccccacacgacatgaccgccttcgcccgcacttccggcgacttcaacccgatccacacctccactcgtggcgctcgcatctccggcctggccgccccgctcgtgcacggcatgtggctgtccgccaccgcccagcacgccgtgcaggcgaccgacgagaagggtgcccactacgagattgccggctggacctacaacatgtacggcatggtccagcttgacgacaccgtcgaaatctccgtcgagcgcgtcggcaaagtgcgccacggcggcatgaccctcgaagtcacctgccgtatcgacggccagctcgtctcccgcggcaccgcactggtccgtgcgccgcgcgccgccttcgtctaccccggccagggcatccagaagcagggcatggttctggacgagcgcgccaagtccgccgccgcccgcgacgtgtgggagcgcgccgacaagctcacccgctccaagctcggcttctcgatcctgggcctcgtgcgtgacaacccgaaggaactcaccgccaacggcgtgacctaccgtcaccccgaaggcctgctcaacctgacgcagttcacgcaggtggcgctcgcgacggttgcttttgcccagaccgcccgtctgcgcgaagccggcgccgatatctggcccgcctacttcgccggccactcgctcggcgaatacaacgcgttgtccgcgttcgccgacgtgattccgctggaaaccgtgctggagctcgtgttccaccgtggttccaccatgcaccacctcatcgagcgtgacgcacagggtcgctccaactaccgcatgggtgcccttcgtccgaaccagttcggtgtggacgacgcgcacgtcaaggaatatgtggaatccgtggccaaggcgtccggcgaattcctggagattgtgaactacaacctcgccggccagcagtacgccatcgccggtacgatcgccggactcaaggccctgaaggccgattccgcccgccgcgtggccgcattcggtggcaagcccgcgttcatgctggtgcccggcatcgatgtgccgttccactccacgctactgcgcaagggcgtgccggaattccgcgacaagctcgacgcgctgcttcctgcttacatcgactaccgtggccgtctggtggaccgctacatcccgaacctggtggccaccccgttcgagatgaccaaggaattcgccgccaagatcctcgaagccgtgccgtccgaacgcatcaaggccgtgctcgacgacccggccgtgtgggattcctacgccgccgacgaccagaagctcggccgtctgctcttgaccgaactgctctcctggcagttcgcctccccggtgcgttggattgaaacccaggcgctgctcttcggtcagcgcgaacagggcggcctcggcgtggaagaatacgtcgaagtcggcctcggcaacgccccgaccctggccaacctcggtaccaagaccctacgtctgcccgagttcgccggcaacgatacggtcgtctacaacgtcggccgcgatgaaggccgcgtctacatgaccgacaccgattcgctggttcccgacgacgagccggaagaggctgcggcctcggccccggtcgaaaccgctcctgccggtggttccgccgtcgccaagctcggatcgggtgctgctccggcaaatgccgtgactgaggctgctcagacaacggatggctccgtcgccggacagtccactggactgtccgactcctcgcgcggcctgcaatcagggcaggccgctgctggcgcaccgtctggtgctgccgtcgccgacctgcccttcaaggcttccgatgccatcggcgtactcatggcctactccgccaaggtgcgcctcgaccagatcggcagcaacgacaccaccgacaccctgaccaacggtgtctcttctcgccgcaaccagctgctcatggacatcagctccgagctgggagtcgccagcgtggacggtgctgctgaagcgacgctcgacaagctcgcccaaatcgtcaacaaggccgccccgaactacaagccgttcggtgccgtgctctccgaggcgctgcgcgaccgcctgcgctcgctgttcggtgccgccggcgtcaaacagcagtacatccgcgaccgcgtgaccaacgtatggcagctcggcgaaggctgggtggccagcgtgctcgccgcactgctgctcgacactcgcgagggtgccagctcccgtggcggcgacctggccaagctgcccaccgccgccgtgcagaacaagccggaagccgacaagctgatcgatgcggccgttgaggtcgtcgcccagctcaagggtgttgccgtggccctgccgtccgccggtggtgccgctggtggcgctgtggtcgattccgccgcgctcgacgccttcgccgagaaggtcaccggttccaacggcgtgctcgccgccaccgcccgcttcgtgctgaacgagctcggcgtggccgctccggctccggaagaatccgaggacgagaacgccgccgtcgtggccgcggtcgaagccgaacttggctccgactggcccaagcaggtcgctccgcgcttcgacgccaacaaggccatcctcttcgatgaccggtgggcctccgcccgtgaagacctcgcccgcgcctactacggcaacgactccgccgccttgaacggcagcttcatcggccttggcaagaccatcgccgccgaagcccagtggttcgccgacaagtcgaacaacgatgagctcaaggccgccttccagaaggccggctccgaggccctcgaacaggtcgcttccaacaagaacgcctcccgttacgcgaatgatatcgccatcgtcaccggcgtgagcccgaactcgattgccgctcaggtggtcgaaggcctgctcgcaggcggtgccactgtggtggccacctcgcacagcttcaagccgtccatcaaggcttgggccaagcaggcctaccgcgagcacgctaccggcaacgccaagctgtggctggttccggccaacctctccagctaccgcgacgtcgacgctctggtcgactgggtgggccacgagcagaagaagacctccggtgccaccaccacgattctgaagcccgcgtgggagccgaccctgttcttcccgttcgccgctccgccggtccatggcacgctcgccgactccggcgacctgttcgaatcacaggcgcgactgatgctgtggggcgtggaacgcgccatcgtcggcttcagcaacatcggtgccgacaccaacgtgcagcacaagctccacgtggtgctgcccggttccccgaaccgcggcgtattcggcggcgacggtgcctacggcgaagtcaagagcgcctttgacgccatcgtcaaccgtgcccgcgctgaaaaggtgtggtcgagccgcgtcaccttcgctcacccgaagatcggctgggtgcgtggcaccggcttgatgggcggtaacgacccgctggtcgccgtcgttgagcgtcacggcatccacacctactccaccgcacagatcgcggccaagctgctcgacctgtgcactgccgaatcgcgcgagcaggccctcaaggccccgctcgatgtggacctgaccagtggcctcggctccgagcccatcgacatcaaggccctgcgtgccgaagccatggccgatgcggagaaggaagctgctgcggcctcgtctcaggaaacggatggctccgtcgccggacagtccactggactgtccgactcctcgcgtgggcagcaaatcaaggcgctgcccaccccgatcgtcaccaagcaggcttcggtcgacctcaacgactggaccaacgtcaccgccaagccgaaagacgaaatcgtcatcgtttccgtcggtgagctgggcccgtggggctccggtcgtacgcgcacccaggccgagctcggcatccactcggacggcactgtcgacctgagcgccggcgcagtgctcgaacttgcgtggaacatgggtctgctgacttgggccgacagcccgaagcccggctggtacgacaccgacggcaacctcgtgcccgaagaggacatcgccgagcgctaccacgacgaggtcgtggcccgctccggcatccgcccgttcgaggaaggcatgggcaacgactacaaggacggtgccgacgaagaagaagccgaggtcttccttgaccacgacgtcaccttctctgtgcccacccgcgaagtcgccgccgaatacgtcaagctggacgaggctcacaccaccatcgccccggatgaggaatccggcgaatggaacgtgacccgccacgctggctcgatgatccgcgtgccgcgccgcgccaccatgacccgcacggtcggcggccagttcccgaagggcttcgacccgacccgctggggcatccccgcctcgatggtcggcgatgtcgacaagatcgccctgtggaacatcgtcaccactgtggacgcctacctgggcgccggattcaccccggccgaaatcctcgagtccatccacccctcgctggtggcttcgacccagggcaccggcttcggcggcatgatgtcgatgcgcaagctgtacctcgaccgcttcctcaaccacgagatcccgaccgacatcctgcaggaagccctgccgaacgtggtcgcggctcacgtgatgcagtcctacatcggcggttacggcaacatgatccagcccgtctccgcctgcgccaccgcggccgtctcccttgaagagggcgtcgacaagatcgccctcggcaaggccgatttcgtggtcaccggcgcgatcgacgacatcggcgtggaatccgtgatcggcttcggcaacatgaacgccaccgccaactcggaggaaatgtacggcaagggcatcgacgcgcgcttcttcagccgcgcgaacgatcgtcgccgtggcggcttcctggaa

SEQ ID NO: 3854 - DNA, 4354 bp, Unknown
  R35_2m  MAG No. k141_15852
ataacgcctgcagtggcaatgagacccactgcggccacggccgccgcgatcttcgcccactggccccgagacagggttttgacgaatgaggtccgctcagcgtgcttcgacattgcgctccttggttgggtacacactgctttccatcataggacgttgagtggatgaataaaaaaaccgtggtgggtgttcgacccgccacggatggcatatgtagtagttagcagtgcaaggaagcgctatatatgggcttttccgcgcttccgttgccgcagtgtgataaggcttactgctgctcctgcgctgcctgctgtgctttggcggcggccagatccagcgccttggcctgggcgatgaggtcgtccagatcggcggcctgcagcgcgccggcctgctggaagatgacctcgccctgcttggcaatcatcagcgtaggcacagcttgaatgccggcagcctgagccagatcctgattggcgtcgatgtccactttgacgaaagcgatgttcgcattctccggctcgttggacgcagcttcgaaaatcgggccgaacgcacggcacgggccgcaccaggtggcccagaagtcaacgaacacgatctcgttgtcggtgatggtcttctcaaactcagctgaagtgatggcggtggtggccattgaagttccttcctcaaacacagtgcttgatgctgtgtaccagtttcccagcaacacccaacatttcggcaaaagtttgtgccccaagctgaatggattgcgggcgcatggaggcgatgaggcgctttgctgagaattcacagacaatttttcggtgaattgtgcccatgttcatcaatgcgcgcgataatgagaccatgccagtcatgaatgatgaagtgcccgacgagggcgattatgatgccggccgtggccgcggcgaattcgacaacatcacgcccgaggacttcatccacgggggcggttccggccacggcaacccgccgggctggctgggaccggccgacatcaaccgggcgcgtcatcagatgcccatcgcatacgtggagatcgtgcccgtgcgcaccgatgagatgggccgcatctcccaggtgggctcgctgctgcgcgtatccgatgacgggtcgatcgaacgcacgctgatcaccggccgtgtgctgtaccacgagacgctgcgcgaggccatcgcccgcaatgtggccaaggacctgggcgacatcgccctgccgctgctgccggtcggactccagccattcaccgtggccgaattcttccccacgccgggactgagcgaatactacgatccgcgccagcacgccatcgcactgtgctacgtggtgcccatcgccggtgactgcaagccgcaggacgagacgctggatgtggaatgggtggatcccaagagcgacgtaatgaacacgttcgtggcgcagatggtcaacggtcatggtcgcatcgtgcggcaggcgttggcctgggccggaatctgacagttgttttgcttcccgctggtgggacgtgaatgtgaaggagtaattcatggcaatcgaattggccaatcatatctatcgcgatggcgaaggcgtgccggtggtgctgatgaacgcctacccggtggaccaccgcatgtgggacgtgtgcgcgaaggcgctcgccgactccgccgacctgaacgatgtgccggacttcccgatttgggcaccggatatggccggctccggcgcatccccggtgccgagcgatgccgattctggcccccgcatggcgaacggcgcgtacagcgaggcgctggatcgcctggccggagcctacgtggacctgatcaaggccgccggctacgagcaggcgatctgggtcggactgtcgatgggcggctacgtggcgatggacatccagcgcctgtaccccgaaacggtggccggactggccttgtgtgacacgatggccgcgtccgacggcgtgggcggagagaaccgactgaagatggcggacgccgccgaacagacgaactcggtcgaaccggtcatgcacttcgcgcaaccggccgatggcgattccaccgtcaagaagactcctgaattcatcgcgaccatgaccggctggatcaacgaacagaacccggctggtctggcctggcgtcagcgcatgacctatggccggcccgaactgggggcggtgccggaaacgatcagcgcaccgagcctggtggtgtccggcgaactggacccctccagcaatccgagtgtgatgcgtccgctcgccgagcgaatcgccggcgccgaattcatcgacattccggactgcggccatttcagtgccgtcgaacatccggataccgtggcgcgagcactgctctcgctcgtcaggcgcgtgcagaacgcgcagaagaacgcataggagacctcgatgggcactgacattcatttttcgcccctggcgctgacccatgcgctgccgttcctgccgctcgcgcaaggtgacatcgactatcaggtggaccggcgcggtgaacccggtctgatcgacgagctgttggccgagccgaccaccaaagtcgtgcttacgcgcggcggacttgtcgccgtaccgcgcggccaaggcgagctcgtggactatgagaacgtgaaaatgcggctcgccacgttgccgggcgcctatgtgtccgccgaactggcacgctaccccgaaacggtcgccatgttcctcggctcctatgtcggggcgcgcggcgaatccgtggtcgccgtggatatcacgcgcgtgccggaagccggtgttcccggtgttgacgggattgctgatgtttccggtgctgccggcggcgtgctcggcacccaggattccggcaccgtggacggcgcgctgggcaagaacggcatcagcggaggtgctgccgccggaatacggcagccgggaaacgccaagggcaatggcggcgtagccgcagccaaaatctccgggccgctcggtgtaccggattcggcagggcaaggtgcggacgatgccttcgatgattcggtcggcgcgcccgtacagcccttggccccgaagcccacgctgctgcaacaggccgtgacccggttcgactgggtggacctgcgcggattcgcccctcacgccaacgcgcgcgaggctgggcaagccaccagtgccatcaccttaagcatctggcacagccgccagcggttctgccccacctgtggcgcggcggtccggccggcgctcgccggatgggcgcagcgatgcaccaacgaggcggacggcaaccgtgtgctgttcccacgcgtggagccggcggtcatcaccgccatcgtggacgggcacgatcgtctgctgctgcaacacaacgcggcatggaaggattcgaggctgtattcggtgtccgccggatttgtggaggcgggggagaaccttgaacacgcctgccgccgcgaggccatggaagagaccggcatcaagctcggcgaggtacggtacctgggctcgcagccgtggccgttcccggcttcgctgatgatggcgttcaaggcacatgcgatcaccaccgacgtgcatgtggacggcgaggagaccatgaccgcgcgatgggtcacacgcgacgaatacacggccgagctcatcgccggccgtatggcggcgccgggccgcgccaccatcgcccgctacatgattgaggaatggctcggtcgcgagctgtgacggaccgcgaagataggttaggcttatgactatgagtgatgacaacgaaaacgaacagccgctgaacctcgacattcccgaccacctcgaatactccgaggagcatgcttgggtggaccgttcggtcgaccccgcaatcatcggcataaccgaatacgccgccgaccagcttggcgaacttgtgttcgtggatttgcctgagcctggcgcccgtgtggaggccggcgacgagatcgtggagcttgaatcctccaaggccgtccagccgttgatcagccccgtggcgggtacggtcaagtatgtgaaccgtgacgtggcggacgacccgtccgtggtcaacggcgatccgtacggcgaaggctggctgctgaaggtcgagcttgacgacgatgagccggagctgctgagcgccgacgaatacgcgaaggtcgtgcggtagttccacccatagctcccctccctgaggggagccagtatgtggcatcaaacctatatgcatcgtgcctcttatggaggggttgaagaaagcccaacggaatctgagccgcaaacggaaaggctccaaccgccgccgcgaggcgagaacgagggtcgcgcgtctgcacgcccgcgtggcggacctacgccgcgacctactggacaagaccaccaccatgc

SEQ ID NO: 3855 - DNA, 7708 bp, Unknown
  R35_2m  MAG No. k141_16906
ccgatcgagagacaacgccggatgatgtgtaccgggatattctgttcgataaactctcgctcaacgaagggatgctggtggagaatgcggtggctcagcaattccgggcgaatgggcgcaaactgtatttcttctcgcgctcggatagggcggatgccacgaaaaccatggaaatagacttcctcatcgttcgggaatacgataatgccgcgatgaagcctcgcatcagcccgattgaagtgaaatccacgaaacgatacggcgtatcttcgctcgacaaattccgcaaaaggtatgcccaacgattgggcaaggaatacgttctgcatccccgccaactcgaagtggatggagaacgcatcaagctgccgttgtatatggcccactgtctgtgatttgtgctgattgatgcatgtttgggctgcaaggttcaggcagtcgaagagtgtccgttccgcataggacatccgtgaatatggctggactcacactggctcgattgcagggaaaggagttggcatgggatattccatcggtcaggtgtcgcgaaagactgggctgtccgaacatacattgcgctactatgacggccaaggtcttttgcccggtatcgcttgaactggtttcggacggagatgcttcgatgacggcgatcttgaattgcttgatctcattgaatgtctgaaatccacgggcatgagtctcgcagagatcaaggattttgttgatatgactaagcaaggtgatgccacgctcgaatcacgacttgctgtttttcgcaatcagcgacatgtggtgaaacgtcaaatcgccgaattgcgacgccggtacatcaaacttgacgtggtcattacatccggtgcctcttgcacctcgtcgatgaaaatcaatgtaccgccgggagtgagcgttgaaggtgagaacaaggtaagtcggctgatgaactcctgcacgtcattcgccgatgcgagcgcgcgggccgcctgcttgttctcgtacaggttgatttcaaggtaatgagcgtattcgtgtttggcgaactcgcgtactgcgtagctcttgccgatttggcgggcaccggtcagcagcagtgctttgccggtgccgatcagcttccattccaacagatcgtccgagatcttgcgctcaagcatggcagttcctttccgaatcccttatgggagtagcattttctaccttgtatgtgcagaatgccgcatttcaaaatggggttttggcgcaaaataccgcatttcaagtagggtttggtgcaagatgtcgtgcaaatggtgaatcgggcgtgtttgtaggggcggctggatgactgtgcggctggactgttgtgcggccgcatgcttatgcggccacaagtcgtgcgggctgttcgcgaactatgcgcggtcggccggcattcgcctgcgcttgaggtgttcgataagcagctcacactttttgacatcctcggcggtcgaggccggtaggtcgtcggaggaggtgtcgatgatgcgctgcaggtagccgtgtagggtttgtatctcggtttcattgaggcagtccagcatggaggaggtctggtcgggcgctttgcccagcagatcggcggccttgcggccctggttggtgaggctgaccatcatgacgcggctgtcccgcctggacggacggcggctgatgtgaccgctggcctccagtttcttcaacagttcggccatggcttggcggctcatgccgaacatcgcggccaagtccttctggctggtctggtcggattccctgagcgtggccaagacgcggccttggccacggcgtgggtcgaaagcatgttcgccgcgcggtgatttggcgccgggggagacgagccgtctgtgtatcgcgcgatacgccatgatgcggccaatgctgatgaaactgctgagaacatcgttcttgatatcgccgtcggcggtgttgtggcttgtgccgttctccgccgattgactcgtggccattacgtcgtcgaccgcgtcgtttccggttacggcggcgttgttgctggtgctgctcatgttcggaatccttgcgtcagtgctgcatgttgtcgccggtggattcgccgcgatagcgcatcatcatcgagcgctgcatctcctgcgcgttcggtggggtccaggtcagcgcgttcgcgccggccacgatggtttcggccatggactcgtcggtcgaaccgccgctggcgagcagcgggatggaggggtgacgctgcctgatctgctggaccacgtcaggcgtcctgcggccggccgccacgttgatgatggaggcgccggcctcgattttctcgtccaattcgtcatcgcaggtcaggaccgtggcgatgaccggggtgttcgtgatgcgcgccacgtcgtacaccgtggagggcagcgccggcgcgttgagcaccacgcccgccgcaccctgcatctccgccatcatggcgagttggatgacgcgcgggccggtggtggtgccaccgcccacgccgacgaacagcggggcctgggccacggtgagtagggcctgggtgatgactggttcgccggtgaacggatatacggcgagaatggcgtcggcattggtgttgcggatgatggccgcgtccgtggtgaacgcgaacgagtggagttggcggccttgggcagtgatgccggaagtgcagctgatgatgtcgggaacacgggccgcggaggagctgatgcggttttcgatggggttcggtccgtctacttgacgggattccgggtcgtattcggtgaggtcgttgctcatgtcatgtgtgatgttcatgccagtctcctttaataaggaagcgagcgaagcgtcgctggtcgtgtgtctttttcatcctcttcagtaattatgtcaagtacctgacagatatgagtatacgactccatcaaagattgtcaagtaccttacgtattgctgctgtgtcacatttttcgacaatgccaacatgcgtatgttgtttgatgcggatctgaatgtggaacggctgattcccgcactgtcgatcgagtccggaactaggatcactcccgaggatacgctcgtcattttcgatgaggtacaggaggtgccgagggcgatgacttcgctgaagatgttcaatgaagtcgccccggagtatgacgtcttggccactggatcggcgctgggcatcgccatgcatcctgggttttcattcccggttggcaaggtcagtagactcaagctgtatcctatgtcttttgttgaattcctgtatgcgtgcaaacagtatgccttggccgaaatgcttgagcccaaggattttccgctaattaacgtaatgcatgacagggtcatgacttggctgcggtatttcatgtatacaggaggcatgccggagatcgttgaagcgttcgccagtactctgccgaatcctgacttcacggcggttcgtaaattgcagaatagtctggtctccgattatcgtgacgatttctccaaacatgttgatatgcgtgatagtcccgccgtcaccacgcttcgtctcaatcaggtatgggattcaattccttcccagttggcgaaagagaacaagaagttcgtatacggcgtggtgcgagctggtggacgtggcaaggattttgagagtgccatacagtggcttgtcgatgcgtcgttggcgttgcgcgtgaatcgggtgagtgcgcctcttgaaccattggcggcatatgcagacggctctgcgtttaaactgtacagcctcgatgtggggctgctaggagcgttgagcggtctgaatgttcgtgtgttgctggaaggtgacgcactgtttcgagagttcaaaggttcgatcgccgaacaatttgtatgccagcaattgaccatgatgaacggccattcaccctattgctggtcggccgagaactccagtggtgagttggattttctgttcgagaggaatggcaaagcggtgcccgtggaagtgaaggaggggactcatcgacaggccaaatcgcttgtaatcatgcagaagaggcacggttatccgcttgcttatcgtttctctgctgaccggtatcgggatgtggggccgatccgagatgtgccgttgtacatggctggcatcgtttagggcgttatggcccgttgcgctgaacgatggaatgcgaccacaacggatcctgtacggaagtagtcggtctcgtacctgtggctggcgttgcgcgcatccgccatcgcgcaagcgggaacgatcgcattcccggtcacgaggattccgctggttccacctccggggatcggccggttggatgaggttacgccgtcttgcgagccgtcgaacgatcagggccaaaggtaaagaaattcggtattcttgcaaggctttttgggttatcccgcaggcatgggtagactggcatgcggtaggagagatactcgctgaaaggtgcatgccagctcatgggaacgggtgaccagccggaaaagaccaacaactaaaccagcgattgctgtcggctggccggtaatagccgtaactgcagcggacgttccccgctgcaggtgacacgcatcgccggagggcagctgcaagtccaggtaccggtccgcggccaccccagtcagccgcgctgacgacccccggcgtcatacgcgatgtgcacgtcgtgcactgctacgtgccgtccgccgggctacccgtccagcgaaagcgtaaccgggcagccagccagtatcgatacatgtcataacgtaaggaagtagcccatgccatcacacgcacgcacggtccccaggacaacccatcgcgttcgcaacgcgctgctcgtcgtgctgctgttgctggtcatgtgcgccgcggcggccggcttcagcggattcaaactgtacaagtcggcgatgagcgccaaagcgcacctcaacaatgtcgtcaacgcggccaaggtcatcaaggacggttccaccgacgacatggtcaaggcgctgtccgacgtgagctacatccagaaggaggcggccgccgccaagcaggatgtcagcggcggtctgtggacgctggcggagaagatgcccgtggtcggcggtgacgtgaagacggcgcgcaccgccatcggtaccatcgatgacttcgcgcagaccacgctgccccagctgggcaaggtcgtcaccacactgaccggtgccagcctctccagtggcgatgggcagctcaacatggagccgatcatcgccgcggcgcagcagcttgccacggtcgaccagtccgtgcaatcgcaggccaggacgatccaggatcttcccgacgccaaactcggcgtggtgaacaacgcgctgcagaacggcaagacgcagatggccgccctggcgcaggtgaccgaaaacctgagcggcatgctcaacatgctgccgaacttcctcggtgcgaacggcgcccgcaactacgtgctgctggcccagacgaattccgagatccgcggaaccggcggcctgatcggttcggccggttccttcagcgcggacaacggcaagatcgcggtgggggagttccacgcggatgccgagttcccctccaacgccgcgttggatgacgtcaaccaggacggtgacggcacgctgtacagcggactgtacttcggtcaagtcatccataatctttcgtccacgccggacttcccgcgcgtcgcgtccatggcccagaagttctggcaggcggctccgtttggcggatcgtccgacggcgtgatgtcgctcgaccccgtcgcgctgcaggcgatgatcggcgccaccggcgacgtgaccctgtctgacggacgcgtgctcaacgggtcgaacaccgccgaattcctgctcaacggcgcctacaaggaactgacgccctccgctcaggaccagtacttcagcgagaccgccgcccaggcggtcgcccacctgttcagcgacatgaacacgcagaagctcatgaccgtcgccaagacgatgctccggatggccgagcagcggcacctgtacttctggtcgttccacgaggaggatcaggcggtgctgcgcagcgccggcgtcaccggcgagatcaccaacgacgcgaagaacccggtgaccggcgtctacttcaacgagatgcaggcctcgaagatggactggtacatccagcgcaagtcgacggtgaagaggaccggcgacaacacctaccacgttacgtattcgttcaccaacaccctgcagccgggcgaggccggatccctgccggaatacatcacggcgaacgccaagggaggcgtggcggtgaaccgcgtggtcatctacacgccggccggaggcgaggtcagcaacgtgtcggcgtcgaacggcagttccttcgcacaggtgcaggccaaggaccatatgacctacatggacgacatctccctggcgcctcaggacacggtgaccatcgaatacgacgtgaccaccgcggccggctcggccaacctcaaactggatcagacgccgaccatcggcgaccccgcgatcacgtacgagtattgatcggtattgatctgtgggtgtgatcttgggattgtgtgcccttatgaaagcgcgccgccgactcctctcggaaccggtgacgtgcttccggacgacgatgtccattacgatcacggcagatcgatagccgacaatatcgtcacgctggttcagctagttcgaattgcaggtggcggacggtgcccaagacgaaagattctcgtccggcgttcggccgccgtcgttggtcgtgatgatactggagaccatgaagctcgtgcggcggcgggggagggcgaggtcgagaaagaggcaacggcgtgacgcttgataataggtcagacagtaaggtggtggcggagcagtgccgagcataggcaacgatcaacggccgcaggcgatcgaagtgcgcggggcgcgcgtgcataacctgaagaacatcgacatcgacattccgctgggcgaactggtgggcgtggccggcgtctccggttcgggaaagagctcgctggcgctcggcgtgctgtatgcggaaggttcacggcgttacctggaagcgctgtccacgtacacgcgccgtcgcctgacccaggccagccgcgcccaagtggacgaagtgctgcatgtgccggccgcgctggccctgcaccagcggcccaccgtgcctggcatccgctcgacgttcggcacgatgaccgaactgctcaacagtctgcggctcctgttctcccgcgtcgcctcgcacgtgtgcccgcattgcggggcgcgcaacgaaccgacgctgaacgtggcggccggactgcccattacttgcgtcagctgtggcaaggaattccacgcgcccggcgccgaatcgctcgccttcaactcggccggcgcctgcccgacctgctccggaaccggcattgtgcgcgaagtgaaccgtgcggccctggtgccggatgagtcgaaaagtatcgacgacggtgcggtgctgccatggggctcgctcatgtgggacctcatgaagcaggtgtgcggcgcgatgggcgtgcgcaccaacgtgccgttcagcgagctcatgcccgaagaacgcgacatcgtattcaacgggccggccgtcaaaaagcatattctttacaagccgaagaaaggcgacgatttcgccgaactcgatttcacctacttcaacgccgtatacacggtggagaacgcgctcgccaaagccaaggacgag

SEQ ID NO: 3856 - DNA, 26002 bp, Unknown
  R35_2m  MAG No. k141_17147
gtaccaccctgacgtcaacaagaccaaggaagccgaggagaagttcaaggacatctccgaagcctacgacgtgctgagcaagaaggaagatcgccaaaagtacgacgcgattcgccagttcggcatgggcggcgcccgcttcgcaggcggttccggtgccggcgacttcgacgcttccggtttctctgatatcttcggctccatgtttggccagggtgccggtggcaacggttcgcgtatccgcttctccacttcgggcggcggccccaacaacatcaacgacatcttctcgatgttcggcggtgctgcaggtcagggcggccagtcgtatggcggctacggccaatcgccgtacggcaatgccggcggctatggctatgaggaggccccgcgccccgaaaacggcgaggaccgcaactccaagatcagcctgaccctgcgtcaggcggtcaagggcgctaccgtgtccctgtccgtggacggcaagaagttcaaggcccacgtgcctgcgggcgtcaaggacggccagaaaatcaagcttgccggcaagggcaagccgggcatcaacggcggcaaggccggcgatttgtacctgcacgtcaccgtcaagcccgatgccgcgttctcgatgcgcggccacgacatcgtcctggacctgcccgtaactgtgggccaggccgtggccggtggcaaggtcgaggccaaggatatcgacggcaatcccgtcaccttcaaggtgccggcaggctccagctccggtgccgaggtcaagctcgcgggacttggcgtccagcgcggcaaccagccgggcgacctgatcggccgcgtgcagatcatggtccccgccaagccgggtttggccgtcaagcacgccgccaaagaattcgacgaaaaagccggcgactatctcagcctgtaatcaggaggtgaacaatggcgcggttagccaaccaaatgaagcagttgtacgcgatgtgcgcaaccgcgctggtgatgggcagggccgatctcgacggagccgatgacgtcggcttcgacatcgaactgcccatcttcaccgtcggccaggcagccgaactgggcaacatccacccccagaccctccgccagtacgaccggctgggtctggtccgtccgcagcgcaccgatggcggcgcacgccgctactgcctgcgcgacatcgcccgcctgactcgagctcagcgcctaagtcaggatgagggcatcaatctttccggcatcgcacgcattttggccctcgaagaagagaatcgccaactgcgccgcgaagtcaaacgcatgcaaaccggcgaccaggagagcgttttcgccgcaggccgtgacggcaatatcgtggaggtacaacgctccaaccgcgcccgcctctggcgcaacgccatccgccgcgaaacccgcgaactgcccggccgcgataccgctgccgacaccacgcgcgaatccgactccacccccgccgattccaaatccatggtcctgtggggttggtgatttgctgttcggctgtcgtgcggagttggtgagataggtatatcgaatacgaatagttgaggattcactgcgacgtacggaggtaaccatgctgctcaaggccgtgttttgggatttggacggaacgcttatcgattcggagccgctttggcatgacggtgaaatcgagattgcgcacaacaatggcggcgagtggaacgaggacctcggttgggagtgctccggcactccggtgccacacgtggcagaggtcatgattgcgcatggctgcacattgagcgttcccgaaatcgacaaacagctcaaggattatgtgttcaaggcggaggtcgaacgtctgccgtggattcccggtgtattggacgtgctgcactcgctcaaggaggccggcattccgtccatgctggtcaccacgtcgccgcgccgtatggcggagaacatcatgaagcagtccgagggactgttcgccggctacgtctgtggcgacgatccgtacgaacacaagccgaaccctgcgccctatctggccgcagccgacaagcttggcatcgcccgtgaagacatggccaagtgcgtggtgctcgaggattcctcggttggacttcaggccggtgcggcatcgggcgcgactctgatcgcgcagactggctggattcgcacggatacttccggcctgggccagttcgcgtccatcgaatcgtatgacggtatcgatgcggccgcgctggacggtttcgtgcgccagcgtttgggggagtagaaataggccgattgtatcggcattgcattccggtgtgtcgcaagtatttgcaatgtttatatcaaccatttgatgtctgttttgacaaacttctgaaacgttatagaattgttgccaacgaagaaatctgaaacgttctagaaaaaccggcgcacagcagcgtcggttgactggttttccgctccggcaaagcatgcccgagtattttctatggccagtttctgaaatgttacagaaaaagaagatgaggtccaagggaggtcatcatgacggcaattcaggaagccgttcccgccgcagcgggggcagcgcaaagccgtgggggagaggtgagcaacgcggctgcggcagccggcaaacgtgttcgtgcccgcaagcacagcggcgcatcgcagaactcatggcaaagcaagctgcgcccctacctgttcatcgccccgctggtcattctctccggcgtcttcatctactactgcatcggcttcaccgtggccacatccttcaccgactgggacggcatctccagtgagatggacttcatcggcctgaagaactacaccaagctgctcgctcccggctccgtgttctggacggccttgatgaataacatcatcttcatggtcgtcaccgtggtcatccaggccgggctcggactgctgctcgcggtgatcctcaaggagcgcctgcgcggttccagcttcttcaaggcgatcttcttcatgcccatcgccatggccccggtcatcatcgccgccatcttccgcatcatcatggatccgaacgtcggtgccatcaacgaggccctgcgcttcctgcacttggacttcctggcccaaagctggcttggcgatccgcacatcgccctctactcgatctgtgccatcaacatctttgaatggatgggcttctcgatgatcatctactacgccggtctgatgtctatctccgatgacatctacgaagccgccaagatcgacggctgcggattctggaacaccctcttccgcatcaccattccgaacctgtccggcaccaccaacacgcttatcctgcttggcatcgtcggctcgctgaagaccttcgatatcgtcatccagaccacaggcggcggccctggccgttccaccgaattcctgaacacctacctgtacaaggccggcgtgcagcagttcaacggcggtctgtccgcggccatcggcgtgatggtcctcatcatcgccgtgatgctctccctgattcaacttgccttcaacaagcgtgccaacaactaacgagaggacgtcatcatgaagcgtaaaaccagtgcgacggtcatcatgtacaccgtcctcgtattcttcttcgtcatctggattttcccgatttacacggcaatcaccaagtccctgcaggcaggcggctggaacagctacctgtccgtgatcaacaataaggacgtgcactacttccgcgtggtgttcaacagctttttcatctccgtggtcaccgccgtgatcgtggtggtcatcacctcgctcgccggctacgcctttgccaagatgaagttcaccggttcccaggtgatctacgtgctgctgctcgcctgcatggccgtgccgattgcctccgtgaccatgccgctgttcttcaccatcaagacattcggcctgaccaacacctacctcggcatgatcatcccgttggtggcgttcaacgccctgcagatgctgttgctctggcgcaactacttcaacggcgtgccagacgaaatcatcgaagccgcccgcgtggacggctgcggttccctgcgcatctgggctcgtatcttgatgcctatctccaccccgatgatcgccaccaccggcgtgctgaccttcgtctactcctggaacgaatacctgattccgttgctgctcatccgcgacgaatccaagtatccggtcacgctggcctccacctacttcatggagacccgcagccagacgccggagatggtggcccaggaatacgccgccctgattctgatgacgattccgtccatcatcgtctacctgatcagccagaagtggctgcagtccggcatcaccgccggcgccgtcaagagctgaggtgacccaaaatgaccgcaaccatcagcaacggtgcatccgccagctacagccctgcggaagacgagctcggcgcagctgaccccaccgccttgcttgccgaatctggcgatttgaagccgctggccgaacgcacttatacgaatccggtcccatatgcggacggtaagtcccataccgcgcccgacccgttcgtgctcaaataccgcgacctctactactgctatgccaccgacgagcacggcattctggtctccacctcaccggacatggtgcactggacctcacatggattctgctacaccgaagccggacgcagaaacttctgggccccatcggtgattctcatcaacggcgtctttcacatgtacttctcgaatatgccggccgaggagaccgacacccacacggaaatcatgcgtgtggccgtgagcgaggatccgctcggcccgttcgaaaagaaagcggagctgttcaacaccttcgccatcgactcccaagtggtctatggcgatgacggccagttgtacttgctttacgccgacaatcaggtcaccggcctgagcgatgaccggcccggaacctccgtgatgatcgatcgccttgtgaccccgtattcgcgtgagaacaaaccgcgcccgctcatcgtgcccaccatggacgaggagatctttgcccgcaaccgtttcggcgatggccgcgactggcacaccgtagaaggcgccacatacttcgcctaccgtgaccgcgcgttcatcacctactcggccaacgcctacgagcatgaggactacttcgtcggatactcgtacgcacagctgccgaataagcaggccgacgcccacatcgatcagctcgattggacgaaacagctcaacgagaaccgcttcgatccgctgcttatccgcagcccaaaggttgaaggcacgggccacaactccatagtcaaagcgcccaatgccgttgatgactggattgtctaccacggccgtaacgccgatgacgagctgtatgtgggcaccgaacagcgcgtaatgcgcatcgacccgctgtactacgccgaaggagggctcgacaccccaggacctaccgccgccgctcaaagcgcaccgctgtatggcactgtgcatgatgattttgcggatggcctgaacgccggatggtcggttatttccggcgcggcccacaccgaatccgatgtggacggtcacgcgcttgttgccgacgaatccagtgtattcatcgctgtgtcgggcaaatcgtccgcaacccaagtgattgacgtctgggccaaagctcccgtcaccccactgggcgcacgattcggtatcgtggtgcggtaccaggatgccaacaacctcaccaaactcgaggtggatgctggccgtcaggtaattagcgtggtcgatgtgatcggcggcgttgcctccgaacgcgtgaccaatgccgacctccatgacttcgattcccatgcctggcatgagtaccggcttgagcgccgctactgcaggctggagatccgcattgatggccgtttcgccgcgtcctgcaccatcagtgataagcccggtcgggcgggattgttctcgttgcgaacgggggccgcgttcagcgcatatgcggccactgaacatgtgaatctgtggggtgccggattgcgggatctcggtcgagaattgcatgctgaccgccgactcgtcatcgacggcggcgtgaggtccagcggcgtgtgtccggtaacactcgaactggcatacccgctggtcagcaaccgtttcgtccttgatttcgctgggcagacgagccgtgggcaggcgctgttgtctcttggcgaataccgtttgtccggcacggcatcatccgtggagttcatgcgcaacggcaagtctctgccttccaccccggagccggccaggctgcgtgtctttgaagacaacgtccgccgtgaccgttcgggccgagccgtgctcaccatccgtatcgaagctctgaacggcacgatgcgactgcacctacgtggcaaaacctggcaggtgccgtttgcggacaatgcggcccgtgcccgtatcactcttgatcgcgcatccctgaccggatacgagaggacatcgctggaatccagcatcgaggaaaggagtgcgtccggcaattgagccaacatcagccgcacatatcgggtgtggctggcttcgccatccaattccgatgatcttccacaacgaagtgaaccaataagagaaacaaggaaaataaggagaacaatcatgttgaacatgaagaaggcgatcgccgcagtgggcgctctcgctatgtctgcaggtctgcttgccggatgcggttcgggcagcggcggctccgatgagggagtcggtaccaaggacagcccggttgagctgaccttctggacctggcagcctaccgatgcccagtggaagtcgatttacgccgccttccagaagaagtacccgaatatcaagatcaactggtggcgtacttctgaaatggccgactaccagaagaagctgcagacctcgatggccggcggcgaaggcccggatgtgttcggtgtgcaggccggttccactgtggaacagtacggccgtttcgccgacgatatgaaggagctggccgacaagtacatgcccggctgggattccaaggtggccgagggcgccgtggcgcagaccaccaacaaggatggcaagatggtggccatgccgaccatcacctccggctccgaatacatcctgtacaacaagacgctgcttgacgagcagggcatcaaggtgcccaccacctacgacgagctcgtggctgccaacaaggaactcaaggccaagggtctgatgccgctggccctcggcgccaaggatggctggcacctcgacgatatcttcgtgtggctgtccaaccagtacggcgaaggtgacgtgtacaaggccgccgaaggcaaggccaagttcactgatgagaccttcgtcaagaccatgaaggcttggaagcagatgatcggtgatggtctgttccaggatggtgcagttggtactgcgacctacccggatgctcgcgacaactacttctacgcccgcaagtccgctttcttcccgaccggctcctggcacgtttccgccgtgctgccgaacgatgagaccaagggcacggccgttgagaaggacgagctaggcatgatggaattcccgcaggtgggagacaaggctaccggcccgaccactggtgtggacttcggcctgagcgtgaacaaggactccaagaagaaggaggccgccatgaagttcatcgagttcatgaccaccggcgaaggccagcaggagtggatcaacacgctgcagggtgctccggtcgacaaggacatgaaggtcgaagtgccgtctgacgccacggaatccgccaaggccagcatcgatttggtgaccaagggccaggcctcttccaagcttgagcgcaagctcacctcccaggaactcaacgacgagatcggtgtgcagatgcagaacatctacaccggcgacgccaccgttgactccgcgctgaaggccattcagcaggtcaacgaatccatcgaaaggtgagcctatagataggaatatcgcatagtttctactcctcgagtgggcccgtccggtacgaattctcgttgtctggcgggccttctttgttggtttgccgaagtggccctgatttattaccgccggcggagtctgttgacggttgcagcgggagtcgtgggcggcgtgtcgaacccgtccctgctagcggggctgtcggcaaggccgactgggggtgattctgcggacgcctaagcgaaacggcctgcgggggcgatatcccacatggtttatgctggaaacacacatctgaaacgttcgacaaccaatatggcgacgtggatggtgccatgccgagtggttgatggactgaacataagggggcgctatggttgcgagttcgcgcaaggcgacgctgcacgatgtggcgaaacgtgcgcacgtgtccgtggcatcagtgtccaattacctcaacgattacccctatatgaagccggccacgcgcgaacgtatccagcaggccattgacgagctgggctatgtgaccaaccagcaggctcgcaatttgcgttccggccgcacaggactcatctcattgtctctgccggatttgaaccagatttacttttccgaactggccgaagagatgatcacgcgggcacgggaatatggataccgcatcatcatcgaatcgaccggaaacgaccgccagcgcgagatcgagagcgcacatgccatggccagcaatatgaccgacggacttattttgagccccacggccatgcgggcggaggatgtggccgagctcgagggcgactacccgctggtagtgctgggcgagcgtatcttcaacgcacctgcgccgcacgtggtgatgcccaatgaattgggtgcccaagccgctaccacgcatctgctggaggccggatgccgcaccgtcgccgtggtaggcggaacgttggacgaatccgtgccgtcctctcgttcgatgcgaaccaaggggtatctcagcgcctttgcggaacgtggagtgacgcctgatctgaacctgatccgcgagtgcggcgaatggaccagtgccgagggcgctcaggcggtacgtgagatgtatgcgcagggcattcgaccggatggcatttttgcgctgaatgatttgctggcgatgggtgttatcagtcagctgcgggaaatgcgcgtgcgagtgccggaaagcgtgcgtgtggtgggcttcgatgatatcgatgaggctaagtacacgattccctcgctgaccactgtggatccgcagcgcgcgcgtattgctgagattgccatcacgtcgattcttgatcaggtcaagacgggggctcgggcgccgaggcggcgtattgatgtggagtattcattgcgttaccgcgcttcctcgccgcaggtgtagcagttgtgttagccggctggtagggtatttgacggtttgcatataactgtctggttcattgggctggcagctcaatacaagatttaggactcataggaaacacatgggcttcgttaatttcatcctcgaactgctgaaggatccgcgtgccgcgattgccggttggattgccatgggcgtggcgccgaccctcggcttcatcttcctcatcgtatttatcgaaacgggtgtggtgttcttcccattcctgccgggcgactccctgctgttcgccgccggtgtgttcgccgctcccgatgccgcgaccggcaaggccgcgctgccgctgttctggctgctgccggtggtctggtgcgccccgattatcggcgaccagtgcaattacttcattggtcatttcttcggccgtcgcatcatccagtccggcaaggtgaaggccttgaccccggagcgtttggccaaaaccgagcacatgattgagaagtggggcccgctggccgtgttcctgggccgtttcttcccgttcattcgtacgttcatgccgttcatctccggtatttccggtatgcgttggagccgtttcacgccgttctcagtgctcggcggcctgtgctggtccacgttgttcacgctgctgggctacttcttcggtaacattccggcagtacaggaccacttcgagctggtgatcgtgctgattctgctggtctcgctcgccccgaccatcatcggtctgctcaaggccaagttcggcaagaagaagccggccaaggtgaccgatgctcagttggatgctatggaagacggcattaagaacctcgataagtaagcaagaaatgtagattaccgcataaggaatcgtcgtgaaaatgaaggccctgactgtgcatgtgaggtcagggccttttctgcatgagatgggcgtgaaacagcagcgtggttatccacatttgtcgtggacgacatgccggggtgtggataactcagcaagctagaaccacaatggtcgattcgtgttgagcattgaacttggacacgtttcaatcggcttatgaatagcaacaccacaccccgcgtggcgcgtaggatcacctcgccagcggtagcacctccgggcattccgctgcccacggacgatgcgccaattccagcgtatcgctactacactccgccgcccaggccgttggcctcatgcgaacggcagagatcgggcgaggctccggcactcgccctaactacagacaccagcttccataacattgtaacgatgacgtcaggtcatggaggcgtggggttgagtgtcatggcttccatgcttgcatggacattggcgagacgtgaacacagctgcgttctcatagacgctgatttcgtggccggatgccttgacctgctgcttggtgtagaacgagagccgggcttgcggttcagccaagtcgacgcgcccctcggccgtatcgagggtgaggcgatgaaccatgagctgatgatgtgggagggtgtgcgagtacttccctatgacccttggagcgcgcgccagcctgactggtgggaagttcaagcggccattcgggctttggcggaaacgaacgacgttgtcatcgtagatgccggtcagggtggactcattgagaccgtacccgatctgcgcagtggcctgcaggtgattgccgcggaattgtcggtaatggggctggccagagccaagtcgcaccggtccagattggattcatggggctgtgaagcgccacatatcgtaggtgtggaaccacgtggcgctccacgtgggagaggccacgtgggtattggcgaggcgcaggactatttgactgccacggtattggggcccatcaagccaagtgtcaatctgtgcggagacgtactggaaggcctcggcatcagatcggtgaccaaaggcagtcgcaaagccatgaacttgcttgccgatctcgtagaacaggccattcgcccggtttcgggagcttctcacaaggaccagtgatgctatggctgccgtcagcacgcgagccaatgaggctggcacagcgctcagaaccatattcttcggtctgctggatgacgtggcatctgacccgcaggttaccgatttggcggtgacctgtgatggccgcgtttgggcggaccgcggcaatggcatgcgcgaaacagtattgcatgtgccgttccgctcgccgcaagtagttcgagaatacgccgtccaactgtgcgcgcagctcgggcgcagactggatgatgcctgcccgatagcggatgccgccagtccggatggcatccgcgtgcatgcggtgattgccccattggtgccacaaggtgccgcgatttccatacgattccctgaccgaaccatggcatcgctacagcacctgagcaaattaggcgtattcccggctgcttggctgccgacgttcgtgggattggtgcgcaaacatgccacagtgctgattaccggcggaacaggcgtgggcaagaccaccttgctcaaggcgctgctggcgcaatgcgacgtgaacgagcgcatcgtcaccgtagaggaagttcgtgaactgggggaactgggacgcgacgatcatgtctcgttggtaacacgcgaggcgaatgtggagggcgtcggagccataagcctggcggacttggtcaaagcgacgttgcgaatgcgccccgaccgcgtggtgctgggcgaatgccgtggcgcggaaatcgtcgacctattgcgcgcgttcaattctggtcatcacggtggcatgaccaccgtgcatgcggacggcgtgaaccgagtaccgtccaggctgatttcgcttggattactcgccggagtcagtccacaggcgttgaccatgctggcggcaggcgctttcgacgcggtggtgcatttggagcgagtgaacggacagcggcgtatcacgcagatcggcgaactgcgcgtagcacatggtgaactggcaggaacaccgctggcggtatggaatggctgccatcctcctcggtatgccgccgaatgggggcacttcattgaacgatggggcatcgttcccaggccgagtggtggtgggtgatgatgtggtgtgctgttctggtggcgctcgccgtgctgatatggccggggaacaagtccgggaggctgtaccggctggcttaccgcgggcgcgcggtcgattccgcagccataaacgaacctcgatatgccgactcacctcgcgtgggcgttgcgcaggtgattacgtccgccatcgcgcgattgcgaggtggcggcacattggttgaagcattcgaggaacaatccagcagacgcttcgccactcatcgcattactgtggaacggctcataacggtgttcgaacagcggcgtctgcccgacgaatcaccagcgcaggtacttgaagctgcacgcggggtcgccgccgcagcggttttgagcgatgagctcggttgccaagcggtgccatgtctggaagcggtattgactgcttaccggcagatgaggctgatgcagaacttgcgatcgcaagcatgtgccgttcctaaagccactgtggggctgctgagcgcgcttccggccgtcactgtggcattgggcgagcttctgggagctagaccattggcgttcttgcttggatcgccacgcggtgtggtctgcttgacattgggaggatgttgttatgctgccggcttggcatggatgcgggcattgttgaaaggcagcggattatgagtacggtgtgggtacacgccgcggcaggctgtgcggcgattgctggttggctgtataaggctctgtctcgtcatgacagccgcttgccgggcgaggagccggccgtagcgcatgattgcgggtcgtcatggaccatactcatattgcgtatgttgcaggtgtccttgcgtcagggctcctcgattccccgggcgcttgacatggtgggcaaagccgtcggcggcgactgcggcgctcgcatgagcgaggtcgggaactccctgaccagaggggttccctgggctgatgcgtggcatgccgctatggctgttcagcatgagggtgcgccagctgatagtccatccaagggaaatacgaatatcacgcaacgagatcttggcctgctgcaatcggctttggaatcgtcatggacgcatggcgatatgcctggtgtgcgcctcgaatccgccattgaacagctggaccgtgacgagcgtgctgctatcgaacggaatgccgcgaagctgtcggtaaagctactgatgcctacagggctatgttttctgccggcattcgtgctggtaggagtcattccggcgattgcgtccttcatgatgtgaatataggcgtgaactgagtgcgcttaggctggatcttgttgtattgctcggtattgtacttggctgcgtttggttatccacatttgtggtggacgacacgtcgaggtgtggataactcggcaagctagaaccacataccccgtttttcctggtgcatgaagcgttgatagtccacagtggtatgcaccccgcgtcaacccggcgcgggggccaaccactcacatacgcatggggaaggtgcgaagccactgcgcagcttcccctccttaccgaaaggaacgccaatgaatacccctatccccgtcatcgtcgacgggcaggccggcatctttgcgcacagcaaggctcgtgtggccacgctgaacgccaaggcgaaagaacggctatgcctcatggacgcacgcatccgcgccctcatggctgagcccgaagaaggcgcagccactgcggaatacgcagtcgtactcgttgcggctacaggctttgcggcggtgctggtcgccatcctgaagtcggatgccatcaagacgttgctgaccaacatcatcaaacaggctctgaaagtcgggtgacagccatgaagaccatgagatgccggtggaggctcgccagactgccgccagacctatgcacgggatcggccaccgccgaattcgcgatcgtattgcccagcgttatcgccatcgccgggctgatactggcaatgggacgtgtggtcatcgtttccatggactgccaaggtgccgcgacggcggctgcacgcgagtttgtggttaccggtgacgaatcatccgcgcgcagcatagctgcggacgttgcagggggagatccccgcgtcagcattgcccacaacggccaatcgacgagcgtgatggtcgaatgttcggtactgcccggcccactggatgtcactccaacgcgggtcaccggcaacgctacggcgataagccaataactggtcggctgctggctgggcggccgcaatagaaaggaactgcggtgcagggaatgcgttatgaggagggatcgggcacgatggccggagccatgctggttatggcggtgggcattgcgctcgcggtggcggcaagtgtgggcaacctcatgatctgccagaatcgagcgcgttccctcgccgatctcatcgcctttgacgccgcgtatgcgctgtggcatgtggatatcggtgatccatgcgcgcttgctgcaaacatggctgaagcgaatggcgtcacgctgggctcctgctccgtgcgggatgaagacgtgttggtaaccatcaaggtggaaaccatggttccggtggcatcatccgtggagcggatggctcgggccggaccggtgaattgtacggaaggagacaattatcacaataatggaccgtaagcactgatgctctggcgggcttctggacctttggttaaggtgagagcatgagcgagagtgaacgcacagaacgccgtcgcgtggtggccatggtgggcaatcccacttccgataagggccgtggtgccaaggtggatgcgcgagtattgggactgctggaggacgccggccgtgcccataacttcgacgtcatcgacatcaccggcgtaagtttcgacgattccctgaaccaggcgcgtgaacgcgcgcacgagtacgactatctggtggtggtcggcggcgacggcatgatcgcactcggtgccaatgccgtgggttgcggcggtaagccgctgggcatcgtggccatgggctcgggcaacgatttcgctcggggacttaagctgccggtcaatcgcatcgaaaccgcagtggaaggtatcgtcggcgctatcgtgcgcggatcacacattgatgtggacatgggacgcgtgacctctttggatggtggctatgccgtgaacccatccaccggcggggaatacgagtaccgggagaacaagtctgccgagcacccgattgaccggtactatgcgggcatgctgtcctgtggtcttgacgcaagtatcaacgaccgtgcgaatcattcgcatctgccgaccggcaccatgcgctactttgcggcggtgctggtggagctgacgcatatgaagcgttatgggtaccacgtcaaggccacgctggcggacggtaccacggatgaacgagacatcatcacgccgttgctgacgattgcgaattcgcgtcatatcggtggcggcatcgaggtctcaccgtactcctgcttctccgacgggctgttggacctggtgtggatgaatcatgtgccgaacttcggcgaatgtgcggtggccatctcgaacgcctataacggcaagctgctcgcctcaaaggtgttcgggtggaagcgcatacgcgagatcgaagtcacgcgagccgcagaaggcgacgagccaccggtgctgatggcggacggcgaatacatcgggcatctgccattcagggtagtggccgaggactgcgcgctacgcgtgctggtaccgccggccgtagccgcccgtgaggtggactcccgacaggaagtgctcgacgccatcgcccgagacggtcgcgaccccgtaaccggccagttcgcctgacctgattatattggctcccctcattaggctgagccgtaaagcaaacagcccagtgggatgtttgtaggcgagggttcgacgatagtcgaaccagaagaaagtcagccgtaagctgtccgcaattgcggacgagctggccgcgaagcggactgaggggagtgcgggagagcggtaccagagccaatggccgtcagacctcagacgacatagctttcgatatgcagcgtctgcgccatgacctctttgatggttcggtcgctgatgttcggatgcgagcgaaccagcgagataagccccacgattagcgtgaagaatgtctcatggacgttggtgattggcagaccatgcatctgctcgaaatcacgtacggtggtctgggcaatgtagtcggcaatacggtccgccgcgcggtcaatgaacttgatatacagttcggcgttgccatcttggatcatacggtttgagaaggggctctcgtcggcgattagggaacggagcacatgcacgatgtcgtctaatgccttgttcacgttgcctgtttcgcgcgcttggttccactgcttcaacgtggtgaggatttcgtcgatgacgtcatcgagtactgcgtcggctacggcttccttgtcttcgaagtagtggtagaacagcgaacgcgtcataccgacttcgcttgcgatgtcggaaacggtgattttggagaagcctttttccagacacaccttgcgcgcggcttgcacgatggcgtcgcgccgggcatcgccacgggtggggcgtttctcgtcgaggatatcgctcatgggcacctcctgactacaaccgttattgacactatgttaatacaaagaaagcggttaataacaataaaaatgcggtaaccgttgtcagatgaatgtcgttggaatataaagagttttcccgattcggcagctatgagcccggtttatcttgactttttatcggttaattctgagggcaaaggtaggttagtagctatggcacttgcactgtatcgtcgctatcgtccggacaccttcgaaggggtcatcggccaggaccaagtcacggtcccgctgatgcgcgccttggacgaaggcaagcttacgcatgcctatctgttctcagggccgcgaggatgcggtaaaaccagctccgcgcgtatcctggcccgttgcgtcaactgtgccaaagggccgacttcccacccctgcggcgaatgcgaaagctgcaaggacctggccaccggcggtccgggttccatcgacgtggtcgaaatcgatgcggcctcgcacaacggtgtggatgatgctcgagaattgcgagaacgcgctggtttcgcccctgcgcgcgaccgctataagattttcattctcgatgaggcccatatggtcacgcagcagggcttcaatgcgctgcttaaaatcgttgaagagccgcctgaacatgtgatgttcatcttcgccaccaccgaaccagacaaggtgatcggcaccatccgttcgcgcacccaccactatccgttccgtctggtgccgcaggaagtcatgggtccctacctggagacgatctgcgacaaggaaggcatcaagcccgagcccggtgtgctgaaactggcgatgcgcgccggtggcggctccatgcgagataccctgtctgtgcttgaccagctgatggttggttcggtcgaaggcgttatcacccatgatgccgctgtagccctgctcggcttcacgccggaggcgctgatcggtgaggcagtggatgcggtaatcaatcacaacggcgaagccctgtacggcgttatccagaaagtcgtggtcggcggattcgatccgagacgattcgtcgaagacctgctggctcgtgtgcgtgatctgctggtgcttacgttggccggggaccgtgcggaatccgtgctgtccgacacggctgaggccgaggatatggacgatctgcaccgccaagccaaggcgctgggactgggcgcactgaccgccatggcagacatcatcaacactacgttgggtgccatgaccggagccatttctccgcgtatgcgcttggaactgctggccgcacgattgttggccggcagtgaattaggctttgcaacagccgctcccgcgccagcttcttctggcatgccgcctgcggctgcttcttcgacttcgactacgtcagccgcttccggtacgggtgccagtggttttgccggcgcatcgcgaggcgggtttgccggagcctcacatggtggattctccggtgctgcacgcaaccagcaagcagccgcgcctcagagcaccgcttcccatgaatccgctgtgggagacaatggccctgtcagcagcccagtcagcgaccggcccgcgggctctccgtctgcgcaacctgccgcagcaactgctgctgccaatgcctggggtgctcccgccacgtcgccggccgtcccggcccaaccggtgacctcgcctgcggcatcggataatcggtccatcgacgagaagtgggatgcagccgtcgccgctttgccggaaaccattcgtgaatatgtgtcacgagacaaggtgccgaccgtaaaattcggtcccaaccgtaagagtctgccttgcctgtcgatgacgttcgacaagtcgctgagccagcacgctttcgccttggccgtggacaacagcggtaagaaggcggcgtccgtggtgttggatgccgtgcgcaacgagttcggtgccaatgcggttattgcaccttctgcggtcgcggcgaatggcgagcgagtcgaatccgtcaaacgtatgagcccggagcaattggccaaggtcaagcagcagattgccatggccaaggccggattggccgcgtcgagtttgggcgcgggtctgggcattcatatggggagcgagccgaaagctccgaagccgactgcaacaggccaagccgaggatacggacgacagccatcgagccggccaatccagtgcatccatggcggcgaagagctggagtgacgatgacccttgggccaagccggccgtaagcaacgcttcaccgcaatctgcagacgggttcgcacctaacgagcccgctgctgcgcctgcgcccgaagagcatcacaagaagcatgttgcggttccggacatcagtgatggtgttgatccgtgggccgctccggctgctcctgttgcacccgctgcgtccgttgcgtccgctggacccactggacagtccacggggcagccagccaccgcagctcccgctacggcagttgccggcgcaagcgatgatccatggaatcagccgcaatctcaggctacggcctcgctggcactgcaaccggtcgaagccgacccgtggaaccagccatatcagcagtctcctcacgatgatccgtggaatcagccgcaggggaaccatgctcaggcggctccgcagccaggagacgacccgtggaatcagccgcagtcccagactccggcttcttcggttcctcagacagtgtcgggcaatatgtcgggcgatgacccgtggaaccagccccaatcggttccgcagccggctgccggcgatgacccgtggaatcaaccgcagcccgcacagccgacgccgaatgccgacccgtggaatagccagccgcagccgcaaccgcaagtcgcggccgaggacgacgaatactcgatgaacgaccagtcgctcggcgaggcgacggccatgaatcttgacgatctgaaaaagctattcgaggtcaaaaaagtcgagcaattcgcggcagatgatccgaagaaccccaagaacatccagcctgccaagaagcactcggatgaataatgaggacgaataacgaggaatacccatggcacttgcttatgacggcgcaatacagcgactgatcgacgctttcgggcggctgcccggcatcgggccgaagggcgcgcagcgtatcgccttctacatgctgtccgcgcccgaagatgaagcgcgcgatttggccgaggccatcgaggaggtcaaggccaagatccgcttctgtgatatttgcggcaacgtgtgcgaatccagcccctgcccggtatgcgccgacccgagacgcgaccgttcggtgatctgcgtggttgaagagcccaaggacgtgatgagcatcgagcgcacgcgcgaataccgcggcctataccatgtgctcggcggcgcaatcaacccaatggccaacgttggccctgccgacctgcgtattcccagtctgctcaaacgcttagaaggcgatgaggtcaaggaagtcattatggcgctcgacccgaatattgaaggcgaggccaccaccagctacttgacccagctattgcgacccgtaggtgtcaaggtcacccgacttgccagcggcctgccggtgggctccgacttggagtacgccgacgaaatcacgctgggcagggcgctggccggtcggcgtgaggcctaggccagcgtatcattggcgctttcgcccttgcggcgcatccacggccagaatgcgccgtggcggatgatgcgcgcggccttgtgccgtcgtgccaaccagataatgaacagtcctgccgccagtatgcccaggccaacaccaagggcgatattgcgcgcgtcaagcacgtcattcggctcgggggccggcatcggaattgccacgcggtgcccggagataagcagtcgatgcgtgttcacgccgtatggcgtacaggtcatcaaggtgacacggtcctcacccggcacaatcttgagcttcgacgtgtcatccggcaaaatcaccgaaatgcggtccactttgtagcccaaagtttcgcccatgacttcgatgtagaagaagtcgccctctttcacctcgtccaaacgggtgaacatcagcgcttcaaccaacccgcggtgcccggtaatgaccgaatgggtggatttacctcccaccggcagcgacgtgccgtacaagtggccggcaccagaagccagtgcttcctcggaagtgccgtgataaatcggcagattgatggactgtttgggcaccttgattgcgcccatcacgccgttgccggtattaagcagtgactggtattccttgtctttctttgaggcggaatcctcgccgctggcttgggatcctccttgggcggcggagaacggatcgacggcttcacccaagatgggctggccggattcagcgagcttcttgttgtatgcgcgggccgccgtgagcttgtctttcgcctgcgggtaaggccagccggctacttctttggctgtggtggctgtggtggcggccaagttgcggtcggactcgaattgcaacgctagcgggaaacaggccacggcgattgcggcgatcagcaacacaatggtgatgatgcgcatcgcccacagattgcgttgcaggcgtcggcgctcggccacgagatcgctaatatcgatgacttcgtcaaatggagttggaacgaatgctgtgggctcgggatgcgctggggaaacgttgtcatttgcagatgtgtcatcaggcatggccgcgttgttttcccgcattttctgtgaggcacggttactcgtcgaacgtcgatgcagcaatgccatagtcgcctgttccttcgcttgatctgctcatgatttgcttatacaagacagccggcccgtcttagtcgtggttggcataggtgctgccgcaagtggcaacgccgcacgtgccacactgcgaaacgttactccgcaccaagcctttcatgcaacatgccgacgagggccatataggggccatataggggcaatgtaggggtataagaagtccgaaaaagtctagttcgtaatctagtgtccaacttccctaatagggatggtccaacttccacaacgaaaatggtccaacttccacaatagagcgggaccgggccttgaaaaggagagaggaagaagaaggtattcagttatggggttctgcggaaacctcgccggtttgctttcgtttgccggtaattgatagttaaccgctcgaatcccaaaggatggatgcggctgtctcaaagaaccaccggtgaaaacttgaatatttgctgaacaacgtaggccatacccgtgtccgcatgccggcgcggggtcgcggggtgaacgcgacagcccttataatcgttgcgtttgcgtagaatatcgaccaaacaaatccctaagagaagaacaaaggacagcagtggctctcatcgtgcagaagtacggcggctcgtcggtcgccgataccgattcgatcaaacgtgtggccaagcgcgttgtggagacggagaagaagggcaataaggtggccgtggtggtctccgccatgggcgataccaccgatgaccttatcgatcaggcgctgagcatcgactccaacccgtccgagcgcgagatggatatgctgatgactgcaggcgagcgaatttccatgagcctgctggccatggccattcacgccgaaggcagccgcgcccactccttcaccggtcagcaggccggcttcttcaccgacacccgttacggcgcggcccacatcaaggccgtgagaccggaccgcgtgaagaacgcgctctcattgggagacatcgccatcgttgccggcttccagggcatcaacgccaagggtgacgccaccacgctcggccgcggtggttcggacacgtccgccgtggcactcgctgtggcccttggtgccgacatctgcgagatttacaccgacgtggacggcatctttaccgccgatccgcgcatcgtgccttccgcccgccgtattccttccatcggctacgaagcctttctggaaatggcctcctgcggctccaaggtgctggcactgcgctgcgtagagtacgctcagcgtttcaacatgccgctgcatgtgcgctcttcgttctcccgtcgccccggcacgctggttgtgcctgacggcattgacccgcgcacgctgccgaacctcgactgagcgcggctacagcgaacaataatcgtaagtaatttcaaccaagacaaggcaagacatgactgaagaagaagcgaaatccatgggcgacctgttccctgacctgggccccgaggcaccggtgatttccggcattgcccacgatcgttccgaggcgctggccaccgtgcgtggcgtgccgaacgagccgggtatggcagccaaggtgttcaccgagctggccaccgccgacgtgaacgtggacatgatcgtgcaggccggcgcatccgttggcactgcagacatctccttcaccgtgcccgaatcggccgtcaagcaggtgcagaacacgctgctcgacaagcaggaagtgctgggttaccactcctttgatgtgaacaccaacgtcggcaaggtagccgtggtgggtgttggcatgaagacccacgccggtctggctgccaagttcttccaggccctgagcgatgagggcatcaacgtgctgatgatttccacttccgagattcgtatcgccgcgcttgtgccgctcgaccagctgaacgacgccgtcaaggcgctgcacactgcatacggtctcgatgccgatcagatcgaagccgtggtgtacggcggtactggccgctgagccgcgaattccgcgcctaatacgatgaaagccctccttgcggagggcttttgcgattttaacgagattcaactacttcttagtgatgtagcctagagccttgagcatttcggcgcattcgagggcgccgccggctgcaccacgcagggtgttgtgggccagacccacgaacttccaatcgaagatggaatcctcacgcagacggccgatggaaacgcccatgccaccctcgtagtccacgtcgagcttgacctgcgggcggtcatcctcggtgaggtactggatgaagtgcttcggcgcgtgcggcagctccagctcggaagccttggacgtgtagttcaccagacggtcgataagctcttccttggtggccttcttgccgaagttcaggaacacggtggcggtgtgaccgttgagcacgggcacgcggatgcattgcgaagtgatcttgaggtcgccgtcgaacggcacgatctcgcccttttcggcgtccacatggccgaacaccttgagcggttccttctcggacttcgcttcttcaccagagatgaacgggatgatgttgcccaccatctcaggccaatccttgaaggtcttgcctgcgccggaaatcgcctgataggtgctcacaaccacctcacgcggctcgaattccttccatgcggccagtgccggcgtgtaggtctgaatcgagcagttcggcttgacggcgatgaaaccacgagtggtgcccaagcgcttgcgctggtgctcgatcacctcgaagtgctccgggttgatctccggcaccaccatcggcacgtccggggtccaacggtgagcgctgttgttggagaccaccggggtctcggtcttggcataacgctcttcaatggcgcgaatctggtccttcggcatgtttaccgcagagaacatgaaatcaacgccagaggccatggactcggcatcgtcgccatcgacgaccaccatgttcttgacgtattcgggcatcggggtttccatcttccaacggtctccgaccgcctcggcatacgtcttgccggcgctgtgcgcggaagcggcaagggtgaccacctcgaaccacgggtgattctcaagcagcgtgataaaacgctgaccgaccataccggtggcgccgagaatgccgactttcaacttttcggacataacaaccttctgggtttgacggattgatttcacgttcgggcagccgtagcgaaatggccacacgtatccatcaatcttacgaatcgggcggaacaagaagaaccgggtgcccgtatgctgggccggatcgccggtgcgacgggacgccggaaccggctggaacgtcacggcaccgccccgccgcgatgctctacactgggagtcatgtcgaaggcgtcggtagaagcgcagcgccagttggaccgcatcgtggcattggggtacccggacgtggcggatgtgagcgccgcggcgttccgctccctggcccgtccgctgatcgaggcgctggagcataccgattttgacgagcgcatcctgctggcgcccacgcgcgagctggtgtcgcccgaatcgctgatttcccgtacgtcgatcaaccgcatggccggtttcgccacgatgccgccgcgcgacatcgcgagctttttgccgcaggacggcttcgagccgcccgagggaccgttctacatcgtcgtggaaccgcgcaccggtaccaagtacacacaaaccgcgagcccgacgtggcccgcaagctcattgactccgacgagcgcattccgttcacgctcgaggagggactggccatcgccacgcagcatccgggctggcttcaggagaaaaacgggttcaacctgctgggctcgcgcagcgccgacggccgcgtgcccagcatctggctgagccagaacgccccgaggctcggtgcggtgtggccgaattccaagcacacgtggcttggcaacgcattctgcatggcccgcaggggcgtctcgctgttccgttagtgagcggattgcgcggcttgtcggggccgtgccgcttgcccgctgacttgttgcccccgttgtctatttgaaagtgcgacaccctttagattggagattgtccagataaccagtgaaggggtgtcgcgccttgggtcaagtgtattcgcacctgtcggaagaggaacggcggatcattcagatagagatcggcaacgggacgagcatac

SEQ ID NO: 3857 - DNA, 2584 bp, Unknown
  R35_2m  MAG No. k141_18458
agcaaaacgcacgacggaagttgtgcgttttcttgtatgcggtgccctaaagtaagaagtgcttgagtttctttctgacgcacgaaggagaggcagtccgatgaaagttgatattctaacccgcgaatacccgccgcatgtctatggtggggccggtgtacacgccgaggaactgtccaaggtgcttgccgagcgcatcgacgtaaccgttcgtgcgtttgatggcaagcgcaccgaggcggacattcctgctatcccgaatgctgccgatgctaagggcagcttgaaggtcgtcggctatgacacgccttctgagctggctgatgccaaccccgcattgaagaccttcggcgttgatttgcagatcgccaatgatgtggacgccgacatcatccacgcgcacacctggtatgcctgcttggcgggctacatggccaagatgctgcacggcactccattggttattaccgcgcactctctggagccgttccgcccgtggaagcgtgagcagctcggcggcggctacaatctgagctcctgggctgagaaggatgcttacgagcacgccgatcgtgtgatcgccgtttccggtggcatgcgcaaggatattctgactgcttacccgaacctcgatccgaacaaggtggttgtggtgtacaacggcatcaccatggccgacttcgctaccccggcaccagacgatccgggttggaaggtgttcgagcgttaccacatcgaccgttcgaagcccaccctgctgttcgtgggccgtatcacccgccagaagggcctgccatacctgctcaaggcactgcacctgatttccaaggacattcaggtggtgctgtgcgccggtgctcctgacaccccggaaatcgccgaagaggtcaagatcgcgttcgccaagctggatgaggaacgcggcaacatcgtctggattgaagaaatgctgccgaagactgagctgaatgctttggaacacggctgtgatgccttcatctgcccgagcatctacgagccgctgggcatcgtgaaccttgaggccatggcctgcggtctgccggtcgtcgcatccgccactggcggcattccggaagtcgtggtcgacggcgaaaccggctatctggtcccgatcgaccagctgcacgacggcaccggcacccccaccgatccggacaagtttgtgcacgacatggccgccgccatcgacaagatcatggctgaccccgaactcgccaagaagatgggtcaggccggctacgaacgcgcccgcgacgtgttcagctgggagaccatcgccgacaagaccgtggaagtctaccagtccgtgctcgacgagcagaagaagtaagtagcgctgcaacgagtgcccccctcagtccggctgcgccagccagctcccctcaggtaccggtttcttggctcccctctctgaggggagctgtcaccgcagtgactgaggggagtcgtcagaccgcgaatcataggtagtatttcactcatgacaaacaccgtcctccaactcgacaacgtcgaattccggcgcaatcgtcgcgtcatcatcaccgacgtgaacctcaccatcaacgcgggggagcgttgggtactgttcggtccgaacggcatcggcaaatccaccgcggtcgacatgctggccacccgcacgttcccctcggaaggccgcgtattcatcctcggccatcaactcggcaaatacgacgtattcaaactgcgcacccgcatcggtctcgcctcggccgacctgggccggcagttccccgagttcgaggacccgctggacgccgtggtcaccggcccgtccgccgtgaccgggcgctggcgcgacacctacacgcaagaggaatacgcccgcgcccgccagctgctgcgcgattttcgcgtctcctatctggaaggcaaggagatgtggcgactgtccgaaggcgaacgcacccgcgtattgatcgcccgtgcgctgatgggcgatcctgagctgctgatcatggatgagccgactactggcctcgacttgggtggtcgtgagcaggtgatgcgcacgctgagccgaatcggcgaggaaagctccgagcgtgccgtggtgctggtcacccatcgcttggaggagattccggctggtttcgaccacatcgccatcatgggacgcaagccgattcttgctgaggacgccaccgaagcgggcgtggactcaatgggtaatcccggtgctggcaccatcgtctacaccggttcgttggagaatggcctgaccgacgaacgcttgtcggaattgttcggtatgcccatcgaagtccagcacacccacggccgctgggccgcctacgccgtgtgatgcttgtagttttttaggcgggattttcttcgccccctctggaggggctgtcagcgtaaactgactgggggaggtccaaccagttacaaaggtaaccatgacaaccaatagcaaactcgtattcatcgatatcgacggcaccctagccgacgaaaaccacgtcgtacccgaatctgccaaaatcgcttgcaaacaagcccaggccaacggccacaagctcttcatctgcaccgg

SEQ ID NO: 3858 - DNA, 5897 bp, Unknown
  R35_2m  MAG No. k141_18554
acgaaagccctataccagcgcacgtaggaaaaatttgacagcagcctcgaatccctacctccgtcgcatgtcggtgcaaactcagaaggaatgtcctcccgagagtacacatccgctctcattcattgaggtatcgcgcgtaacgagttttcattgtaaatgccacggtatggtgacggattttggaggacgataatgacaatacaatatacagcgcagccggctgatccggcgtcgagtgcggtgctgacgcgcgggctggtgaagcggtatggggattttctcgcggtgaacgggttgaatctgaacgtgccggcgcatggcgtgtatggtttgctggggccgaatggtgcgggcaagtccacgacgatgaagctgttgcttgggttggcctcggccacgagcggcgatatgtggatgttgggggagaaggtgggtggccggcacaggttgcaggcgggccgggtcggttcgatgatcgaggggccgagcttctacccggggttgagcggtctagataattgccgtatggtggccgattacctgaatctgccgggttcggccgcgcccgcgattttgcggcaggtcggtctggccggccatgagggcaagaaggcgagggactactcgctggggatgaagcagcggctgggcatcgcgatggcgttgatctcgcagccggagctcctgttgctggacgagccgacgaacgggctggacgcggaggccgtggtcgaggtgcgcgagatgatcatgggtctgagccgcgaacggggcatcacggtgatcatcagctcgcatatcctttccgagatcgagaagatggcgccggtcgtgggcgtcatcgcggccggccgcctgttgtatcagggttcgctcgacagtctgcgcgaggaggggcacatcgatttgcgtgtctccgacccgaagctcgcggcggcgatgctgggctcggaccggatcgactaccggtggctgccgggcagggatggcggcgtgctgcgcctgccggaactgccggaccagcggatcggcaccctgatcacgcagctcgtcggccagggcgtcgcggtctatcgcgtcgcctccgagcgcaagacgctggagcaggcgttcctcgaactgatcgaaagcccgcagagccgcgagcccacgcctcatcaggcgcaaaatgccatggattccgacgccgcacgcgcatccgcgcacgcatccccgcgtcgtccgttgccgatccggcaggctgcgggtcgggcggcgttcgcggcggcggacggaggcgcacgatgagcggcgcggcagtgttcgcggcgacgggccgccgtccgccgcgcccccgcgcgaagaccggcagcccgttcacgctggcgcgtctggagttgttgaaggtgcggggctcgtcgttctggtggatgctgctgggcatgatgctgctggtttcggcgtgggcgggcatggcgttcatgaaacgcgccggcagtcccgtcccggcgttgaggtcggccgcgttggccgatggcgaggtctatcaggtcgtgagcctgctggccccgattctggcggccctgttgaccagccgcatcgccgtgctggagacctcggagcgcatgaacctcacatggctgtcgttcggccagtcggacgcggcccggttcgtgggcaagctcatcgtcgccggcaccggcgtggggctttgcttcctgatcccgttgctgtgggtgccgattgcggcgaaagcccttggcttcacggtggccggctcgttcgccgcgctggtgtgggtgccggccctgaccggcttcctgtccgcgacggccacgagcgcggtccagctgatgttctcgatgatgatagacaagcaggccatcggcctgggtctgggcgtcatcgccggcgtgctgggctccggcctgggtgcgatgaacagacccgcgcttggctggctgttcccggccggcctgagttcggccgcgagcccgttcgtcagatccgtggatgcgggcggcaacgctacgatgctgctcgccgcgcgcccgtggatggccgtggcctccgcggccatggcgttcctcggctggacgctggtcagcatggtcgtggtcaaggtgaaggagtcaagacgatgacacacgcaaacgcagtgaacccggcaaccaatccggcaatcaacccggccgccaatccagctgccggcccgagccatgccgcgatgccccgcgcgcatgcggcgggacgccgcaggccgtccgtgtgggcggcgttccgctgggagacgcgcaaggccggcaacctgtggtactggatcgtgaccgtcttgttcgacgcgatcggcatgttcaacgggtggagccagtacaccggctaccaggcggagttcgccaggcagggcgtgacctgggccgcgatctggggtcaggcgatcctcctgccgagcatggtgttcatgccggtgcttgtggccgcgttcgccgcgcaggtcgaagccaacgagcatcgaggccgcaactggcagcggctgaacgccgccggcaccgtgaacgcggcgatcgccggcaagatgctgcacgggctcgcggcttcggcgctgaccgtcctcgtgttcgaggcagagttcatcctcgtcggacgcttcgccgccggattcgacctcgcgcagctcggcccgttcctgctgcgcggtatcccgctgaccctgtcggtatgggcgatcatgacgctcacgcaggccgtgagcgcgaaggccgaatcgttcgcgggcacgatgagcgtgatgatggtcctgaccatcggcggatgcgcgctgagcctggccgccccggccatcgccgggccgtatccgctcgccctgatcaccagcgcctccgccgcccgcgacctcgcgaacatcgccagcccggcatccatgctcgcctccacgaccgccgccgccatctggaccgccatcagcgccctgatcttccaccggctcgccaaacaagccgtctgagcaaccgtccacgggttcccctcacctgcgggagcccgccacccaacaccatggaaaggcttcatcatgcacaccaccggccaacacaacgaacgacacgacgaacaacacaacgcgccacacaacagcgaacagtccatacgcctgccgcgccgcgtcatcgccgtgctgatcgccgccctcgccgcgatcatcctcaccggctgctcgaccggcatcggcgtggccggagacaggaacctccaaggcacacgcacccaagacggcgactcctacacgggcggctacaaggccgactacagcaagttcaccggcgaggaggccgtattcggcggcaccggcaagaaggccagcatccacctgaacggcaccatcacaggcacatccggcaccggcagaatcctcgtgaccaacggcagcgacacgaaacgacccgtgcccgccacgaacggcaaaatcgaccagacctacaacgtcacaggcaccagcttctacatctacgtcaccggcgaccaattcaccggcaccgtgaacctcacatccaaggagcaatgaccatggcaaacacatcccaatacccaaaccagcaaccggcatatacgccggcaccgccggacggcgggcggacatggggcggctgcgccagcctcgcattggccgtccttccccttctgtgcacgctcgtgccccagctgctcggcatccacctctacacgacgggctgggtcaggaacatcctcgtcatcatcgacttcgtatgcctcatcgcttcgctcgtcatcgcgatcgtcacctatcccgaacaggcgggaggacacagaatcgtcagtacaatcgcgatactcctatccgcaggcctgactgccgccggcggcatgctcatcttcctcatgttcatcaaccagtaggaatccgactgacaacggaaaacttctttggaagttcatctaaccgcatacacgccatacagcacaggccacatgcgatacgcttcaacacggatggggcagcacccagggaaggagaatcgcatgaccgcaaaaaccggaaacgacaagcgccacgcggttaccggcctgatcggccacgtggccgcgttctggcggtccagcccggtcgcgcgcatggtcgcgccgatactgtgcctatgctacgacgtgatgatgctcaccagaatcgtattcacccatggcgggggcgattcggcagccatgaaactgttggggcatcaatggggaatccccgtactcgccatcctatgtgccttatctgttgtggcgctgttgttccgtatcagaatgccgttcgctattttgtgtgccatatgcggattgtatctatgcgcttgcttgcttcaagcggagccatatctgatgttgcctctcttgtttgccgtctacacgtctacagccttggccgcgaccactgaacgtgccattgcgggaatggttttgtcgggattgtcaatcgtttgcggcctctggattgcgaccttccccgccttgcagactgatatacttctgcccgagtccctccttgcgtcgatgaccgctattttagctctttggtcgcgcaacatcagtcagcggaggaagggagcggccttggtggaagctcaacagcaacgaagcctggaattggaacaggaacgcgatgaagaacgtcggcgggcggacgtcgcagccgaactgcatgacagcgtgggccataatctcaccgctatcattgcacttactgaaggcttggagggattgacacaggagccggtggaaggcgctataaagagtatcaataacttagctcggcaaagtctaggtgatacacgcgaggcggtacggaaactttcatctccggtgacgttacggaaaacaaaaacaggaacggtggaactgtgcagctggaatgatataaacccgattcttcaacatgctcgtgatattggaatcgccgccattctgaccgagacaggaaggcgtccagacgatctagcccaagctgatttatgcttccgagtgagtcgtgaggctgtcacaaacacaatgcgccatgggaaaaatataacgcgaattgtggtttcatgggatcatctggataatggggaactccatataacagtgcgtgatgatggtaagccaacgctgaacaaagataaccgcgctaaggggaccggtttcgggcttgctggcctagtgactgaagttacgcgggtcggcgggcaccttcactatggctcatcatcagggcaggggtggactgtttcagccattattccacagcaaaaacgtccatatattcctgtgcaggagggaaacgatgattaacgtaatgatcgtggacgatcagcagccgaccagaatgggtttttcgctcatggtcatgaaagatcctgcgcttcgcatgacgttgcaggcggggaatggacaggatgcccttgatattcttgcggcactgcaattacatgggcagagcctccctgacgtcattcttatggatgttcgcatgcctgttatggatgggctcgatgccacggcaagaatcaaacagttatatccttcaatacgtatcctgattttaaccacatacgatcaggatagctatgcgtttgggggattgagcgccggagcttcgggattcttgcttaaggacgttaagactaaagacctgtgtcgggccattcactcggtgtacgatggagacgccatactcacaccacggattacaaaggaagtgattcgccgaggggttcccaacgtcagcatcaatgctgacactctggccatcagaagtaaattcgattcattgggacctcgcgaattcgaagtctcagcactggtcagcgaaggaatgactaacgctgaaattgctcagcgtctcggaatgcaactggaggcagtcaaaaaggcggttagta

SEQ ID NO: 3859 - DNA, 5518 bp, Unknown
  R35_2m  MAG No. k141_19448
cacgtaaccgttcggcaacacaccagttgaaggagcgacgatgactaccacactgttcaccaacgcacatatcgccaccggagaacccggcagcacggctgcaagcaccctgccattgcaggacattctcgtcacggatggcgtgttcaccgcattcggccccggactcgcgcaacaatatgaggctcagggtggtgatctggcggccattgaggtggtcgatctgggcggcaaacttgtctgcccaccgttctgcgatacgcatctgcaccttgattacgtattcacggcccgcaagcccggtgcggtgaatgaaagcggaaccttgtttgagggcatccagcgatggagtgagaccaagtccgacttgacggtcgacgagatcaagcagcgcgcgaaaatcggcattaagaaagaaatgctgcatggcgtgcagctcattcgctcccatgccgatgtgaccgacccgaacctgacctcattaaaggcgctgctggagcttaaggaggaattgaaggatacggtcactctccagatcgtcagcttcccgcaggagggcatgtactcctacgagggcccgcatggcgaatcgggggccgagctggtggaggaaggactcaagatgggtgccgactgcgtgggcggcatcccccatttcgaacagtgccgtgagtttggcgagcattccatgcacacggtagttgagttggcttcgaaatacgacaagctcatcgacgtgcattgcgatgagacggatgatccgaattcccgttacgtggagctgctttcggcgttggcatataaggctggcattggcccgaaggtcaccgccagccacacctgttcgctgggatcggcggacaacgcctacttcttccacctgaccaagctgcttaaggcggcgcatatcaacttcgcctgcgcccccaccgagaacctgtatttgcagggccgtcaggataccttccccaagcgccgtggcatcacgcgagtcaaggagctcactgaggcgggtgtcaatgtgtcattgggccaggattcaatgcaggacccgtggtacccgctgggcaatggcaatatgatgctcattcttgattatgtgctgcatttggcacagatgatgagctttgaagaaatcgacgatgcgttgaagttcctgaccgtcaacggtgccactacgttgggcctgcgcgatatgtacggcttggaaacgggcaagccagcaaacttcattgtgctggacgccgatagtgtgttcaacgccgtgtatgagcgctgctcggtattgcgttcggtgcgcgccggccgcacgctgtttacccgcgaggagaccatcgacaccggactcgccctgctgcaataacccgacaacaaacagtagttccccttgacaggggagctatcgccagaggcaactgaggggtagaccaaaaacgtgcacattatgtgtacgtaggtctacccctcagtcagcttcgctgacagctcccctgtcaaggggagctttgctggtatgcgctagctacgctatcgaaacggactacttctgcggagcgtcaccggaatcggcgggagcggattcggctggttcagtggccggagtggcgtcggctggagtctcgccatcagtggaggcaccggcttcggacgaagtttcggcatcggtggcggcaccgtcttcggcgggcttatcggcggcggccggctcctcgaacttctcccccttgaaggtgaattcgccgaggataccctcgccttccgcatccacaatcacgcgctgaccgtcttcgagatcgcccatcagaatcttctcggagatggcgtcctcgatgtcgcgctgaatcacgcggcgcagcggacgggcacctagcagcgggtcgaagcccttctgcgcgagcaggtccttggcggcgtcggtgagttcgagcgacatgtgacggtcgaacaggcggtcgttgagctgcttgacgtccagatccacgatctggcgcacctgcggctcggtgagctgcttgaagacgatgatgtcgtccagacggttcaggaactccgggcggaactgctgcttcaattcggagctgacctggtccttcatgcgctggtagctggactcgttgttggcacccaggttgaagcccgtgttggcggccttggcgatgtctcgcgtaccgaggttggtggtcaggatgatgatggtgttcttgaagtccaccttgcggccctgaccgtcggtcaggtggccgtcatcgagcacctgcagcagcgtgttgaagatgtccggatgagccttttcgatctcgtcgaacagcaccacggagaacggcttgcggcgcaccttttcggtaagctcgccgccctcctcgtagccgacgtatcccggaggcgcgccgaagagtcgcgaagccgcgtacttctcggagaactcggacatatccacgcgaatcagcgcgtcctcatcgtcgaacaggaattcggcgagcgtcttggccagctcggtcttgcccacgccggtggggccggcgaagatgaacgaaccggacgggcgcttcgggtccttcagacccacgcgagtacggcggatagagcgggacagggcggaaaccgcctcgtcctggccgatgatgcgcttgtgcagttcggcttccatgttgagcagtttcttggactcggcctgagtcagcttgaacaccgggataccggtggtggagctgatgacctcggcgatcacgtcctcgtccacgaccatcttgacgtcggactcgccttcgcgccaggagtcttccttctgcttgcgatcggcttccagcttctcctgcttgtcgcgcagttcggcggccttctcgaagtcctgacccttgatggcctcgtccttgtcggcggcgatcttggcgatcttctcgtcgagttccttgagctcaggcggggcggtcaggcgcttgatgcgcaggcgtgcaccggcttcatcgatcaggtcgatggccttgtcgggcaggttgcggtcctggatgtaccggctggacagctcggcggcggactgcagcgcgccatcggtgatggtcacgtggtggtggttctcgtaacgggaacgcaggcccttcaggatctcgatggtctcggcgatggtcggctcgtgcacctgaatcggctggaaacggcgttccagagccgcatccttttcgatgtacttgcggtactcgtcggtagtggtggcaccgatggtctggagctcgccacgagccagcatcggcttcaacatgtcggaggcacccagcgcgccgtcggcggagccggcgcccacgatggtgtggatctcatcgatgaacagcacgatatcaccacgggtcttgatttccttcagcaccttcttcaggcgctcctcgaaatcaccacggtagcgagaaccggccaccatggaaccgaggtccagcgagtagacctgcttgcccttcagggtttccggcacgtcgccggcctgaatcttctgggccaagccttcgaccacggcggtcttacccacgccgggctcgccgatcagcaccgggttgttcttggtgcggcgggagagcacaaccatgacgcgctcgatctcgttggtgcggccgatgaccgggtccagcttgccttcagcggcttcgacggtcaggttgcggccgaactgatcgagaatggcggaaccggacttgttctgcttgtctgtcacgccgccggcgttggccagatcgcccttgccgtcaccggtgccggtgccggagttgccgcgaatcatatcgatggtcgcgctcctgagctcacccaggtcgacgtccatcttgatgagcacctgggtgcccacgccttcgccttcgcgaatcaggccgagcaggatgtgctcggtgccgatgtagctgtggcccagctgcagggcttcgcgcagcgagaactccaacacctgcttggcgtgcggagtaaaggggatgtgcccgttcggagccgcgttgcccttgccgatcatttcttcaacctgcttgcgagtggcatccagctccacgcccttcgaggcgagcgccttggcggccacgccctcaccttcgcggatcaggccgagcagcaggtgttcggtgccgatgtagttgtgctgaagggccctcgcctcttcctgcgccaacacgatcacgcgccgtgcacggtcggtaaaccgttcgaacatgcttgtccttcctcaattgacattccgtcttactctaccgattcacgatgacgtttattcatcggattccatgaattgcgccgtgagaggataagaaaacgatatgctggttctagattcacccgtagtcgattacaaggaggctcgaaatgagtgaagcgacaaccaagcccgacatcgttgtcggcgtggatggttccgatgaatcctttgccgcgctgaagtgggcgcttgaggaggcttcgttaaccggtcagagcgtcaacgccgtgtttggctggacgcattcctgggatatggggtccgaaccggacagcgacgaggcctgggccaaggtccgccacgacatcgccaacgagctgcgtgtgtgggtcgacaaggccgctgcaggcatcgacttcgatccggcgaatctgaagctcacctcggtgaaggcctccggcacttcggccctgctgcagatcggccatgatgcgcagcagatcgtggtcggccgccgctcgctgagccgtgtggcccgctggttcatggggtccctgtccgcttcgctggccgaggccgccgaagtgccggtgaccgtggtgcgcatcgccggcagcgaggatgagaccgtgaccgatgccatcgccaatgccctgacgccaggagaccagccggtccactacacgcagccacagcccgtggtcgaggtggctcgccgcccggtggtggttggtgtggatggttccgagacttcccgccgcgcgttcgacttcgcgctggaaaaggcacgactgcacgacgcgccgctgcatgtgatgttctgctggcagctcaaggatttgggcgttattccgggctatgagaacgccgtggcaccggtgaaggtcggtcagcgccgcgccgaggagattctcgccgggctgatggccaaggccgagattcccgatggtgtcaaggtcagcgcgaatgccttccatattcccgcgtccaaggggctgattgcggcatctcggtacgccagccatctggtggtcggttcgcgcggcctgtccggtctggacgcgcacttcctgggatcggtgtcccgtcagatcgtgaacttcgccgaatgcacggtgactgtggtgcactgattcaccgaaatcggcatggagtgctaacgcacgtctcggtgatgggcttgcagggaggaattctttattcctgcaaccgttgtagatgactttgttttagcttgtcgctagagcgaagtcatctgcatggcctcgttgccgaggccagctccaagactcacacggcttacgccgtcgcttggttcgcgtttcacaggatgccgcgttgcccgacgcg

SEQ ID NO: 3860 - DNA, 59277 bp, Unknown
  R35_2m  MAG No. k141_20520
catggggtccaagcccagcggcttcatgaaccgcaacgtcaacaacgccggctacatgatcggcacgtgggagccgggcggcgaattcaagccggaaaccgagttccgcctgtgggattgcggccacaactactacgccccacagtccttcaacgtggacggccgtcagatcgtctatggctggatgagcccgttcgtgcagccgattcccatggaggatgacggctggtgtggtcagctcaccctgccgcgcgagatcacccttgacgatgacggcgacgtggtcaccgcgccggtcgccgaaatggaaggcctgcgcgaggataccctcgaccatggttcgatcacactcgatatggatggcgagcaggtcatcgccgatgacgccgaggccgtggaaatcgaaatgaccatcgacttggccgcctccactgccgagcgtgcgggcctgaagattcatgccactaaggacggtgcctacacctacgtggcttatgacgaccagatcggccgcgtggtggtggatcgccaggccatggccaacggcgatcgcggctaccgcgccgccccactgaccgacaccgaactggcctccggcaagctggacctgcgcgtgttcgtggatcgcggctccgtggaggtctacgtcaacggtggccaccaggtgctgagctcctactcctacgcctccgaaggcccgcgcgccatcaagctcgccgccgagtccggtagtctcaaggtggattccctgaagctccaccacatgaagaccatcggactggagtagctctctcacctccctcacagagggaggttttttgtgtgcccctgtcgttcgccttcgcctatactgatggacggcatataacacaatccatcacacgaccggcaggcgcgcaggctcctcaccttactgttccacgccccggccgcaagcgccaccagcaaaccggactggcgcggaaagcaaggtgacatcccatgtccatcgccaagcgcctcaagcgccgcatgcccaccgtcatcgccgtcatcgtattgctggcagtctgggaaacgtgggtggatctaggacatgtctcccccacgatgatctccgcgccaagcgagattttcgccgccaccatcgaaacgtggaacacgctcggcccggccgcggcgatcaccggctatgagggcgtggtcggcttcctgttcgccgtgttcttcggcattatgatcggcatcgcactgtactgctcgcacacgttcaacgcggcgttctatccgctgcttgccgccgcacaaaccatgccgctgatttccatcgccccgttgttcctgatttggttcggctttgagatttccggcaaaatcgtaatcgtggcggtattcggcctcttccccatcgccgtgcagaccgtgcgcggactagaagcggtgccccagttctattccgacgtcgcattgacctgcggcgcgaccccggtctggacgctctggcacgtgaagctgcgcgttgccgcacgtcagatctatggcggtatccgcgtatctgccgcatacatcttcgccacggcatccaccgctgaatatcttggcgcgcgcaagggcctcggcatctggctgcaggctgcctacaattcgttccgcacgccgctgatcttctccgccaccatcgtcattatcctgatgacatgcgtactgatgctggcggtgaacgccagcgagcgcatcctgctcggcccggccggcgatgacgaagaccccgacgcggaccagtagttctttttaccgtcaaagacacaagccggcggccagaaccgactgaacggggcggcttctcatgaggtctccagccctgtctctataatggaacagctttaccagcgtgtggcaaaccggctttcttgagctttcatagggaatgtcgggggcgctggtcgaacggaaatcaaggccctccatatcgttttctgccgacttccgttcgaagcaatcccagagaacgatagagagacaacgaattagggaaccatcattatgaagaaaagccttgtatccaaggccgctgccctcgtgggcgcccttgctatgactttcggtttcgccgcatgtggtcagaccaacaccgccgactcctccaactccaacacctccgacctcaagaaggtcactttcatgctttcctgggcgcccgataccaaccacatcggcgtgtacgtggccaagaacaagggctacttcaaggatgccggtcttgacgtggatatcgtggccgtggcccaggccggtgccgaacaggccgtgaacaacggtgtggccgacttcgccctgtccaacttgaccaatgtgggcatctacacgctgaagggcgctcacatcaagcaggtgctgcaggtgcagcagaagccgagcgccatttggtgcgcactggcgtccaacaccgccatcaagtcccctaaggatttggatggcaagaccttcgccaccttcggctccaacgagtccgacgccgtggtgcgccgcatgatccagaccgacggcggcaagggcgagttcgacaaggtgaccgtcggcacctccaccttccagaccatggaatccggcaaggccgatttcggcggcttctacgccacgtgggaaggcgtgcaggccgacatgtacggcccgaagctcaactgcttcaccgagcctgactacggcgtgcccggcaacgccgacgccatcggcatcatcaccaatgacaagaccatcaagaacaatcccgacctggtcaagaagttcactcaggccactcagaagggttacgagtacgcgtacgccaacccggatgacgccgcgcagattctcgtggacgaagcccctgacgccaacctcaagcccgaattcgtcaagaagagcatgcaggttatcgtcgacggccagtactggggcgatccggccaagatcaaggacggctctttcgtgctcggcaccaacgacttcaagggcactcaggaatacttcgacttcctggctgaagaagacgcctacactgacagtcatgacaaggtgattcatgaggccccgcaggccaaggaccttggcaccgacgaattcctcggcaagtaatttccgatattccgagtttgaatctacgcaaaaatgcgtccttcccatgaggaaaggacgcatttttgcgtatcggccgataaggttattcatagcgaatcatgctaacaaggaggcgattccatggcccaacgtcctgaccgcattattgccagcatggataccggtgttgatgatgcgttggcgttggcgtatttgttggggtcggcggatgagtgcgagctgagcggtgtgatcgccagttatggcaatgtggatgcgaacacggcttatgccaatacttgcgcggtgcttgatttgtttggccgggcggatattccggtgtttttgggctccgagcatccttcttgggctgatgcgtttattcccgatgcagggtgtgcccagtttcatgggaaggatggactggggaatacttggctggcaggggccggggctctggctgatggagctggtgtgcctggtgatgatatgtctggggatgacatgtctgaggatgtgcccgatggggttgtttctgttggcgggtatttggtaggggacgctcatgctcatccggcgtcggggtcttgttctcgtgtgggtcgctctcggcctgtggaccgtccccagtcggctacatcgacagctctcgccagctggggcaaaaggaggcgctccgttgatgctgcggatgggattgagtatctgattgagcaggttcgtgagtttggccgagacgttaccgtgctggctaccgggccgttgacggatgtggatgcggctattactcgggcaccggatattgcaccgaaactcaggctggtgatgatgggcggtacgcttacccaacccggcaattgttgggatgcggtggccgagacgaatatcatccaagaccctgaggccgcgaatcgtgtatttcattccggcgcagacatcacaatggtgggacttgatgtgactcaccagtgtttgctaccgcgatcggcggccgaccagtggcgtgcgacggggaccaagcgcgggcggttcttggctgatctcgcggacttttccatcaaggcaaatttggaagccgaccccgcactgttctctggcggcatgccgttgcatgatccgttggcggcggcggttgcacttgattcttcactggtcgattgttttgatcttgcgttgcgcgcggagaccaataccggtgatttcaatggagtacgaggccggaccaccggagacccggttgggctggtgaatcattccatgccgcatgtgcatgtggcacttggtgcggattcgggacgttttttggatgagtttgcagagaggatggctgaggtgtgccggtaactcccctcagtccgctacacggacagctcgaccgcaattacggacaagctgccgctcgcattcttctggctcgactctcgtctcgccttcgcctacaaacagcccatcgggctgtttgttttacggctcagccccctcaattttgaggggcttaacaaggactatttcacaccccccagcaatcaaggaccggcttcgccggactcatcattacctggtcatgtcctatcggcctcggccaggcggcgtgaacgaacagtccacagggctgttctttatttcacgccgccaaatcggcgatcgcggtggatgtaatggtcgatggagcgccatagcacgtcacggccgcagtccgggaagagttcgggcacgaagtcgagctcggcgtaggcggcctcccacggcaggaagttggaggtgcgctgttcgccggaagtacggatcaccaagtcgcaatcgggaacgtccggattgtacagatggtcggcaatcatcttttcagtcacacggtcgccggaaatcttgccatcacgcacttcgcgagcgatggcggcgcaggcgtcggcgatttcagcacggccaccatagttgatgcagaacaccacatcgatgaccttgttgttcttggtacgctcctcggcggcctcaagctcgtcgatcaccgacttccacagcttggggcgacggccggaccaacgcacgcgcacaccccactcgtccatctgttccacgcggcggtggatgatttcacgcgagaagcccatgaggaagcgcacttcctggggcgaacgcttccagttttcagtggagaacgtgtacaggctcaaataccgcacaccggcttcgatggcaccggcgatagtgtcgaacaccaccggttcggcggcctgatgaccattggtgcggaccatgccgcgctgcttggcccaacgaccattaccgtccataatcacaccgatatggcggggtaccttgttcttggggaagtcgggaatacgggcaaggtcgctgaacggagctgcgggaatgtccaacgacgtgtaatcaacgttctcaaaagccatactcatgaatctatcaagcgcagcgaacgaatcgggcgttcgaggtaatactccccccaatcttcaaccaactcctgcacaaccctctccacaggcgcggcatcaagcaccgaccaatcgccacgaatcagtgcatcgaactggtttaacacgaacggcgcgatacggcgcgcatcggtagtgtggtcggcttcgcacatcacgccgccggacgcgatggacaggtacgccggctccgccttgccgcataccacgcaagtacccaatcgtggcgtccaaccggccaaggccaaggcgcgcatcacataggagtcgcctatggcttgcggggcgtgggattgtttggcgagcgcgttcaacgcgccgatgagcagccgatattggttcgtcagctgctcgtgttcggtgctggcgagtttatcgatggtctcgacgatgacgttggcggcctcatacgccgcataatccgccgcgatcggagcaccgtaagcggcgaccgcttcagcctgggagaccacgtcaagcgagcggccttcagcgataagcacatcgactcgcatgaacggctcgagcctggcaccaaagcgtgatttggtgcgacgcacgcctttggcgaccgcccgaatcttgccatgcccacgcgtcaggatggtgatgatacgatcggcttcgcccagtttggaggtgcgcaacaccacaccttcgtctcggtacagcgacatctcatctcctttccccgcgacgcccggcagactctactcaatgaagtagtcagtaaataaacaggccccagaaggcgaacaccaacagtatgtacagcatggtgaaggccaccagccagaacaggactcggcccagacgggtggaggcgagtaccgggtcggcaccggtgacgatgtctcgaacggattcacgacgagggggtatctgaatcagtccgcgggcggaagcgacctctatcagatgcataaagacgcgggaccaagcccatagcaccagcacggacaccacttggatgaccggccagctccaatacatgacgcccggcgtctcggtaggagcgctgccccatgcaagtttgaccacacccataatcacctgtccaagtccggcaaagaagatgagcagtgtggcaagagtggtgagggtcaaagtcagcagcgcgttgccgaaaccatgtgcgaaaccgagtatcacaggccgttccggtatcagcatgcccgcacgtttggcctcgcgtttctcgcgccgccatcgggcatccgccgcgattttgcggcccagcgccaccagtgccagcacgatggatgcgagcagcagcagtaccaccgtgacgtgcaggatcacaccatatatggtgccgacgcgtcttgccttcaaagcgcccggcagaccgattgattggtacagattggtgccggccaccttttcgctggtctgcgtgagtccggcggaagtgccgacggcccaatcgatgagatcgtccacataggcgtccgcaaacggggtgcccgcttcggactcatcccccaaacgcagcacatggttggcgaccggatagctgcgcacggtcacgttccagttatcggctttgtgggcgttgtagagaatcgcacgcacgccgtcgacctgcgccgtcatcacgtcttttgaaccgtaagccacataggtgggtacggcgtaagcggcgggtttgagcgtggcgaggtcggaattgttcagtccgaacaggccggtgtccgcgctgaacacgcgttggacgatggatcgatagccctcgttcgcgccgacaagagtgaagtcctgggtgacgaaaaatcccagtgattggcgtgggctgaacaccatcgggctcagaagaatctggaaggcgacgtccggatcgtcctcgagcagatatgaggagatccatgtcgattcggaggtggcatagatgccgaccttggcggcgtctacatcgctttgggctcgtaggtattcgatgacctgatcatatgccttggctgaggccggataatcgcggttgatgtcggtggtgctccagacgggtttgtcgagcactgcggtcacaaagccggccgaagccatatcggaggccacatcgccaaaggagttgtcacaggtgccgtatccggcaccgtgcatgaacaccacgccggggcgcttgcctgatgcgttctgaggttcccgaatcaataccttgatggcttggacgccgtccgcattggccttgccccgatcaccaggctccttggtcagattgccgtcgctggtcatgttcagcgtgatgtatcgctcggtgacctcatacgtgcctttcgctggcagcgtttctccggacgggttatcgaaggtgacttcggtatcgtcggtgagcgtggccatcgactggccggtgggttcgatgttccaaggcaccgtggtcaggttggaaatggagaccagcacgccgatcaggataatgaagatgggcaggctgaccatcagccggtgggtgctggtccacggcttggatcgaacagtcaggcgatgctcttcttcttgcgacacgtgcgctattgtaatctgaccgcgatatttacgccgagggcctattcggccgaatcagtgaccgggatgctggattgggaccacgaccgggccggtggaattgacgggcacttggccgtcggcctccatttgggcggcgatatcgttcgctatggtgagcagcgtgtcgacgatctggtcttcgggcacggtcttgatgaccttgcccttgatgaagatctggcccttgccattgccggaggccacgccgaggtcggcttcgcgtgcctcgcccggaccgttgacgatgcagcccatgacggctacacggatcggcgcggtcacgtccttcaggccttcggtgacggcggatgcgagctggatcacatccacttgggcgcggccgcagctcgggcaggagatgatgtcgaacttgcgggggcgcaatcccatgtattccaggagtttgcaccccaccttgacctcttcgaccggcggcgcggaaagggacacgcgaatcgtgtcgccaatgccctcggccaagagcgcaccgaacgccaggcaggatttgatggtgccttgccaggcggggccggcctcggtaacgccgaggtgcaacggccaatcgcccttggatgcgagcagtcggtacgtttcgaccatggtgatgacgtcatggtgtttgacggagatcttgaaatcgtggaagccgacgtcctcgaacatgtgcgcttccttcaaggcggaggccaccagcgcttccggagtcgggccaccgtatttggcgtagagttccttgtccagcgagccggcgttcacgccgatacgcagcgagatgcccgcgtcggtggcggccttgcagatgtccgggccgacttcatcgaacttacggatgttgccggggttcacacgcacggccgcgcagccggcgtcgatggcttggaacacgtatttggactggaagtggatatcggcgatgaccggaatcggcgatttgcggcagatttccggcagtgcgtcggcatcgtcctgactcggcacggccacgcgcacgatgtcgcagccggcggcggtcagttcggcgatctgctgcaacgtggcaggtacgttggccgtgagcgtgttggtcatcgactgcacggagatgggcgctcccccgcccaccggcaccgggcccaccatgatgcggcgggacttgcggcgcgggtgcaagggcgattcgctggtcaggtcgaccggatcaccggttttgcggaacggcttttcgatgggattttccgtattcaaggtattcatcattgcttgtttatcaggttgtcggcgcgtcggcgggcttcaagctcaagctggttcatttcctccacgtccgtgaacagcgggttaccacgaagctcggcgtccatctggtccagcacggctttgaccgtgtccacgatgccgaggtacggcagccgatgatcaagaaacgcatgcacggcctgttcattggctgcattgagcaccgccgtatgcttctcggaggcggccaggcagtggcgggccagttgcacggcggggaacgcctcatcgtccaacggctcaaaggtccaagttgcggcttgcgtccagtcgcacgcggcggccacattggtcatgcggtccggcgcggacaggcccagcgcgataggcagacgcatgtctggcggcgaagcctggcaaatcgtggcgccgtccacaaattcgaccatggaatggacgatggactgcgggtgcacggtcacgtcgatgcgttcaggcgacacattgaacaagcgggacgcctcgatgacttcgaggcccttgttcatcagtgtggaggagttgatggtgacaaccggccccatgttccacgtcggatgatgcagcgcctgctcgggagtgatgttctccatgtcgacacgtttccagccgcggaatgggccgccggaggcggtgaccacaagcttggcgacttcggcgtgggttccggagcgcagggattgccagatggcggaatgctcggaatcgaccgggttgatctggttctcgcgcacttgcgcgctgaacagcagatgaccgcccgcgactacggactccttgttagccaatgccagctgggaaccggccttgagcgccgcgatcgatggttcgaggccgatcgagccggtgatgccgttcaatacgacattcgcaccggatccggccatggcgatgaccgaatccggaccgccggtcacgcggacaccttgtgcgccggcctgtgcgagagccgcttgcagtgctggaaccttggtctcatcaaacaccgcgacttcgggcacatggaactgtgcggcctgttgcgccagcagctcgatatgtgctccgcccgccgccagaccggtgacggtaaatcgttcagggtgacgcgagatgacgtcaagtccttgggtgccgatggatccggtggatccgagaatgatgacggtggagttggaggctatgctcacttttccttcttcgtatcgtcattgttcagtgtggggaacgacaggtcggggatatccgaatcgaagttaccgccaagcgggaacagcagcgggaacgaatcgttggaatcgtgcttatcctgtgacggctgagctgcttccgtgtcgtgggaggcggcaacgtattcagatgattccacagccggacgggagaccgtgctgtctgcaggctgactatcggatacgcgaaccggaatggagttcgtgttacgatccggcttgctggtgggagcaaaggagaccggcatggcagcggacgcagcctcgtcggcagtgctattcacaggttgcgctgccggggcggagggtgccggggatgaaaccgaacccggtacctcattcaatttcagcgcattcggtgtatcaaggctgggcatcttgggagcgaaggacggcgcatccaccgccggaagttcctgagaaaccgcagccatgtgggcgagagcggccagagaggaaccgtcctgcaccatatccacgggctgttccgcgaacaccgacggggtcgatgacggagctgcggattcgtatgacgactgtgccggagcaaacgagggggcgctgccagcggtcacaccggaaaccggtgcggacggggcactggcgggaggctcagccgcaacagctgcggtaggagccacggaaggcgtctcggagacgggcttcgccgcagactcgttggacgtatgcaccgggtatgctgcgggagcaaaggaaaccggctgttccgcattggtgttattggtgcttgtggaagcatcgaacgatgcaggagccggcgcataggcgatcggtgccgccgcggccggcgccgcgggagcaaccggagccggagcagtgaacaagctctgctcggcctgatgcagggcatcgaatgattcgtcatgagcaacggcagacggcgcaaaacgttcgtcagttgccgggcgctgcgttccggaagcgaacaatggcgagacgccgttcgcttgaacggtcacgttcgtggcggtctgggcaggagccgtgggctcgccggacacgaaatcggccacacgtgcataggattccaagcgactcagcaactgcacgcaggcgttcaggaagtaatcgacctgtcgctcgtcatagcctttcttgcccttgcgctgggtgaagatcacattgttgaccgtattcgcattgagatcggccaaagaccgtacatcgtcttcggtcacgccgtcaacgcccaatgcggccgccgccttgtccacaatctggtcgaccagacgatccacctgcttcttatcgtacgaaggctgcttgggcgctccggacttgaagcgttcgcgctcgtcacgctccgcatggttctggacttcgtgatacagcttctcggtcttcgccttccacgtcacacgcccatgctgtgcgatctcccatgtggtctgcttatcgaccacggcacgttccagacgtccaagcgcggcgtcaacctgtgcgatcacatagccgttcttgcgcaaatcaaaggacacgttctgaatgtcatgctgggtgagattcatgccctcgctgtcatacagagcatgggcgcgctccaagaaagcgtccacctgagcggggtcatacccccacttgcgcttgcccgcacgtgcgatgcccgacttgccgtccccttcacgaagttcctgcgccatcggctattcgacctcctgctggatataaacactctgccacaactttacgtgactattgagacgcatctgaccaagaagaccgaaattcacgattttgtagcagtactgccggtttccttctgcgcgcatctcactgagatttcagaaccccttgccgaagactgtcagggaatatcgtcacagcccatgtctgtggaatgaggggattgcacgaagtgatgaaaaatgaaagtgggcaatgagggactcgaacccccgacatccaccgtgtaaaggtggcgctctaaccaactgagctaattgcccgcaaatgacaacaatagcgtatggccggcactgcgcgacacgtggtgtcgcatacgcgtgccgtagcgctcaatcgcgatgacattcagtcacgcccagcagcactacgcagcacgcgacgccagtcaacacgcttaaagtcaagcgtattgattgaggcttatcagcggcccctgccgaatgcgcgcaggcggatgccgttccagtccgagctgacggtcagcggggtggcggcgttcataccggcggtctgtgcggcggactgcacggtggaggagctggcggcacccgggcggccgggcttgggagtcagtatccacagcgggccgtcattgcccagtaccgcgtaggcgtcaacgatcgtatcggacaattcgtcctcatcatcgccgtcgcgccaccatacgatgacgccgtccacagcggagtcgtagtcctcgtccacgagatcctcgcccgtgagctcttcaatctgggcacgaatggaatcgtccacatcgtcgtcccagagccactcctggacgatatcgccgggctcgaaaccaaattcttcagcgttctgtgatgccgtttgattcacaggggacacattagcaagtcttcgcgaacaaatgcgttaacgcggccgaaaatcgccgcattgtgggcagacccatgcgagtcgtctcaccagaaacaacgactggccgcgcgtgtcatgcctcgcaatgaggcaaatcgtcggcctgccccttgccaatggccaccaacgcctgatacgcctcgtccagcgtggcgaccttgacgtcgcgcagaccatccggcacgcggccggccaaatccgaacaattcgatgcgggagccaggaaccatgtggcgccatcgcgcttggcgccaagcatcttcagctctatgccgccgattctgccgactttgccgtccttgtctatggtgccggtgccggcgatggtcttgccgccgctctcgttggcgggggtgagtttgtcgatgagaccgagcgtgtacatcatgcctgcggacggtccgccgatgctgtccacgtgcatcgtcaccttgacgtgttgcaatgtactggcgtcaatgcccagttcgtccgcatgggctttggcatacgccagaccgacggcactggccgaatcctgggaaccggccatgtcctgttcgactttcttctgatactggtccgcactctggcccaccggtaccgtggcctcacgcggcatgacctccacctgcggattggcccaaccccagacggcctgcgcgttgatgatcgggtacccgggcacgccggacgcgttcaccgtggtcagcagcagcttgccggaatccttatacgtcgtcacgccggtaccggtgatgtcgataaccgcaccatcctcgaccttgcccagcacgtcttgggtgggtccgggcatctcgatgacgtacgggctgggcagcagcagaatcaccacaccaagcaacacggcgaatgcaccgacgaaatggcgtttcggacgagcggccgcataggcccgagcacggctgattccacgagataggcgcgaatcatgcttcacttcgaacgatggcatgcgcccatcccccgcttccgaatccgcagtcgggctcttctgctcctggacgaagtctggttcctgattcctgtggcgtgcaaacataccctacagtgtaagcggagggccgaaatcagccgaaaacgaacataaaccgaaaatattgctcggccacgagcgaacaggcccgggcagaccctacacttggggtaacacaccgcggcaaagaaggatacgcatggacgacaacgcgattcacgagtggctgatcaaatgcttcggccccattcagggcgagatggcctggcagcagatcagccagttgcctgaggagatccgtgaacagctgatgagtcaggaccccagccgactgcccaatccatccgaagtccagcagatgatggccgcgttcagcgccggcggactcaacacgatgggcgatatgcagcgcactgtcgaggaagggccgatcaacgtcaagctcgccaagtcgattgccttgcagcaggccaacgcctccggttccgcgtccagcgtgtccgccgtggatggcgaggcggctcgccgcgcgatgagtgaggcgaacctgtggctggataccgcctgcgagttcaatcccgcgcccggcgatccggatgtgctgacccgcgccggctgggtggaaggcaccatcgaccagtgggcgaagttcgcagctcctgtggccgagtcgatgaacgacgctttggcttcggtgatttcggagcgtcttggcggcgcgttcggcgatggcgagattgccggcatgttcgccggaccggtgccgattccgattcccgacggcatgaaagatccagcccagctgatgaagctgctgggcaacacgtcctttgccatgcagttggggcatgcggccggcaatctgagccatgaagtgcatggcagtttcgatcagggcatcgcattgctgaagaatccggctggtggactgattgcccagaacgccaccgaatacgcgaggatgctgaacggtgagactcctgcgcccgaggccgatacggccggcacttcaaccgactcggtcaatccgttctccacatccaccgacgcttccgccaatcccattggcttcacttcggccggcaacagcgatactccggcaactgacggtaccgcccaagtctccggctccgatgcttccgccgacgccgccgcgttcgaggctgcgctctccggattcgagaccaccgagaaaattcccgaatctgaagtgctttccttcctggccctgcaggaaatggctcacgcccgcctgtatgcctcggtaccgtggctgatgccgcgtttcgaggcgctcatcggcaagtacgcacgcggcatctccatcgatctggatgcgatggaggaacagctgcgtgacgccacgtcgatggatccggagtcgatttccggcgcggtgaatctcaccaaggtcggcatccccgacactcccgaacagcgcgaggcgctggcttcgctggaatcgctgctggcgatggtcgagggctgggtggattgcgtggtgtggcgcgccggtatggcccatctgcctcatatcgaacagttgcgtgagatgatgcgccgcgagcgcgcgatgggtggccccgccgagcgtacgttcgaaagtctgctcggtttgcagctgcgccccaagcgcatgcgcgaggccgccggattgtgggagatgatcaccgccgccgaaggccctgaaggccgtgacgccaagtggtcgcatcccgatctgctgccttcgctgcctagcgacaagcccgcggatggcgcgtctccgtcatccgacgccccttcaggctcctcttccgatgccaacggttccgcctcccaccctgccgcagatggcaagaccggcgatatcgattgggatgccgaactgtccaagcttctcggcgaagacggagaagatggcggcaacggcaactcggaggatacgcaggcatagtcaaccggccttcggccaattcccgctcctgaatgttcaggagcattcagtatgcatgaacgacgcccgtcacaaaaatcgtgatgggcgtctgtgttgcgctccataaccatccttggtccgcgcatacgacaaatgcagcgaatcctcagctcgggtgatgcccacatacataagccggcgttcctcttccagcgcatcccccgtttccggcgaaccgtacggcaagagtccttccgaacagccgatcagaaacacgtgcttgaattccagacccttggatgcgtgaatcgtggaaatcgtaacgccgggatcgtcgtttgcggcaagtccggtggcgtccaaacccatcgcctccaatagcgcacgtttggacgcggcatcgtcggcgagcgcggatgattgccatcccgaatccttacgaacgcggtatttcagtcttgcattgcgcaaagcggcaccgaataccggctgttgggcgttgatgcgggtgagaatcgcgcaatcggacggcttggctccgttggcgaccaaccgggcgatgcgtgccgccacgccctgcgcctcttccatatcgctctcataagcggttcgggtaacgcgcgggccggattcgcgggcggaaaccagtttcaggtaatcctcacggttcggcgcggccgcaagcacccggttggcgagattcacgacttccggcgtcgaacgatagtcggtgttgagattgacatcggcggcgagcggcccgaattcatcggcgaaacgcagcagatcccagctggaggcaccggcaaacgagtagatggtctgggccggatcgcccacgacgcatacgttgcggttcatcgcgctcttgccgtcaggtcctcccccgcccagccacagggtcagcagcctgtgttgcaggggcgagacgtcctgatactcgtcgacggtgagccagccgatggtggaacgaatttgggcggcggcttcgggaaaatcatccatgatatggcatacgagcagcagaatatcgtcaaaatcgatttcgccacgcgaggtcttttcctgctcgtaggcgctgtagacgtcggcgaaccgagcggtgtcgagtccggcgggcggttgcctatgggcgatggcacaggtccgtgcataatcttccaccgccaccaacgagattttggcccaattgatttcggcgagcacatcgcgaacggtcagcggatcggcatcggtacgtgcggtggcgcggatgatcgcgcgggagacgacgtcacgctgatcttcgatcacatgcgggaatggagcctcgcatatgtccgcccagacgctgttgagctgatgcaatgccgctgagtggaaggtcgcggccgtgactccggcagttcccgcacccgaaccggaacgtccggcaccttcccctacgccgagctggcccaaccgtgcgcgcatttccgccgccgcttttaccgaaaaggtgacggcaagcacccgctccggcttccatgccccggtggcgcaggcataggcgatccgccgcgtgaccgtgcgtgttttaccggcacctgcgccggcgatgatgcgcaccggcccttgcaacgtagtcgcggcggtacgctgccgctcatcgagcccctcaagaatcccctgcgcctgttccatgcgtccattgtggcacgattcgcgctcacggcacgactcacgcctatggctgaatcgggctcacgacaaaacatcgccagaatcatgcgttttgcgtgtcattctggggtgcgaatcgccacggatgtattagtgtggaagggtgatgaaacgtagcgattatatgttggcggcactcgcctcagccgtcctgccgaatctgggggtggccggtgtacgcgagaacgtgcaggccagcgcaaccgacgaggccaaaggcatcgatcagaccgtgatccaagatgcctcgggcaagttgtacgacgtatacgccactgacaccagggaagggcgtacacgtctgatccgccgtgtgaaagcggcgcagacactggcagccgcgcgcgagcttggtggcctcggcttcgatatggaccgtgtggtcgcattcgtcccgggagacgtttcccaacccggccagacgaccaccgcacaggccgtggggcagcaggcccaggcggagtccacaccgctgaccccgcgcaagcccggtcccacaggcgagacgaccgtgatgatcgccgtccaccgtgatggtcaggcacgtcctctcgacctgttgacattggatgactgcgcggccgtcggcacctccatcggagccattcatcgcctgccttcgacttttctggccaatgccaaatatccggtagtcaccaccggtcagattcgttcgcagctgaccgcctggattcgccgcttacgctccgccggccatgttccccaagaaatcaccgacagctgggcgcgcatcatggacaccgagggattgtggtcgttctccacctgcacggttcacggcggattctccgacggcgacttcctgttctccggttccaccatcaccacggtgaccaactggcaggatatgcaggtcaacgatccggcacgagaccttgcctggattttcggcaagctcgacgaatcccatcgcaacgccgtgctctccgcatacggccgcatgatgggctctcgacttgacgatctcatcatgctcagggccaacctgtggctgcagatggaacaggtgggcgaattcattcaggcgttgaaccgtgcggacaacaatcgcatcatgcagttcaaggcacaggtcgaacgactcgcacaccagttgggcgtgatcaagcacactccggcaccggccccagccgcagggtcggccgccgcctcgtcgacggagcccggttccccctccacaatcaccgtcggcacattgttgcaagacgaccgtcatcaggcacccgccacgcaggtacccgcacaaccgcagcagtccgaaaccggtaccgcggcggccgaggtctcggacgacacgcccgatccagatcgcaccggttccgctgacatcgtggccgctggcgacgtggatcttaccccggaagtcgaacccgatgctgaccggaccgccaatcacccgcaagcgagtgtctccggcaccgcaaccggtacgggatcgaccaaaccgcagccctcacatggcgcttcccattcttcggtgacgatcacgctgaaggagctcctcagtatgaacgggcatagcggcacgacgtcaaccgacgcttcccctgcatctcaatccgccgccccgaccgacgatgcggtgaatgacgatactccggacagtttcgttcagcacggagcctcgagtgcccaaaccacggtgattccgctgttggagcgggaagaacgcgctctgcgcgatgcccgtgccgggttggacgggtatgacagcgagggcaatccgctggccgaatcatccgcatcatccaaataatgtcgtgtgcggtgttccgcgccacgccgagcgcgtaacaccgcacatgacgacgcagacacgcggcacaatagagtacagaacctcggccggtgacggccacttaccatgatgttcgtcacaaagacggcagaacaaggagccttatatggatatcgagctgggcattcagaacgtggcacgaccggtgaacttcagcaccgacgaatcagccgataatgtgagccaggccatcgcgcaggccgtggccgacaacgcgacgatcgatatgaccgatgacaagggccgtcgcatcatcgtgcccgccaaggcactcggttacgcgatcatcggctccgaaaccaagcacgccgtcgggttcggcacgctgtgaccgtgaatcgcgcataagcggccttgggcatcatctcaaggccgctttgtattgccgcgaatcaccgatataacgggagcacgccgcgatgaacgatctcttcgacagtggcctcgtcggtgaggttctcccccagtttgttcggtttgcctttgccatgccagtcagatccgccggtgaccagtagctggtgccggcggcagatggtgagcagccgttctcgttgctccggtgaattgcctcggtgccatacctccagcccgtccaatccctcgctgatcaacgcttcgatctggtcatcggacagcagtctgcggttacggctcacatcaccggcatgggcgatcagaatcacaccgcctgcccctttgacggcggccaccacttcatgagaggtcggcgagggcgtgggaatatagtatttggatgaggcgctgaccgcattcgcaaacgcttccgaacgagtccgatatacgccggcactcaccaaagcatcagcgatgtgaggccgcccaatggtggttttgtcaccctccttgacttgggcgagcacggattgccaggtaatcggataatcacgagacaacaattcgaccatgcgctgcgtgcgttgcaaccgtgcggctcgagtatcggcgaacaagtccgtgatgtgctgattcgtgggatcatactggtagccgagcatgtgtacggagacgttctcatccgtggcggtgatttcggtgccgcggagcaacggcaaaccgaccctatgggatgcggcttcggcctccggccagccggcggtggtgtcatgatcggaaatggccacgcccttgagtcccaatgccttggattgttcggccaatgtggccggcgtttccgtgccatccgagaagacggtatggcagtggatgtcccacccgacggcgggcggctccaaaggcatcacatatccagtcatacctttcatcgtaacctcatctcagcattcccacgcaaggcgcagacaggtcgtcaccttctgccaacggccaagaccagacatccggcactcagctgacaaccgcagaggctaatctggagcgcagcgctatcgaaaggggcatgatgactcgtaacaccgcaaccgacacatcatccagcaccacgaacaccacgccgcttggcttggcggaggcgcgaccgttgattggatggcgccacagtgccacttggacatatctcatcatgctgatcgcctcggcagtggcattgggggcctcgctcattctgtccgccgagactttgcagttggctcggcatccggagtccgcgctcggctgcgatctgaactcggtggtgtcctgttcggcggtggcccagtcctggcaggcggaaatcgtgaagttcggcgggctgagctatccgaacgcgttcttcggcatcgccgccgaatcggtgttcattaccatcgcggtgatcggtttggcgcgtgtgaaggtgccgcgttggttcgcgacctgcacgtggctgggcggactggccgctttggcctactcgtactggctgagcacgcagtcactgttcgtgattcacgcgctgtgcccgtggtgcctgaccctgatgttctccaccaccatccagttcatggcgttgagccatgcgaccgtggccgtgcagggattgccgtcacgtaaggctgtggcggctgatgatggcgacggtgaggccgatgtcgcggcggtgccggccggactcaataagtattaccgcctcaacatcgacctcatggtcgatatactgtggatcgtggcgatcgtggtactcatcatcgtcaccgaaggcgcggccctgttcgctgcctgattcctttacaacaaatcgatatcggcgaccagcgtggctgctccggtcagtttcacgtcgctgtcggtgacgtccacgcgcagggtgccgccacgtacggtgatatcccagtggctgatgccggtcttggcccgcagcacaacgcctgtggcgcacaggccggtgccacaggacagggtttcgccgcagccgcgttcgttgacgcgcatcgtggcttcacccacgccggtgttctgatcgatgtcgtcgacccgcacgaattccacgttctggtcggattcgatggtcgggctcaccacgggcttgatgaccagatccagcgcctcgaccaccggcagggacgcgaaggcgtcctcgattaccgcgaccacatgcgggttgcccatatccacgaacgtgccgcgcgccgagccctcagcgccggggatggtgacctcgtaggcgtcggtttcgccgatcttccactcccccatttcgacctggaacacgttggctccgtacggcctcatattgccgcgtggcgtcagaatcttgacgccggcacgggtgccgaggcggaacggctcggtggagtcggccacgccctcgcgctgagcgaacaaggtgatggcgcgtgtaccgttgccgcacatctccgccaacgatccatccgcattgcgatagtccatgaaccatttcgcgcccccggccagtacgtccgaaagctgatcatcgcttaaatcagacacgaaatcaggcctggtcaggcgaatcaggccgtcaccgccaatgccgaagtgacggtcgcacaggaatcggacctcatcggcggaaggctcgaatttgccggacttgtcgaggtacaccacgaaatcattgccggttgcgtgtgtcttggttactcgttgcggaagactcatggctttcagagtactctagggagcgaaacaacaccgcaaaacaatcggctttgtgatcggtcgcggcaacatacggttgcaggcatggctatagggaggattcaggcatgagctcttcggctccaatcggcgtattcgattcgggtcttggcggtatttccgtggctcgccaaatcgccaaggatatgccggccgagcgtgtgctgtattttggcgattcggccaacgccccgtacggcgtcaagacgcctgagcaggtgagggccctgagtttcgatattgtcgaacggttcgtgcgtcaaggcatcaaggccgtggtcatcgcatgcaacaccgccacttccgccgcggtgaacgatctgcgcgaacactacgatattccgatcatcggcatggagccggccctgaaagtggcgtgcgaccggggtgacgtgccttccgacccgcatcatattccccagagggtgattgtggcggccactcccctgactttgcgtgagcggaagttcgccaagctgatggatcgattcgattccaacaacacgattttcaaggagccttgccccgacttggtggagatcgtggaatccgggcggctcggcgaccatgacctggtgatgcgcacgctgcatggctacttcgaccagtacgacatggagcacatcgattcagtggtgctgggctgcacgcatttcgtgttctaccgcgactacttccgcgagctgctgcccgaacgggccgccgtcatcgacggcaatgagggcaccgtgcgccatctgggcgttgtgctggagtccctgggcaaactggcacccgaagacgcgaccggcggcgtggaactcgccaattccgatctgtccgaacgtgttacacggctttcacgcgacctgctgaatgcgtgatcggatgcatgatgatgaataggaggctgatatggcactgaagaccgcgatgattgatgtgggcggcgggttccgcgcgattttcggctgcggcgttatggaccgcatgctggaggacggcatcgacgtggacatgtgctacggcgtttccgccggcgcggccaacatgacctcgttcatcgcccgccagcacggccgcaaccacaccttctacaccagatacgccttccgtaaggagtacgcgagcgcggaaagcttcttcaagaaccgcaacttcgccaatctcgactatatctatggcacgctgagcaaccatgacggcgagaatccggtggatttcgcggcgttcgaggccaatccgaccgggttcaccgtggtggcctgcaatgccgagaacggctcgaccaagtatttcgacaagtcacgcgtccgcttcgatgatttcgacatcatcaaggcttcgtccgccgtgccggtggcctgcgagccgtatgtggtggatggcgtgccgtatttcgatggcggcatcgccgatccaatcccggtacagaaggcgctggatgacggctatgatcgcgtgatcctgattctctcccgcctgcgcgacgaagtgcgcaagcagcagaaggatctggccccggcccgcatcctcgaacgctcccaccccgccgcggccgagaggctgcgcatgcgctacaagacctacaacgacgaactcgaactcgccaagcattacgaagcggaaggcaaagtgctgatcctcgcacccgaagacctgtatggtctcaacaccctgaagaagaacttcgagggcctggaaatgatgtaccgcaagggatacgcggcggccgaggccatcccggcgttcctcgggaagtgacggcaccggcgaagtacccgttcacgccaaaccgtatagccgttccgcattggcatgagcgatggcgtcgataacccgtttcgcctgattcgcgttccatgcgccatccgatacccagtcgatggcgattcgcgcaatatacctgcggaacagcaccgcggccagataatgcaattcactgatgccgatgccgtccgacgcatagagcaacttgtcaaatgggcaccacgccagaacattgcgcagcacttccctcacctgcgctcccatatgcggattggcaaggctgacatccatgtatacgttggcatgcaccgagcagagaaacgccgcttcacgctcgtatggcacgcaatgcagaagcggaagtgtcaaggtgcaggcgcagatcgccggacacgttgaatttctcgttttcggcgaacgagttgtccgcgccgaacaccacccagaccagggcggcgcccaatccgttgcgttcgaaggcttcacgcctgcgggcgggaacggatttggcacgggtcacgccggcatagtccacataggtgccggtgacgatgtccacgggcttgcgttctgcggaaacggtgttgggaatgaagttggacatggcgatttcctttactggtaagaagacaatgaatggattgttagtaagttatcgatatgagtagctgaggcggaatgcggatggacgacaagcccgattcaggcgaaatacttctgaaggttctcgctggcacccagcttcttgcggaagaagccggtgcgaatcgcaatgatgatcaggccgacgaccaacctctttctgtgtttccccaaaccatcgggggaggaacgttgtggttcactgtagtacccgcgaccggctgatggggccgtgtccttatttgaaaatcatcgcttttgatataaggcgtgccatctcccgcatatccgacgcgacccgcgttatgatcactcgcgcgagcctcgtcggacgaatctgtcggccggccactgagtttttaacaatcaaccggatatgccatcgagctcattcgaggctgtcgtgtgcgagccgggcgaaggtgccgttgcggtcgaccagttgacggtaggtgccggtttcattgacgtggccgtggtcgaggacgataatccggtccatgccggttagcacgcggggccggtggctgatgacgatcacagtggtgcccgccggacggttggcgatcagatcatggtagattgcggcctcggcggtggcgtcgaccgcggcggtcggctcgtcgagtatccacaacggcttgccggacaggaacgtgcgggccagcgcaagccgctgccattgcccgccggacaggccaacgccgccccactcctgaccgagctgcgtatccaagccgccgggaagcccatccacgatgtcgagcgcgcgggcgcgacgcaacccgtcacataactcatcgtccgattgccgcagagcgggatcgatgaactcgcgcacggtcacctcgatgtgcgtgaaatcctggaacaccatgttcgacgcgcccaaccgttcggcccacgaccccaaggtacgaccgttcccgccgtccgcgcccgagggcagggtcacggtgccgtccggggcgtcgaggatgccggcgatgagcttgacgagcgtggtcttgcctgacccgttctcgcccaccagtgcgacgatcgatcccgcttcgacatccaacgacacgtcgtccaacgccggagtctgaacggccggaaccgacgctgccgacgcgtcatccgcgtcatcgtcatgctttgcaacagtcggatacgcgtacgtcagatgctccacgtgcacgccgaccggaccggtcgtttcggggatcgcggggttcgcgcgcagcaggcccatgagccgttcgtaggcaagaatcatcggcgtggacgccatgaggttgccgaacgcctcgccagtggtgcgcgtgaccgacaatcccgtcatgatgcccaccaacgcggccgggatgctcgacacggacgcatggccggacgtcaggatcagccagaacgcgccgcccgtcagcacggcgaacacgagcgaactcacaccggtcaactgcaccgtgcgccacgagatacgctcccacatgccggccatattgaaatagcgcacgcgcgcctgcgcagggatgccgaacgaaccggccgtggccgcgatctccgtgctcgacggtggataatccaacaaccgctcgaaatagttcgcccgacgcgactccctgccgcgcttgggccataactcgttcgtgagcttctccacgccgaactgggccaacagctccgggaccatcgccaacgcgatcatcagcgccgccaacggatgcatatgccacaaggacgcggccagcatgaccatcgacgccagcgcgcccaccactgaggtcgcgtccgcggcctgcgaagccacgttgtacgggatcgcgtcgcgcgcggcccgcacctgcgtcgtcacctcgtcgtccaacgtctgcgcgggagtcagacgcgccagcgcgtcggtcagatcggactggtattcggccatcaatggctcctgcaacaagtcacgcatgttctgcgccaacgacgacgacaccgacatcaacaccgcgcccaccgtcagcaccgccaggatcactgcgaaccggcccacgcccagccccgaccccataccaagcccgtccgggccgcacgcccaaccgatcagccacacctgcaacgacggcatcgccatcatcaccaacatcgacagccacatcaccaccgtacgcaccggacgcctacgcaacgcatacgcactcgtccgccacgacgtcgccaccgcatcacaaaacggccgaaatcccgcgacaatcggcatttacgacgcctccccacaatagcgaaacacagatgcaatgatagaccgcccgagttctaaatagaagcgcaacacctgtctatggctgaaagtgttcaagttcataaccagagagaaagtgtcgcgctcgatatgagagtgtattcccacctgtcggcagaggaacgtgtccggatcgacgagctgaggacacagccgatcggcgaacgtccgaaacgcgtgggcccgcgccgcaagttcggccattatgagtccgacacggccgtcggcgcctccccgtcgaggcggtgcggcgacacgcaggtcgaacgcaagagccgccgtctgttcgccgggttcatccccgacaagagcgcgctgtccaccgcgcgcgccgaatacgacatctacaaggacatccccgcgcccgcgcgcatcgaccggacctgggacaacggcacggaatcctcctgccacctgctcgtggacgagtcgctcggcatgctcacctactatgcggacccgtactcctcgtaccagcgcggcacgaacgagaaccgcaacgggcgcatccgccgccaccttcccaagaggaccggtttcgacggcctgacggacgccgacctgcaggccatcgtcgacgagatcaacgacacccccatgaaggtcctggactgggaaacacccaacgaggtttgataccgcgaactcggcaagctaatgtcgaagacaagctacccaaagacgaacgttgcacttacaaattgaattcgggaagctcactcatgtttaatgtaatatttagaattacattaaacatatcgcatgcaccgcatttttcgagaaacactgtactctcggcaaagacaccaccctacacaccgcaactttccaatgacgcctcatgaccagctcggaaccggtccgacaacagaatcgttgagcacctccttatcgaccgccatcacaaatatcgcctgcatcgcaccaccaaggccccgatcactcattaaccagcatcgtgagcatatacatcggcaaatatgtgacgccttcctcttggaacacgttggtttccgcgaacaccatcgccttgtcaatggtgtagccgtcagcgctcaacgcattgtcaagcgccgcatgagaacggtaatatctgcccgacttaatctccagggccaaaacatcaccatcatcggtctctatcaggaaatccagttcgccaattccttttttcgtaaagtaatacagattggtgaatccatgcgcggtaagttcctgagccacgacattctcatagactccccccatgttcatcgcagcctgaccatccagtatgcccagtgctgacttttttccatacgagctggtcagcaatccaacatcggaatagaacagttttagcaatcgacgttctttgctggctctcagcggggccacgggggcggcaacattaaatacgggcagcgcaacattagcacgggtaagccaaaggaattcatcttcaatctgcgagaatcgtttgacttcggcaatagaactgacttggaatctgcgattttgactttgcagttcactagggataagtcgatacatttcttgaatgaccagtctcttatccttcggcgcatactgcttaatgtcatgctcatagtatgcgcgaatattggtctgaatcgcacgcactggatcgatgaccttgctctcaacaaacgaagtcactgcagccggcataccaccgactaacagataccggtggaacaaatccgtcaaacgctgatggacaaaatcaggaacgggttttacggcaccgtaactgtcacgaacaatgtcgaagacggtttccgacagccccagtgcccaacagaattcttcaaaatccagtggatacatgataaattcatccaagtatccgacaggcagggagcgcacatcctccagttctacgcccaataatgagccggaaagaatatagtcatagtctccccggtccaccagtcctttgataaaagtgacaatctgtggacatgcttgaatttcatcaatgaagataagcgtcttccctacaaccaacggcccttgtgcagcaacagaaatacgcagcatcaaatcatcgggactggtggcttgcgcaaacgaacgacgcacgctgtcgtcaagcaataggttgaactcagccatatgctcatactcgctctgcccaaattcctcaaccagatacgtcttcccaacctgccgtgcaccggtaatgagcaatgcttggttggtcttatgctctttccagaaagcaatacgctgatatgccttgcgtttcaacatgttccaccccttcgtttcacactcgtctgattttgtaatatcctgtattttacacttatcgagttctataaatgccgtatttttgcattcgtcacaatctataagtagatgattctcacactcgtcacaatctgtatacggcccatttgcgcacttgtcggaatcagcgcggaacgcagtgaagcccctcgcttggaggggcttcactatcgatggatgaggatttgcaaacggggtgattacttcgtctcggccgcggtgagcatggccttggtgacctgctcgtagaggtcctggtaaccgccgggcgtggaggcgggcagcaccacggtcttggtgttcttcgattcggacaacgaacgcatcacgtcaagatactggttgaacagcaccacgttgttcacatcgttgatgtccatgcccacggcctgcagactcttgatctgatcgacgatgccattggcgatttcacggcggtagttggcctggccctcgccctgcagacgggtcttctcggcttcggcggcggcctgcgtctcgatctggatgcgctgggcctcggcgcgctggcgggtggcttccttctcgcgctgggcggcgttgatggagtccatcgcgttcttgacctgcgggctcggatcgatggcggtgatcagcgtcttgaccacggtgaaaccgaaccggctcatctcggcgccgacggtcttctgcacgtcgaacgccacatcgtcctttcgggcaaaggcatcgtccaaggtcagagcggggatggcggagcgcaacgcatcctccatgtagctcctgagctgaccggccggatcgcgcagctcgtagtaggcggtggccacgtcgttcgggttcacgcggaactgggtggaggccacgacggtgacaaacacgttgtcaagagtcttggtttccagctgcacgttgagctggttgacacgcatgttggtcttcatggcgatgcggtcgacgaacgggatacggatgtgaatgccggcgaactggactttcaggaatttgccgaagcgttcgatgatgtaggcctgctgctgcggaacgatgaacaatgcggcgcccagcagcacgataagaacgactaatagaattagcaccaacagcatggttccgcccaacatacttgcgatggtcatataaaactcctctcacaagggtcaagcacggcatatcgttgtgccgcgccccaacaccatccatgctaccatcgcacgcccgggaactgatagctctcacaggcaagtccaagaaagcgaacgtcagatttcatgttccgttcactccggcagccacatcttgtgcactaatgtttggatcagccaagtcgcacgtcagaaacaacaaagtcgggcatttcagccaaggaaacacccgacttgaatcaagcactgccgccatataaacacatcagaagtgttcgttgagcttcttctcgcagtaatcctgaagccatccaagcaacgtgcagaagagcaagtagatcaagcccacttcaatgtataggaccagcggctcgtagtaaatcgccacaatgcgctgggccgtcatgaacatttccaccacggtgatgttcgccgcgagagacgtgtccttgaccaatgcgatgaaggagttgaacaatgcagggaaggcggagcggaatgcttgcggcagaataatgcggcgcataatcgtcacatacggcatgttcgccgccaagccagcttcaagctgtcccttaggcacggcaagaatcgcaccacgcaatgtttcggcggcataggcgcccacattcagcgagaacgcgattaccgcggaaggcaatgccggaatcgtaatgccaacggacggcaatccaaagaagataacgaacaactgcaccagcaacggcgtaccacgaaacacccaaatgtagaaccacgcgatttgggaggccacaggtactttagccacacgcaccagcgccaccacaatcgccagtatcaaaccgagagcgaaggaaatcagcgtcagcggaatggtcacagtgataccgggaatcagtagcttagcaaaggaatctacgactattccccatactcgtgcgtccattggtcatcctttgttgtgtggtatatgttgcgtctgctcgtaatcttcacgaggccagctcatatttcccggctcccctaattacaggagagccgggaaacatgtcactcctgagagaagtcctcgccaaagtacttttcggagatcttggtcaatgtgccatccttctgcagcttgacaatggctttgttgacttccttgaccaagtcatcgctgcccttgcggaacggcaggtaggcggccggagtcttctcggacttggcggcaatcttgatgtccgcatccggcttctgcttcaggtagtcgagcgcagcaaggccatcgttcaatgacacatctgcacgaccggacgtgatggcatcgacctgctgaccgaaatcgttaacctgaacgatagtagcgcccttctcctgagcggtcttgttccagttggaggtaccggtttcagcggcgcgaagccccttgacgtcatcgaacgaagtgacgttcttcgggttctccttggaggtaatgacgacaccgtaggagtaggtgtatggttcggagaaatcatacttggccttgcgctcgtcggtggcggaaatctgatcggcaaccgtatcgtacttcttggcatccacaccggcaagcagggagtcgaagctgccctcggcaaactcggccttgataccgacctccttggcaatggccttggccacctcgacatcgtaaccggtcagctcattggttttggagtcatggtaactgaacggagcataggtgccctcagtggcgaacacgattttgccggcctgcttgacctgctccaatgcactggagttggaagcggaagccgaaccgcatgcggcaaccgaaaccagcacggcgacaccggacagcaaagccgcagccttgcgaatcacttgattattgaacatgacaaacccctctcttgatattgtcacaattaattacaacagccatgaaacgcctctaccgagtcaccggaatcatcagcacattgttggttgaagacaggaactcgacggtacgctcctcctgcggatgttcgaagatccgcttcggatcaccctgctcgaccacatggcctccttcgatgaacaccacatgattcgatgcctcataggcgaaccgcatctcatgggtgaccatcagcatggtcatgccttcgctaccgagttgcttgatgacccccagcaccccgttgaccatttccggatccaatgccgaagtgggctcgtcaagcaccaacagctcaggattcatagccacggcgcgggcgatgctcacacgctgctgttgcccgccggacagtgtgctcggataccgatcatgaaaatcggcaagtcccacacgatcgagttgctcaatagcgatcttgcgggcttcatcaggcttgattcccttggaatacaccaacggttcggtcacattctgcaatgccgtcttgttcaaaaacaggttgtagtcctgaaacacgaacccgattttcgaacgcaccttgtgaatgtcggcagatttggtagtggtcaaatccacaagaccatcaccgaaatcgacggtaccggaatccgcgtgctcaaggaaatccagaatgcgcaacagtgtggatttaccggagcctgaggggccgatgacagtaaccacattttgtcgaggaatgtcaagatcaagcccatccagcacggtggtgtcggcaaagctcttgctcactcccctgatccgaatcatcccgatactcccttttcgctgctgttatgcacgtcaacgctcgttcgcgaagcacaatcccttaccgtagacgcgcttgctcacctgtgtttcggcgtggttatatccagtgcctatggagtgctattcacaccaatgaataacacatcggacgccgacgtattgttcgctcacagatgcagcagatcgtcaaactcgtacaactcttgtctttacttgatattcagctcgttgagcttgttcttgatatccacagccgacggttcgacctggaaagtgccatcaggatagagcaccacgggaatgtgctgctggccgctgatggccaccgcacgatcggccgccccatcctcggtttcgatgtcatgccacgtatattcggtgccaagctcctcaagcgtgttcttcgcctgcttgcaatcaccgcaccatgttgcgccatagacgtcaatagccatgtcctgttccttctttcgtaatacaacaacccaaattcacaacgccccaagaataacagcgcaggtttttctcagaacgaacaattatccgcatacgtaagcgatacacgtcagtatgcgttggcaatggcttggtcaaggtccgcaatcaaatcatcgacgttttccaatccgatggaaagtctgatgagattatcgctgactccggcggcgatacgcgcatccaaaggaacctcgcgatgcgtgatgcgcgcaggatcgacaatcagcgaacgcgcgtctccgatgttcggcacataggagaatacctcggttccgtcgaggatgcgtctcacgttgttctcgtcgccgtcgacgaggaacgacagtatcgtgccgatccctttggggaagtatttggcgaccagatcatactgacccgtgttgcccaaaccggaataattgaccttgagcacatgcggcgcatgcgtgagatgctcggcaatacgcgtggccgattcgacttcctgccgttctcgcacagccagtgtttccaatcccaccatcgacaggtatgtattgaacgggctgggcaccgcgccgaaagtgcgcagatatttgatgcgtacacggcgaatgaacgcctcgcgaccgaatctgctggcgaagctgcgcgctattcctttgcgttcatcgctgacgaccagttcgggagtggtgaactgcgggaatctgccgttggcccaatcgaagtttccgccgtcgataaccactccgccgatggcgttgccgtgcccggtgatgcctttcgtggtggaatgcaccacgatatcggctccgaactcgatgggccggaagaggtacggggtgggcacggtattgtcgacgataagcggaataccgttgcgatgcgcgagttccgccaatggttcaatatcggtgatttcagtggatggatttgcaacggattcggtgtagatggcgcgggtgtccggcccgattttcgaagcgacctcatcgaggtcgttgatgtcgcgcacgaaatcggcatggactccgaactgcgggaagaaggtctccatggcatcgacggaagcgccgtacaggttggtcggagagatgatgcgaccaccaccttcggcggcacacaacagcgcatacgacaccgcggccatgccggaggcgacggccaccgcgctcacgccaccttcgagttccgccaaacgacgctcgaacacatccacagtgggattcgccacacgcgagtacgagaagccctcggcttcgccggcacccagtgcgtcaccatgtgcggcgctgaccatgtcaaacgccgcactggcgtaaatcggcgggttcgccgcctcaccgtgagccgcccggtcatagccgccgtgaatagccgcggtaacgaaatccctcgccatggattatcccctcaatgtcatgccgccgtcccttaggaaacaccgacggacgcccatactgatacggcaccagtgtaggaagcgaagcaccgtaacacgtgcttgcgggtacaggcatttcttatcgttcggtatcaaccggaatgataggtggggtgcgttcatcgtaactcgttgagcgctttctgcgcgatggccgtgagaaagcgtatgccgtagccgatggcggccggattcggccggaacgtcggcccatgcgcggcaccggtctcaccggcaccgatgtgcacgaacaggccgggcttgcgatcaaggtaatatgagaaatcctctcctcccagttgaggatgatcatcatccgcgtgaagcccctgctcggcgatgacttctcgtccgatgcgggtccatccggcgtcgttgaacacggaaggcgatccgaagaaccacgagacatcggcagtggcaccgtaggcggcggccgtgttgttgatgatggcgatggcgcgcttcttggcgagaacccggtcctgcggctcggtagtgcgcaccgtgccttcgaagaaggcatcctgcggaatcacattccacgaattgccggcttctatatgggtgacggacaacacccgcggatggcgagggtcgagattgcgcccaatgaccgcctgcaacccctgcaccacgttcgtcagcacggtgatcgggtcgatgccatcctccggttcggctgcatgcgcgcccttgccgtgaatggcaacctggaatttgtcgaccgcgccggtgatgccaccctcacgtatgagtatggacccaaccggtccggctgcatcgtgcgtgccgaaaaacgcctcgacatcgtccagcacacccgtgttcagcacctgcacggaacccgtggggcgctccgcggtggcacgaccttcctctgccggctggaagatgatcttgacggtaccaggcaatgaggcacgccgttcattgagcagaatcgccgcgcccaacgccacggtgaggttgaagtcatgaccgcagccgtgcatcactccggcattatccgaagcgtagtcaagtccggtattctcggtgatgggcagcccatcgatgtcaccgcgcagggcgatgacgggcttggcgcttgcgccgcgcacgatggccaccacgccggtcctgagtcccgattcgaggatttcaacgccatgcgattccagaatctcacggatgcgcgccgtggtgccgaactcttcataggagagttcaggatgacgatggaaccagcggtaccattcctgcacatcagcgttcagagcatcgggaagtgttacgaacgccgtcggggatgcgcccgatcgggttgttgctgcggtcaccggaacctcctttgcgtgacggcgatgacggacggatgcgaggacgtctcaatcccttcggcttcgctcattgtttcactcctcccaaatacgcctcctgcacccgctcgttgccgagcaggtcgccggctttgccatgcagccggatacgtccgttctgcagcacataaccatagtcggcgatcgagagagccagctcggcctgctgttcgaccatgagcacggaaacgcccaattcgtcacgcagtcgcgctatctgttcgagtacgtcttcgacgagtttgggagacaagcccatcgtcggctcgtccatgcagatgattttcgggcgactcatcagggctcgcgcgaacgccagcatctgctgctcgccgccggacatcgtgccggcctgctgcatacgacgttccttcaaacgcgggaaacgatcgtacatggcttccagatcgccggccacaccctccctgtcgtgtcgcgtataggcaccagacaatagattctcctccaccgtcatctgtggaaacacgcgcctcgcctcgggcacggcggcgataccggcttggacccgtctgcgcgtggacagtccggtcacatcctcgccttggaaccacagcgaaccggtcttcggatgattgatgcccaaaatcgtcttcatcgtggtcgacttgccggaagcgttgcctcccagcagagagacgatggcccctttgggtacgcagatcgacacgttctgcaacgcgtggacctgcccgtaatacacattcactccatcgagcgcaagcagggcatccccgccatcatccaacgtcccggtttcatctcgtccggtaccggcaccggtgccctcgacttcgacgacggcgcctatggagttctgcatcgcaagcacatgcgactgcccggcgacccgggtatggttcatttcacgccgcttgccgagatacgcctcgaccacctgcggggcattgcgcacatcatccggggcgccttgcgcgatgacgcggccgccatccatcgcaagcacacggtcggacaatgcagtgaccagatcgatcttgtgctcgaccaataggatggtatgtccctgcgctttcagatactgcagttgacgaagcacttcggcggtctccgactggttcatgccggcggtcggctcatcgagcagcaggatcttcggttcgctgatgtgggcacgggcgatttcggtacgacgacgattcgcgtacgacaacgtgtaggtgcaatcccgtcgacgcgcgctcagtcgttcacggaaacggtcgatttcccgatccacgcggatgttcacctcatcggcttcgcgccgagtccgcggtccgggaaccagcgccacgccggtctcggcaagcaacgacagccaacgcgcgatcggatacctttgcaggcttttgaacgggcgtgccgcgacgagtcgccggtgatatccgagattgatgttctcttcgacggtaagaccgccgaacacacgaccgttctggaaggtgcgcagcagtccccgttcagacatgtccgcagggctcagaccggcaaccggctcgtcggcaagatcgatgagcccggaatcaggctgcagaaaaccggagatcaggttgattgtggtcgattttcccgaaccgtttgggccgatgatggaaatgacctcaccttgatgtaggtcgaaagagaccttgttgacggcgtgcagcccctcgaaggacttgtcgagctcgcgcacacgcagcaccaccggcgcgtcaaggacggcctggcggtgtctttcggaatattcagccagatcatccgcgttatcgaggcgttcgttgtcgatatcgatgccggtcacggcgtctacggtggaaaatacggtctcggaatcggtcatggcgactcagcctttccgggcgaacaggccctggggacggaacaagatgacaagcaccagcagcacgccatacagcaggatgcgcgcgtcggaggcgaaacgcagcaactcgggcgctccgatcagcactatggagccaagcaccgcgccgagcggagagttcataccaccaagcacgatgatggtcaggataagaatcgacatgttcgaattgaagatcgtcggatcaatgtacgtgtactggtgcgcgagcaacgaaccggcgagacctgcgaaaaacgcggcaagcgcatacgcgagcgccttataggcgccagtgcggatggacagcgcctccgaagcctcgcgatccgatcccacggcctcgaacacgcgccccagatgagcggttcggatacgcatgacgatgaccaacgtgacaagcagcacgatcacgtcaagcagatacatcatctgctgcgtgtacagtgtgacgccgaacaccttcgggaacggaatgccctgaatgccaagagaccccttggtcaacggctcggcgaggcgaatgatcgccaccatcaccgcacctacgccgatggtggcgatggcgacataatggccggaaaacctccatacggggaaggtgagcaccgaggcgacaagcgccgcgatcacacctgcggcgggcaacgccaccaggaagggccaatgcgcctgcgtggccagaatcgcggaggcataggcacccacggcgaacggtcctgccatgcccagaatcgtttggcctgcggagccggaaatcaacgtcaatcccacggcggcgatggcatagatggcgacctgagtgcccacgccggacaggtagtcattgaagaagaacggggtggatacgagtgccacggcaccgatgagattaccccaccaaggcagcgcgatcaccctgccgcctcccaggaacgtgccggtaagcggctcggatttgacatcggtcttcggcccaagcagaccctgcggcttcacgatgaggatgatgatcaacgcgccgaaggtgatgaggtcatgcgcaccgtctccgaacagagagatgccgaacgcttccaccacaccgagcacaagaccgccgaccacagctcccgggatggagcctagaccgccgatcgtggccgccacgaacgccgtcataccaatggtgccgccgttcatcggattgatgttgccgttgaacaagcccacgaagatgccggaaacgccggcgagtacggcaccgatcacaaaggagaggttacggatggccttcaccgggatgcccatctgcatggcggcttcgggatcctgggaagtggcgcgaatggcctgtcccgctttgccgaacttgaggaatgcccataagccaagcatcgagaggacggcaagcgtcaccatcacgatgtccgaagtgccgaaacgcacgccggcgacttgcaggttataggtctgcagcagtttcgggaatggtcgggtctgtggcccgaagacgacctgcagaccattgtcgagcacctggccgacgccaatggtggcgagcagcgccgcaatcggtttacggccttcaagcggagcgatgatcgccatgttcatgaccagccccagcagtgcggtaaccacgagcaccgccacgaatgtgggcacgattccccatccccatgatgaaccgagccaccaggcgatcatcatgcccacggccacgatggaaccttgggcgaagttggccacgttggtgacgccgaagatcagcgacatgccgactgcgaccagcgcataggcgctgccgtgtatcagtccggcgaaaagaacatcaaacattgtgtgcgttacctcgttcgtggtgtatgggaaagcccggggaatcaaccttcgtattgttcgaacttgccatctttgacgatgagcagaatcggatcgatgttatcggcgcgacgactctgccgattgaatttgaacgtgccgccattgccctggtagagcgggaaatccgtcacggtctgcagcgccttctgtatgccttcacgggtcggttcggtcttgttggcggcataggccagatcgatgatcgcctcgtaggcggtcacttcgaaattgcccgggttgttgccgtacttggccttgaagtccttgacgaactgctgggccttggcgtccttggtgccagtggcggagaaggatccggtgatgatcgaaccctcggcgtttttgccggcgagatcgaggaactccttggtttcctgaccaccgaagtacaggccgtcgtaccccagcttgtcgcgcagggtattgatcaccagagcaccgtccggcccgtagccgatgtcgaccaccgcgtcaggcttggcatcgcgcgccggaatcagaatcggcgacaagtcggtggagtcgggcagatagctggactcgtacacaatctgggtaccgtttttctcggcctcctgcttgaagtaccgataggcctgtttgccccagtcgttctcgatgtagaccaccgcgatcttcttggcttttttggccactatatccgcgttggtcttctgatacttgtcctgaccgatttggggagtccatacgtggtccccggtatcggtaaaggtgggtgccgaattattgaaaccgtaatgcacgaggccggcctgctggaagataggcgacgcggccgaggatgcgggcgaggcatagtcacccaccacggcgatgatcgacttgtccgacacgatcttgggagccaccgcggcgtcttgcttggcatcggactgcgtgtcatagtatcgaagaccaagcttcttacccttgacgccgccatccttgttcaccttggcaaccgccagatcgaagccttgctggaacagtttgccgtattgcgcatattgcccggtcttcggatagatgactccgatgttcacggtgtcgtcgctggaaccgctggcggcatccccgccaaggccgcatgcggagacgccaatcagtgttcccgcagtgaccacggatgcgatcgtcgtacggatgattgtcttgatggtcatgatgttcccttctctattcgaataatcatgaagcgtaaatggggaccggctcagcccacgcggatgtcgctcaatgcctgcagcgcctcgtcgcccgccggggtcggaaccgtgcagcttggtgccagcaaaaacggtttgcccgtacgaagcgcgatggtcttggccaattcgcggcgcacctgttcgacgtcaccgtccggcgcgaacaggtcgtacggggcaccggcgaccggcacagccgtcaggtcggcatccacctgcgggtttcccggttgatactgatcccactgcagcaggtccacacccttcacgtcgaaccaattcgggtgggattcagcacgacaggtgtgcagcagcaccacggcgtccgggttggcgcgatgcaccgcgtcaatcacgatgcgatcgtatggttcggagaattcaagatagcgttgcgcgtcgaaataaccctcgctcaccgtgccggtgagcgcgtagaacacgccgtcgagtcccgctccgccttcggactcgggacgaaccaacgcacgcgcataggaggcgagtgtgcgggcgatgttggcgagcgccagcttggcgacaccaggctgatcgaagatcagatcttcgacgcggagcgtcgcggtggcgtaatcgtcacccgggtacagcggcagatcggcgatctgcagcaggacggacaatggcgaaaagacggtctgcagcacggcacgatcctcaaggccatgccggataagggcggcggcggccagagcctcggcgaaatactcattgtcacgaacgtcgagttccttgattccacgcacatcatccggttcggtgattgcggcgccgatcttcttcggcagcacgaatccggcataatcgttgcgatcgtaccgagagccccaagcctcggcatagtatatggcgcgcggattgatcttcacccattcccaatcccagcgattgacgaaatcgatggtggccttggcgaattcctcggcaccgtattcatgaccgacaagatgctgccaggcgctaaccagatacggcgtccgggactgatgattgacgatggcgtggaagtcggcgcgacgattgaccatattggggtcccttctcctgattcgcaacgttatccgtcatcgaagcgcatcggcgatgccgatgtcaagcggaatgccgcccacgtattacaggcatttcttatagcgccttatccatccgcgaaatcattgcatccttgaagcgcctatcaagaacacctatatgccatttcggaagaaacgacgacggttcgggaatccatgcggtattacgggaactgacatacatccgtatccatcatcagaagaggtgaaccgatgggagcaaacctgtatttcatcggcggaggcaatatgccgagcgccatcatagaagcggtgcgacgtaaggccgccgcatatccggtcgaccacatctgggttgaggaaatctcacgggaacgcgccgaatatctggcatccacgtacaacaccgagacggcgtcaccgacggacgccccggatgccgacatcgtggtaatcgcggtgcgcccgcaagacgatgtcgccggcgtagccgcttcagtggcgcgacgtttcgacccggcgaagaccacggtgatctccatcgtagccggctataccatcgccaagcttgagcaagggctcggccatgggtggcgtgtggcccgcatcatcccgaacacactcaccaccgtggattacggttacagcggcgtggcgctgaatggggccgcggcacgcgaggacgtggatgcgttcctcaacactttcggcaaagtgctgtatgtcgaggaacgacttatcgacgtaatcaccggtttttacccgccgaacatcgtctaccatttcatcgacgcctacgtggatgccggtgtgcttgccggtctgccccgggacgcggccagagccatcgcgctcgacaccatcatcggcggcaccgaattcctcaaacagaaagacgtgctgcctcaagtgctgctcaatatcaacaactcccccggcggagtgggaatcaccgaggcatataccctgaacaaaaccggattcgcggcatccatacaatccgcggtgctggcggcggtcgagcgcaccacggcgctcggcggcgatgcaaagtaaagacgggagccgatcatgacgcaacaattcacctgggaccatacggtcgaattcgtgaatgacctcaagtccgccgaacggacgttcgccgacgcagggctgacttcccaatacggcggcaagcacgtggggcatggcacggagaactccctggcctacttcgccgataactatttggagttcctggcattgtacgaccgcgaggaagccttgtcggagacgccggaccatgggctgatattccatgaagccggggagctactgcccgagtatgtgggattctatcgtccggcattgcacgtgcatggcatcgaacaggcggccgaacggctcacggccaaaggccttgatcttggccatatcgttccgggcaatcgcacgacggccgccggtgaggagatacgctggcggttgctatggatcaagggcgatgatcagggcctgcgctatccgttcgtcatcgactggggtgcgagcgaatccgagcaactggcccgctacgagagcggcggactgctgcaccggcatgccatcggcgaagtggacacccgtcgcgcgattttcgcggtgcccgaccccgcggcggtggccgcgcactggtccgacgtgtttggtttgggtctcacggaaggcggggacgccgaccggcccgatgagcactatttcgatctcgatgtgggagggcatcgtgtctggcgcttcgtccagggtcaatgcaacgccatcaccgaattgcagtacgacgcccccgccggcaaatccttcgatgtgaccatcggccaggcgcgattcagaagcctgtaagtacggtccacacacaaccgcaacaacgcatgaggcgtgtgccaccaatccaacggtggcacacgcctcatgccgtaagagagccctgccaatcagtcagtcagcagattcaactcccgcagcttgttcctgatgtccttggcggagggctccacctggaaggagccatcatcgtacagcaccaccggaatatgctgctggccgctgatggccacggcacgatcggcggcaccgtcctcctcttcgatgttatgccagatatacgccgcacccagctcatccaacgtgttcttcgcctgacggcaatcaccacaccatgtggcgccgtacacatcaatggccatgccatgtcctttccgcatgccgcgcttcgtccgcggccgtctcatcgcgtccatcgtaacggcacatacggccatatcgcatcaggcgaacaccttcggagtcaatgcgccgaatacatcggagtcgatgtggcgttccctgtatcgggcataggcgatatcgaaagcctgtccgaggtcttcgatcagatcgttcgcatcctcgatgccgacggcgagacgcaccagctcatcggtgatgccgaccttcagacgctcctcccggggcagttcgaaatgcgtcatgcggcaaggcagttccgcaagcgattccacggcaccaagggacacagccaatcggaagatgtgcaggttgttgagcacatccgcagggtccacgccaggcaccacttcgaagctcagcacgccaccggcgcccttcagccccttggctgcgagccgctgatcgccggcaccgggcaatcccggatagtgaacggatttgaccaatgggtgagcgagcagataccgggcgatggcgttcgcgttttcctgctgacgatccatacgcaaggccaacgtctgtatgccgcggcgcaccgaatcgcattcagtgggcgccagtacccctccaagacggttctgggcgaagtacacgcgattggccaaatcctcaccggagacgaccacgagaccggcattgacgtcggagtgaccggccaggtacttggtggcggagtggatgaccacgtccgcgcccaaggtgagcggctgctgcaggtacggggtcacgaaggtgttgtccacgatcgacagcgccccgtaacggtgggccaccgtggagatggcgcgcacgtcgttgactttgagcagcgggttggtcagggtttcgaagtagacggcttgggcaggcgcgatgccgttcgcgcggtcgcccttgacagcggcctccaatgctgcgatgtcctgggtgttgacggattcgacgatcacactccaacgggtgaagaactcattgagctgcgaatacgagccgccgtagatgttgtcccccacaacaatgcgatcgccgggcttgaaaatgctgagcacggcatgaatcgcggcaagtccggaggcgaatgcgaagcctcgcgtgccttgttcgagttgtgcgatctgcttttccaggaagtcgcgcgtgggattgccgcttcgtgcgtagtcatagcggggcatcgcgtcgaccttctcgaaggcatatgtcgttgagttgtagatcggcgggttcacggctccggtgttgttgtctccaaccggcagtccgtggacgagctgagtattgaacctggtcattgcgcaccccctttatggtgttctctatggctgctgtgcacgaggccgttccccgtgcggcacgtctacgacgataacgtatcggacacttgaatggaacggcgttgctatatgggttgcttatggaccgttcaaatgcggtcgcggcggtcacgtggctacactaggagccatgaagattgccaaggccttgacccgtttgaccggtcctgaaaccaccccggtgttcgtgctgttgcacggctggggttccaatgaatacgatttgcccgatctgctgaactattgcggtgccggttcggctgattatgccagtttgcaggcacccatcgcctatggcatgggatatacatggttcggtgcgtgggcgcatgaaggtgtgccggagggcgaatcattggacaagcaggcggctgaggccgcccaagccattgatgcatgggttgcggagcatattcccgccactcggccggtggttgccatgggattctcgcagggcggcctcttggccgcgcatctgctgcgtttcaatccgaagcgatatgccgcagccgtctcctgctctggatggctggcaccggggtccgttgcgggcgatgccgaattggcttcgttgaagccgcccgtgttctacgggcatggtgctgcggacgacatcttcccgaaagccgatgtgacggcgatgggtgagttctggcgcgagcacggcacgttgaccgaacaagtgtatccgggcatggcccattcgatcaatatgccggaaatgcgcgatattcaacggttcttggaggccaacggattcattcggccgcagatttggtagtcaccacctcacatggcgtagtctacgtgggcgaattcggggactttgtaccatttgacggggtagccggcaccgtgggcgcagaagaccgagtcgggggtgttgtccagatcggcttcgggatcgtaggcggcggctgcgatgacctgttcggcgtcatggcatggcttgtagccgccgaaggtggcggagaaacggccatggccgtgcgtgtactggttcacgtccatcgcatagtcgcgcatttcggacaccggcgcctcgccttcgatcacggcgtattcgtcatcggtgaccggggattcgaagctgccggccatgcgctggatgtcgctcatagcacggccgatcatgtctgcgggcacttcgagccggaaccggtaccacggttccagcagtcggcagttgccctcccctgtggtgtccggccggctctcgaccggcgtctcgggccggccactgactcctgccctggcttccatcaacccttggcgaatcgcccggtacgtggcttgacggaagtcgccgccttcggtgtgcttcagatgcgcgcggccggccaccaaagtcatcttgatatcggtgagcggtgcgccaacgagcacaccgagatgctcacgctcggtcaggtgggtcagaatcagccgttgccaattgcggtccaaatcattttcggacagggccgaggccacagtgactccgctgcccggctcccctggttccagcaggatatgtgcttcggcataatgacggagcggctcgaaatgacctgcgccttcgatcggcgcagtgatggtctcacggtacaggatggagccggggccaaaggacacatccagaccgaaccggtcgtgcagggtctgctggatgatttccagctggaccgcgcccatcaattgcacatgaatctcggccagccgttccacccacaccacatgcaacaacgggtcttcgtcttccagctcacgcaatgcggtgatgaccttgtgcaaggtcagatcatcgaactggggacgggccggcgagctattgtccgccgcggtctggccggcggtgtcgttctcctcattgcggccggttcccgacttggcggcatcatgctcggcatcgtcctgattcgcgctgtcatggccggctcccccacgtttggccgctcccgaggtgccggccgtatcggattccgctccgacgggcaacaccgtgtaggtcaacacgggttgcaacgacggcgattcggcgtccggttccgttcccagcccttcgccggggaaggtctgcgtcagcccggtcaccgcgcataccaagccggccggcacttcggtgactgtctcgaatttggcgccattgtagatgcgcacctgatcgactttctcggaccacgccatgtcatcatcctcctgcgctggcgacggtgtcgacgccgcggcgcacgaggatgaggagacgatctccttggctttgagcgcaccgccggtgacgcgcagccacgtcatacggttgtgctgaccgtcgtgggcgattttgaacacgcgtgcggcgaaggcggccggccattcacgttcgcgggtgaacgtctccagcccgtccaggaattccttgaccccttcgagtttcaatgccgagccgaaatatacggggaacagctcgcgtacggcgatcatcgatcgcaatctgcccacggacagcgcgccatgttccaaatagtcgttcatcgcctcctcgtccagggtggcgatgtcttcggcgaacgcgtccaacggtagcgcgctgccctcagtggactgtcccattgccggcaacggatatatcgcatcgctcagacgcctgcgcaactgagccaacacggcctcgcgggcaaatccggcggcgtcgcacttgttgacgaagatgaacgtcggcacaccgtatctggccagcagacgccatagtgtctcggtatggccttgcacgccatccgtgccggagaccacaagaatcgcgtagtcaagcactcgcagcacacgttcggtttcggctgcgaagtccacgtgccccggcgtatccagcaaggtcaggcgcaggtcgccgtgttctaccaatgcctggtgcgcgaaaatcgtgatgcctcgcgccttctccaaggaattggtgtccagaaacgcatcgccgtgatccactcgccccaatttgcggatctcaccggtacggtagagcagcgcctcggacagcgtggtcttgcccgcgtccacatgcgccacgatgcctgccactatctgtttcatcagctatgctcccttcccgatgcgccgcatgttgccggccgcctaaccaatatatccgagaaaatccgggagggaaaaattttaccgtcagaccgggctgccggtacaataagtcaccgaacaccgactgatatgaggagcctccgtgaccacttccggcattaccgttttcggccaaccatcccagcccaatcatggtgccggcgggcgaatcgccatggacgatgccctctttcccaccgattatgtggcgctggatctggagaccaccggcttttacccgaacagttgcgccatcacggaaatcggtgccgtgcgcgtgcgggaggggcatatcgtcgatcaattccagcagctggtgaatcccttgcagccgattccgcgtcagatcaccacgctgaccggcatcaccgatgcgatggtggccgacctcgatccgattgacgaggtgcttccccgattcatcgcatggctcgctaccctggctgccggtcccaccgttgagccgattgtcggtcataacgtcagcttcgatctgcgattcctggattacaacacccggcatatcgccggctgcggctttgcctgcgcggattatgacacgatgcaaatcagccgcgccctgttccccgcgcagcggcatcaccgtctggctgacctgatcgtgcgcttcggcatcgcggacaatgaggaacaccgcgcattaagcgatgccatccagacccagcagtgcttcgaatggatgcggcattatgtcaccgagcatcacgaatccgaagcaatccgttggaagcaggcgccggccagaaacagcaccgaaattctccaccagcagctagtggtaaagcggtagttacagcccgtattattcgcacatagaggaaaactattagtcgctgggctagagaccttatagtggacggattcctctcgcatatcggagaaattcgggataccacacggttagcggccaatttggggccggcgtcccgcaaccgtgcgggacgccacgcacgtcaaacgatgcacacggctggcatcccacaccccattccacagaaccattggaattctgccaatcccacaaaccggtgacgacaccgtacatcaggttctgtgggacgccagaggaaaaacacccgaaatccgctggcatcccacaccatgtcacaccgcacctgcagcatcgcaccacaccacatcacgccgacacctattcgtgcccccccatttgcataattcgacgtttttggaagatggcgcacacatgcatgtgcccccatttgcatatcaaacggttgacgcacaaatggggacacacaaccacaactcagaatcctcggaattccgccaatcctgagatttcatcccccaacacggcaatcgccgcctctgccaccattttcgcatcaaacgattgacgcaacaatggtggcgcatgcccctttgtatcggtatgaatcagtccctgccgtcaggctctccccctattgtgagggccgactggcagggactgaacacgcataatcacatgagcacgccatgccaagcatggacatctcagtacgaacagaacctattcgcacacgttacagcccgtattccttggcgatgacggaccagaggtcggcggcggcctgatcgacggtttcgttgacgatggtgacgtcgaattcgttttcggcggcgagctccactttggcggtttccaggcgacgggcctgctgttcggcggtttcggtgcctcggccgatcagacggcgcttgagctcttcaaagctcggcggcgcgatgaacacgtacaccacttccaagtcgagttcggcggcgcgctgcttgacgcggcgggcgccctgcaaatcgatttccagaattgttggcacgccggcagccagatgctcctccaccggagccagcaatgtaccgtagtgggccatgccgtgcaccacggcggtttccaggaactcccccgccgcttcgcgggtcaggaactcgtcttcggtgaggaaccagtagttgacgccatcaacctcgccggggcgcggggcacgcgtggtggcggagacggacacccacacttcggggtggtcggcgcgcagcttggcttccacggtgcccttacctactgcggtagggccagtcaggacgattagacggccggcatgggtgttttcagtcatgggttcctccggagatgatgtggtgtgcagcgattatgaatccaatgtggtaacggctcaccggcgagatgaccggtaactgttacagccccgacgaacagggaagaatatgaatcgtgatgcgacgtatgcaatgagatagatacgtacgcatgccgcgacatctgattccgttctgattactggttttctgtgccttcggcagtggcttccatcagcgactgacgtacgtcaagcgcaatcgactcggtagcttggctcagtgcggcgatatccggcccatgcgaggcgataaagcgggacacggtaaccagcacgttgccgcgcgtaccgcggaacacggttttcagatccttggcctcggcaccctgccaaccgtaaccgggggaaagaatcggaccggtgaacttggaggggtccacgccggaatcctgcatccattggccgatggtggcaccgatgatcagacccaccgagcccatgccttcgatatccacgttatgcttctgcgcggtggaggcgatgccgtaggccacggtacgtcccttgtaatcgccgctctggcgcaacgcggtctgcagactcatgccttccggattggaagtcagggaggcgatgaacacgccgcgtccgttttccaacgcttcggtaatcaagccgtccaacgagcgcgcgccatagtacggcagcagcgtgatggcgtcggccagcaacggtgcaccgggcttgaaataggcgtccgcgatggcggaaatcgtggtggacaggccgccgtgcaggcagtccacgatggtgatgacgcccatttgtcgtgccgcgtagagcacgcgctcgagcgcttcgaaacctttggctccgtagcgctcgaacatcgacgtctggaatttgactgctgcggcgcgcccgttggcggcctgcagcatacgcatggagaagagttcggcgccttcggcgtcgacgttgtatccccagtcggtgaggagcttgcgatgtgggtcaatgcccacacacagcggtccgtatttggccattgaattgctcagtcgcagaccgaaatccgaacgttgtgcctgcaattcctcactgctgggtgtagtcatcagaactcccgtcgctccaattcgaacagctgcttcgaatgctcctgaatgctcatgatctgataatcattatgcttcacggcctcgatagccagcagtgcggcttggaactcggtgatggtggtaaactgcggcagatcggctgcaatagcggcagcacggatggagtagccgtcggaacgggagccgcgcgagttcggcgtgttgaggatcatgtcgatcttgccttcctcaatgagctgaaccacgttcttgcccacggagccggcggcgtgatgcacctcgaccggggcttccggatcggtgtccacgcgggtgctgatcttgtccacgatgttcgactcgatgccgtaacggcgaagcacggaggcggtgccctcggtggcccagagcttgaatccaagctcttcgaggcgcacggcgagcagcggcagctgacgcttgtcggtgtcgttcacggaaatgaacacgttgccgtgggtcggcaggccaccatcgtaggcggcgagctggctcttggcgaaggcgtgcgggaagtcgcggtcgaagcccatgacctcgccggtggagcgcatctcaggtccgagcaggatgtcgacggtcttgcccaccggggtgcggaagcgcttgaacggcagcacggattccttgaccgcgacctgctggccggggtggatgtcgccgccgtcgcccttgggcagcagcagaccgttggcgcgctggtcggcgatggtctcgccggccatgatgcgggcggcggccttggccagcgccacgccggtggccttggaggcgaacggcacggtacgggaggcgcgcgggttggcttcgatcacgtacagcgtgttggccatgaaggcgtactgcacgttgatcaggccctgcacatggcagcccttggcgatggcgtaggtgccttcgcgcaggcggcggatctggtcgtcggacagggtggacggaggcagggtgcaggcggcgtcaccggagtggacgccggcctcctcgacgtgctccataatgccgccgatgtacagttcctcgccgtcgaacagggcgtcgacgtcgatttcgatggcgtcctgcaggaacttgtcgatgagcagcggggagggcaggcggccggagaccacggtatcggccttggcctcggcaagcgcgcggtccacgtacttggtgagctgcttgtcatcgtagacgatttccatgccgcggccgccaagcacgtagctcgggcgcacgagcaccgggtatccgatgcggtgggcagcgtccatggcctcttcgaggctcagggcggtgccgtaacgcggggcgttcatctccgccttcttgagcacctcgccgaacagctcgcggttctcggccagatcgatggattccggggtggtgccgagaatcggcacgccggcggccttcagacgcgcggccaaggacagcggggtctggccgccgagctggacgatgacgcccttgaccgggcccatcctcttctcggcctcgtagatttcgagcacatcctcgaaggtgagcggctcgaagtagaggcggtcggacatgtcgtaatcagtggacacggtctccgggttgcagttgaccatgatggtgtcatagtccttgccaagctcctgcacggcgtgcacgcccgtgtagtcgaactcgatgccctggccgatgcggttcgggccggagccgaggatgatcacggcctcgcgctcgcgcgggcgcagctcggtttcgtcggcgtagcagctgtagtagtacggcgtggcggcgtcgaactcggcggcgcaggtgtcgacggtcttgtagaccgggcgcaggccgtaggtccagcgcagttcgcggatggtgttctcgccttcatcgcccaagccacgcaggtgggccacctgcacgtcggacagaccggcgagcttggccttcttgagcagcttcggggtgagggtttcggcctcgcgcaccgtcatggcggtctcgttgatgaggaagatctgcttcaggaaccacgggtcgatcttggtggccgcgaacacctgctccagcgtggcgccgccccagatggcgcgcatgagctgcaggtaacggtgttcggtcggggtgtggatggcctcaagcagttcggccacttcctcggcggacggcttctcgccatcccagttgaagcccatgtggcgcttgtcgatggaacgcatggccttgccgagggactcctggaagttgccggccagggccatggcttcgcccacggacttcatggaggtggtcagggtggggtcggcgcccgggaacttctcgaaggcgaagcgcggcaccttggtgaccacatagtcgatggtcggctcgaatgaggccggcgtggactgggtgatgtcgttgcgaatctcgtcgagcgtgtagccgagggccagcttggtggcgatcttggcgatcgggaagccggtggccttggaggccagtgcggaggaacgggagacgcgcgggttcatctcgatgacgatgatgcggccggtcttcggatgaacggcgaactggatgttgcagccgccggtgtccacgcccacgccgcggatgatggcgatgccgatgtcacgcagcttctggtattcgcggtcggtcagggtgaagcagggggccacggtgatggagtcaccggtgtgcacgccgaccgggtcgacgttctcgatcgggcagacgaccacgacgttgtcgttgcggtcgcgcatgagctcgagctcgaattccttccagccctcgatgccctcttcgatcaggacttcgtcggtgggcgagtaatggatgccggcgccggcgatgcggtgcagctcctcctcgttgtgggcgatgccggagcccaggccgcccatggtgaagctcgggcgcacgaccagcgggtagccgaacttctcggcgatcttgtcgacttcctcgatgctgtgggcgatgtcggagcgggcggattcggcgccggcctcgtcgacgaccttcttgaacagttcacggtcctcgccacggtcgatggcttccagggaggcaccgatcagttcgacgttgtacttcttcaggacgccggcctcgcccagcgccatggcggcgttgagtgcggtctggccgcccagggtgggcagaagcgcgtcggggcgttccttggcgatgatctgctcgaggatcggagtggcgatcggctcgatgtaggtggcgtcggccatctccgggtcggtcatgatggtggccgggttggagttgacgaggatgacgcggatgccttcctcacgaaggacgcggcatgcctgggtgcccgagtaatcgaactccgcagcctgaccgatcacgatcgggccggagccgatgaccatcacggatttgatgtcggtgcgcttcggcatatcacttaccttccttggagttgttcttcataagttcgcagaaacggtcgaacaggtaggccgcatcgtgcgggcctgctgcggcctccgggtggtactgcacggagaatgcggggatgtccacgcactgcaggccttcgaccacgtcgtcgttcagatcgatgtgggagacgaacaccttgccgtacttgccgttttcaaacggcgcgtcgacctgcttgccgatcggagcgtcgaccgcgaagccgtggttgtgggcggtgacctcgaccttgccggtggtcagatccttgaccggctggttgatgccacggtgaccgaacttgagcttgtaggtgccgaagccgagcgcgcggccaagcagctggttgccgaagcagatgccgaagaacgggtagccggcgtcgagcacctggcgcagcagctcgatttcggggccggcctgttccgggtcgcccgggccgttggagaagaagacgccgtccgggttcaggttctcgatttcggcgaaggtgatggtggagggcaccacgtgcacgcggcagccgcgttcggccatgcggtgcggggtcatgcccttgatgccgaggtccacggcggccacggtgtacagcggctccttgccttcgtactcgccgcatggctcgatggtgtaggcctgcttggtggacacttcgtcgtacaggctcaggccctgcatctgtggggtgttcttgacgtcttcgagcagctgctcgatggtcttgagcgcgccggtggcctggtcggtcagggcgtcgccggagaagataccggcgcgcatcacgcctgcggaacgcaggtgacgcaccagcttgcgggtgtcgatgtggctcaggccgacgatgccgttcttggtgaggccgtcatcaaggctgccttcggcacgccagttgctcacgttcggagaaggatcacgcacaatgtatccggcaacccagatgcgggaggactcagggtcttcgctgttgacgccggtatcgccgatgtgcgggaacgtctgcacgacgatctggcgatcgtagctcggatcggtgagcgtctcctggtatccggtcataccggtggcgaagacgatctcaccggtcgtctcaccgagggcgccgtacggctcccccacatatacctgtccgtcttccaaaacgaggactgcatcgtccttgtcatacatcggaattgcgatggtcccggactcgttctggctcaccaaaacccccttatgtttttcgggtattcgtaccaaggttaacggccagcgcagactcacacgccgttgggcgcaaagtctcaccccgctggcggggctgtcggcaaggtgccgacttgagaatgtgtggcgacacaagtgtccgcccatgaaaaagcctcccgaatggggaggctgaacaacaaatgactaatcgaccgtcggctgaatctcagcggacggggcagcgggctcgtcggatgcaccggacgaatcggaaacatcgccctcatcggtcggatcggatgcggcggcatcggaatcggacgattcctcatcggcctcttctgccgcggactccggtgccggtgctgcgttcttggcggtgcacactgcagacagcaggccatggatgaaagcgggcgaatcgtcatcgcacagggtcttggccaatgccagagcctcgtcgatggcgaccttgtccggcacatcatcgttgaacagaatctcccaagcggcgatacgcagaatgttgcgatcgaccacgcccatacggcggaccttccaacccgtggagtgttcgtccagggtcatgtcgatctgacgacggtgctcggccacgcccttgacgatttcaatggcatagtcgggaagcggggtctgggcaccgggatgtgcgatgcgctcgtcaagcagggcgagaatatcctgacttttttcgtcggcttcgtacagggtgttcagagcccttttgcgcgcggtggaacgtgccatactgctgctgtcctagtcctttatacggtcggtcgtctgttgaggatgcggagatcagttgttctcgcggccggtgtaggaaccatcctcggtgttgatcttgacgcggtcgccctcattgatgaacagcgggacctgaatctcggctccggtctcaacggtggccggcttggtgccggcgttggagcggttgccctgcaggcccggctcggtgtgggtgatggtcaggaccacggagcccggcaggtcaacgctcagcggggtgccgtcgtggaaggagaccaggcagtcggtgccttcgagcatgaacttggccttgtcgcccacgagggtcttcggaaccatgatctgatcgtaggtggtcatgtccatgaacacgaagttgtcgccgtcctcgtaggagtactggagggtgcggttgtcgacggtctcgaattccatcttcatgcctgcgttgaaggtcttgtcgacgatcttgccggagagcacgttcttgatggtggtgcgtacgaaggcggggcccttgcccggcttgacgtgctggaacttcatgacggtccacagctggccgtccaggttcaggacggatccgttcttgatgtcgttagtagtctgtgccacgttattcacctatttcaaattcaaactagcttaggcaaagcccaaaaattgccttggctattatgccacaccgggtatacaggaagtgaacgctggggtttcccacgtggcccccgactagactggatgaatatgcgatccttcttcgaagccatatccgtgtcctgcgtcatccccgcgcaatcgccggcggatgacgaacgcacggtgttcgacaacctgtccttcagcatggaacgcggcgacatcatcgatctggtgggtccatccggctccggcaaatcgagtctgctgaccgcatgcgcccgactcaacccgcacgcgcacggcacgttcgtcctcgacggcgtgggcagcgacgaattcagcgcgcagcaatggcggcgggacgtctcctatctgccgcaaaaaccgatcctgaccggcaaggacgtggccgaggcgatccgcctgccctggacgctcgcgattcgcggcaagggcggcaaggccgagcagctgctgcccgacgaacgtatccgcaggaccctggacgcgatgggatgcgacgacatcgacctggcgcgcgcgccacatgacctgtcgggcggtcaggcggcgcgcgtggcgttggcccgcacgctgctcaccgacccgaaggtgctgctggccgatgaggcggacgccggactcgacgacgacaacgcatccaaagtggccgcgatcatggcggacgcggccgcacacggcatggcgatcatccgcatccgacaccgtccgccggacggacgcgccacccgcacgctgatgctcgatgcggg

SEQ ID NO: 3861 - DNA, 12193 bp, Unknown
  R35_2m  MAG No. k141_21188
agaccgagggctagtgttcgaggtctacatccacgtcccgttctgcttgcggcgctgcggttactgcgacttcaacacctacacggctacggatcttggtgcgggggcctcgcgcggcaactatgccaatatggtcattcgtgaaatggccctgaccaagcagtggcagctcgaccacggcatcgaggagccaccggtctccaccgtgttcttcgggggtggtacacccacgattctcgccgcccgcgatctggtcgccatgctcgatgccatccgcaagatctggagcatcgcgcccgacgccgaaatcaccaccgaagccaacccggacacggtcaacgaatattacatcaatgagctcgctgccggcggcttcacccgcgtttccttcggcatgcaatctgccgtgccgcacgtgctcaaaaccctcgaccgcacgcatacgccggccaacgtggccgcaggcgttaatgccgccaataaggccggcctgcgctccagcgtggatctgatttacggcgcaccgggggagagccttgacgattggcgcacctcggtcacgaccgccatcgacctcggcgtgaaccacatctccgcctacgcactgaccgtggaacccaccacgaaaatgggtcgtcaaatcgcggccggcactctgcccaaacccaatgacgatgacgaagcagccaaatacgaaatcgccgacgacctgttcgccgccgccggcctcgaatggtatgaggtctccaactgggcccgccccggatacgagagccagcacaacctcggctattggcgcaacgtcgattgggccggtctagggccaggtgcccactcccactacaacgcggtgaccgaggctgaccacccccagtcggcttcgctgacagcccccgccagcgggggcaagtccgaagccattgcctctgcctcagctgatggacaggccaacgccgaacttggagaaaccaacgccgaactaggtatgatcaacgcgcatgggaacaactcccaagaaattcatgcccccgctggcgggggctgtccggcggatgccggactgggggtggtttctgtctcacacggtctgcgcagctgggacatcgcgcacccgcgtttgtggggcacggccatcaacgagaaccgtgtgccgtgggccgatagcgagacgatcactcccgaggaaaacctcgaagagctcatcatgctcgggctgcgcctgcacgagggccttggcctcgaccgcatcaaccgcgccatcaacgatgcaggtatgagcagcacgccccagactctccgaaccgtttcggttgaccaactcgcccccatgatcagcgaaggcctgattaccgtatccgataatcatcgagtggtgcccactcgtcgtggccggttgctcaatgactcggtaatcgaacagttcttcgattacgtcggtgtatgagtcggtggtatggtgcgcggcagtcgccattacctgttcgctagttgtggttacaccgtcagagggagcttttttgttttaccggcgggggagggaaccgcgtaggactacgtccggggcgctttgcacgtagatcaggcggttggcagtgccgccggtggcctccgcgtcatcgcggttggacaggatgctgtccacggcggcctggcccatttcggccagcggcagatgcacggtggtcagtggtgggaacacgtcggcggagtaggggatgtcgccgaaaccggtgacgccgatttcctgacccggctcgatgccgttggtgcgcaacgcggtcatcgcaccgatggccatcacgtcgttgagagcgatgattgaatcgatgcctttgccgtcgtacagtgcgccttcgcccggcttcagcagtccggatcgggccatttgcatgacggccgcatagccgtcggtgcggctgaacttaccgtttgccacggctttcgggtccacggtgatgcctgcctcgtccaacacttccatcacaccggccagtcgttctttggaggagcggtgtgcgtcatcgcccttgagaatcgcagggcgcgtatacccggaatcgacgataagctttgcgatggcacgcgcgccgacgtcgttcgccacgtccacggccgggaagggcaggttgcggttgagtacgaacacggcatgtccgccggacgattcgtactggatgagttccgtctgcaacgcctggcgttccggcgcgtcggtgtattcgctttcggagatgatgatgccgcgcggcctggtggatacggacttacgcaccgcctccaactcctcgtgcggggtggctgccacgccgatggtcacggagatgccgcgttcggccgccgccttgaccacgccttgcgacacggatgcgaagtagggatcggagatatcggagaccagcagcacgatgttcggtgcagtgcctttggccactgcctgagcataggcgttgggacgatagttgagcttggtggctgcttccatcaccttgacatacgattggttgcgtaccttgcgggtgctgccgttgagcacacgggatgcggtggcgatggagacctgggcttctttggcgacgtccatcaatgtcgctggcgattgcgccttatcgttctgtacggccacgatcgaatcggtccttttcttccctgaaacggaaaacatgtctaaacgcttaccgcaatgatatcgcagttttgcttgcaatagtagcattgtggattggaaagcctgaattttgaacaaaaataatcacgcgaattacggaaagcgattaccgttccgcgtatcgtgcggtatgctcgaagcatgacgcgatacttatgtgcccctgactccttcaaagagagcctgaccgccatggaggcggcgcgggcgatggctcaggggattgagaatgccgaccacgatgccgaggtccgttgcctccccatggccgacggcggtgaaggcaccgcacgtgcgcttgtcgacgccactggcggatcgatgcacgccgtgccggtccacgacccgctcggccgacctgtcgaaggccacttcggcctgctcgccgacggcacgaccgccgtggtcgagacagccgaagccagcggcctcgcactgcttgaagccaaaaaacgcaacccgttgattgcctcctcctacggcaccggcgaactcatactcgccgccgtccgttccggagccaagcgcatcatcgtcgggctcggcggcagcgccaccaacgactccggtgccggacttctgcaggccctcggcgttcgtcttctggacgggaacggcaacgaccttaagcacgggggagcggccctcgctgatctggccaccatcgacatcagcacgatggacccggctctcaagaacgtctccatcaccgccgcctgcgacgtgaccaacccgctgaccggtcccaccggcgccagcgccgtgttcggaccgcagaaaggtgcctcccaggccgacgtcgccacactggacgccgcgttggcgcacttcgcgcaggtcatcgaaagccggctcggcgtcgctgtgaacgacgtgccgggcgcgggcgccgccggcggtatcggcgccgcgctgaaaggcttccttgacgccgaattccgtccgggcatcgccatcgtcatcgaacaatccggacttgatgcggccgcgcaatgggctgacgtggtgttcaccggcgaaggctccatcgacttccagaccaagttcggcaaaaccccggccggcgtggccgaaaccgccaagcgccacggcaagcccgtgatcgccgtcgccggacacatcggcacgggcatcgacgaactgcatgaggtcggcatcgacgcggtattcggcatcgcccccggtgccgccagcctcagcgaactgctggccgacgcggccgccaacgtgacccgcaccaccgaacaagtcgtacgaaccctacaactgaagcagcttcacaagctccctctgatgggccgagccgtgaaggaaacgccggaggcgtttccaggcgagggcttgacgacagtcaagccagccgaaggctccataattgcgggacgagctgccgcggcaaagccgtgactgagggggagacttgtggcgcagccgcaaaaaatggcatcggctttcagccgatacagtcattcgtctgcttctctccctcagtcagctgcgctgacagctccctcgtcagagggagccacacaattcggaaagaaagatatgcgcaccatgctgtacaccaaggtgaccagcatgctgagcaccacgggcatcgccagcgagaaatacgccttcggaatcggcgccttttcgaagagttcgttatccatttccgtcccttggtgttttcgttcttcagtcactgcgcgggatgccgttcggcgtgcatcacaggcattgtagaggcaacagtgtggacaacgggcggggggagtatctcatgatgcggtgagggcgttgatgatgacgcatcgtgtattggtggccgtgtgcatcgtatgtgaacctgtgctggcacggcgtacacacgatgggaaaagaaagaatatatggaccccgttgtcccggttattgttcagttattactgtgttgaattattgcgttattcaattattgtggtgtgccggccgattgcggcctgcgggggattgccttcgtatgtgtcgtgcaatctcatgaatgggatcgttcgctagattcagcgagcgtccttgttggcggcgttgatgatgtcggcgaacatcttggagtcggcgtagccggcgcgggcgatggcgtccataccggagagggtgaaaccgcgaatcatggaatccatgaatgacataatgtgttccttgtcttgacttgcaaagccgtgggctttgcgatgtgttgttgtttacgttatgagacgggccgtgtgtgagcggcgagtcagggaagaggctcagcgagcgttcttatcggtgtcgttgatgatgtcgagaatcatctgggagttggcgtgaccggactgggccagggaagtggcaccgtacatagccagaccgcgaatcatggaatccttgagagacatcatgtttcctttcgttggtcaaaaccttgtggctttgagttttgtttatcggtttctttctgaaaccggtttcagaataacgcagtccgatgacaaacgcaaggggactattccgctctcggcgtttctggcggaatgtcgccgttctatagataccgttcggtagttaagaggctgtctagtcgactttctgacggtcttgttctgggcgcatggttttcacgaaatggcctcatgtcgcggaaatcgtacgctgagtcgtcgtaagcgtacggtcttcatgaaatggggtctcatctcgtgaagaacgtacactgagtcgttctgggcgtacggttttcacgaaatggggcctatcttcaccggattttgggcacaccggccttgagcagcttggtctcaagattgatggggcgtagcagatcctcatagaacacatggacgatttcggtgacgccctgttcccggagatgccgatcacgtctgcggtcgtactccattttcgcctggaggcttgcgcgattctcgttgctggtgtcggcgtatttggccatgccgtcgtattctgccacgatgatgcggccgtctgcgagcttccaacagaaatcgacgcgatatggcattgcgggattgtcgggattcatgaactgcacctgcagcaggggaatgccgaaagacaattcggtgatctggccacgcatcaatgattcgccgccgttttcgctcaggggatccgcgtacttcagcagcttggtcacggagacctcgtcgcagacgctttgaatcatcagcgactgcacctcttcgatggtcgtcagggactttctcagagccgaatcgtatatgggcagcgcctgtgggaatgggaatgccgcgcagtcgagcagcgttcgcgccggagtcgtcaagagaatgccattatgcttccgcgtcggaatccgattgatatagatgcggttgagacgcgcctcgtctccgccgccgatgccggacttcgaggcgatgtgcactgtgccgtcgtgcagggaatagttgtgctgcagtccgtatacgcacgccgcactcaaccccgcaaatacccactgagggtggattgcggacagcgcacgtatgacctgcaatgactgttgctctctggtcatggtgttccaaagtattcggtcggcgtacaggttcttatacggtgacaccagctccccggcatgcaggcgacgtttcagggcgcgccgttgcgcatcactggtgccatagcagcagcgacgctcctgcttcgcctgctgcagcagtgcagaaacttccttgtgttctttcatatctcgacgctaagggtgattttgattgttgcacaagctcaaccggcaaatgtgaatactatgtcacgcgaattgttggtgtggataacttgaatcgacgtcgacggctttgccgacggtcttgtcggaggcgatattagcctaggacaccttgctgcgccgccttccataccgagaacagtcatcagtgacaccgagggcatcttcagcgtatgttcttcacgaaatcagctgccatttcgtgaaaaccgtacgctcagaatgactcagtgtacgttcttcacgagatgaggccccatttcgtgaaaaccgtacgttgacgacgattcagtgtacgttcttcacgaaattagggatgatttcgcggaaaccgtacactcaccgcaactcagcgtacggttttcgcgaagttattgatttggatataggttccccgtcatgaactacaatgaatcgcggcgaaaaacggggaaccgaagtcggagcgcggctgaacggatatgggtgtgactggatgactgccatggtgatgccggttctccttgacgtacgcaacaacaacaactgacaacaacaggggagacaaggatggcgagaagtgcgggccgcacccgaccggtgatcaaggacgtggccagactggccggagtctcggcaccgaccgtctcccggtatctcaacggcaccgtcaatgtcaccgaagacaagcgtgaacgcatcgccaaggccatcaaggagctgggctatgagccgagcattgtggcgcgcgccctgtcgaaccgggagatggactccgtggtggtgttcgcggccaatccttccgccttctccacgtccgaaacgaaccatggggtcgaggccgccgcccgtaaacgtcggttcctgctcaatatcgtttctttggatgagtccgacatggactccgtcaaggctcgtgtgcgcatgggtttgtcgatcaggccggcgggcgtgatcgtctacgagtacgaccgggccggcatcgccgcactggaatacattcccaaagatatgccgatggtcgtggtgggtggcagcttcggcgacggcgaataccagatcatcaacgccgaaagggatggtggccgttggatgaccatgcatctgctggatctcggccatcgcaccgtgttccatgtggggcgcccggaaggaccgaccgataacacccgcaccaatgggtggcgtgacgcgctcaaggagcgcggcgtcacggtacctgacccaatcatcgtgcccgacgatgatttggaggagtcggtcaaggctgggcgcaccttgggccgtcgtggtgatgtgactgcgattttcgccggcaacgacgagaccgccatcgctgtgatccgaggtctaagggaggttggtcgccgcgtgcctgctgacgtgagcgtcgtaggctttgacgaccgcaacttcggtgccatgtggaatccggcgctgaccagttacacccagaacttcctggacatgggggagcggtccttccggatgctgttcgaacagattcaggccaagcgtgccggcgatgacgcgccgccctcgcaggtcgaagtggtgcaaggcaagccgtgtctgcgtgcctccgaacgcgcgtacggcgacggcgaaatcgcgtagtcgatggggcgtgcgtatcaatcgatagtgactgtagcgcattcatatcgtgacgaggagtctcccatgccgaactgtaagcgcttacctcaaatagttcataatgtgatttacgtcatactaatagatgttctgaatcatagtgttctgcaaggattccttgcggaaaatggctatttatcaacagttttcgaaaagtccgcatgatgggcgactgtgagcacactttatggtaatcgctttccgtagtgttattgttacagtgtgacttttgaacaatcggtaactctgaagactcagccccagacctcgggcactatctcagcggcagacgccgcgatgcaatcggcccgcgacgaacgcatccccggcaaactcatctgcgcgatcgtggccgtcggctcactcgcattcttcggcatcctgaccgaaaccgtgatgaatgtgctgttcccgcagctgatgggcgtgctccacatcagcgaggccaccatccaatggctcaccaccggctatccgctggtcgtgtcgattactgtgccgctcagcgcatggctgcgccgtcgcttccgccagcgcagcatcttcctggcggcaacgcgatgttctccacgctgcagcagttcacgggtgcggccggcaccactgtggtgggctaccgtgatctccgtgttccagtccggctcgggcaaggtgggttccgccggctatgccgccgccaccgtgaccggcgcatagattgactacgcgatcatggctgtggtcatcgttatcgttatcgtgttcgtcgccatgctccacgccctgcgtaaccggaagtagatggtaagtcgagtggcaccatgctaccgcgcaatggctgggcatggagttttggctaggaatcgttcgacaggcgttggcgcggccgctgagagcattcgcgtcgaaaggtttgccggagctcgttcggcgtggaatgggccgattcaccggtgattgttggtcaaacagccaatgctgacccttctgccaatggttagcgaggttcctatcataagcatttcggagagcgatctcgaaaaaggcgacatccttcacgaggatttgaccaaggtcaacattccactcgtataaagtaaggctgtaagcgcatcttggtggcaagcgtcaaggtatgtacggaatcgcggggcggaaagccactcctcaatccactgcggattggtaataacggatgattgtaacgcatgaatcacgaggcccccttacctcgtattgcaatgccccggtgacatgaaaaacggcggtcaacacggggcttgtacattaaggatacaggaagggtagttgtaagttgctgatatgccgtgtttttttacgatagtcatcggcctctcccatacggcggaacaggaactgacggatgccgagatgccgtgattcggcgggaggacctgtactggcccagtccttctgctcggtagcggtaccgctacgccgactcttcccgacgctccagtgccgccgatatcagtgaatgcccagcctgatgtcggtagagttaaggctattggcttggtctcgacggtgagacttctccaatggccaatatgcactgttgcaaaggagtatgcggtatgcaaccaatcaaagccattcaatacggctgcggcaaaatggcgaagtacacgattcgctatatgcacgagaaaggcattcaaatcgtcggtgccatcgacgtgaatccggaagtcgtgggcatggatgccggtgtgtttgcaggcatcggccccatcaatgtgccgattcgcgccgatgccgaggctgtactcaacgagtgcgacgcggatatcgcggtagtcacgctattcagcttcgagaacgaaatcgccaccatgtgcgagcagtgcttggcccgcggcatcagcgtgatcaccacctgcgaggaatgcgtctacccgtggaccaccgatccggccaccacgaaccgtctcgacatcatcgccaaggaagccggtgccaccatggtcggctccggcatgcaggacatctactgggtgaacatggtctccaccgtcgccgccggatgccacagcatcaagaagatcaccggtgcggtgagctacaacgtcgaggattacggcctggctttggccaaagcgcacggctgcggtctgaccgccgaggagttcgaggccgagcttgcgcatcccgaaaccgtggtgccctcgtatgtatggaattccaatgaagcgctggcccagaagcttgggcttaccatcgcatcgcagacccaggccagtgtgccgtatttcagcgatgtcgacgtgtattccgagacgatggacgagacgattccggtcggcaaatgcatcggcatgtccgccgtggtaaccaccgaaacgaatcagggcatcacgttggaaactgcctgtatcggcaaggtgtacgggccggatgatggcgatatgtgcgattggaagatcgagggtgaaccggacgtggagttccacgtggtcaagccggcgaccgtcgaacatacgtgcgccacaatcgtcaaccgcattccggacgtgctcaacgcgccagccggatatgtgacggtcgatcagctcgatgaaatttcatatctcacgtatcccgccgcgctgtacgtggcatagacccatattttcagggatgaaggccggcactcataagggtgccggccggtatcaggcggccagagttgacgtgcgtggcatcacctggaactggatatggtcatgggtgatgtcatcgggccgttcatgccgtaggttcgactcgatcagcgtcaccatgcgatcgataaccgtacgagccattgcggggacgtctatcgccacagtgctaatgggtgggttggcgcagtcggagaaggggatgccgtcgaatcccatgagccgtacgtcgtcgggcacgcggatgccatgttcggtgagttcgcggagcgcgccgatcgctatggtgtcagacatgcacaggatgccacaatcgcccgggacaggcgtcaggaccgcaagcagcatcctgctcggcatcggcggcgacatcgccaacttcaaaagcgcggcccacctggccgcccacgccggcatcgctccggtcaccggccagtccggcaccagcatcaagaggcgagaaaccctccagacggggcaacaaacgcttatagactattgcgccttgtataaatgcgaactgccagtcaaccttaccgttgactggcagttcgcatttatcgctcccgctggcgggagctgtcatgcgaagcatgactgagggtggtccacagccgccaatccgtaacatcacccaacgcagcatttcacgatacggacgtttccgtatcgtattttcgtgtggtcaaatagacatttcgggcgaaaaagttcgaaatacccccataactggccataaaaacaattgcttgagaatcactattgacttttatggcgactcggtatatggacacgcgaaacgaaaatgacatggagcaacggtactgtgtcaacagcaatgaacgaagaggcacgattcccttacgtgcccacaagcaattgaggtgattccggtgacattcaaagccccgctcgatctcacggtccacgctccggacggtatgtatgatcccgccgacgagcatgacgcctgtggtgtgggtatggtcaccactttgaacaagcgtcctgaacgcaaaatcgtcactgacgccattgaggtactggtcaatctcgaccaccgcggtgccgtgggtgccgaggagaacacaggtgacggcgccggcattctgatgagcatgccggatgagttcatgcgtgccaccgtgcccgccgaactgcccgaagccggccactacgccgcaggcatcgccttcctcgaccgcgacatcgaaacctccggtcagcaggaacaggccatcgccaaaatcgtgcgcgaggagggactcgaagttctcgcatggcgcgtggtgcccaccaacccggacggcctcggcctgcaggcccttgccgccatgccgggattcaagactctcgtggtcgcctctccggacggtgctctggccggcgtggacttggatcgcaagaccttccgcatccgcaagcgcgtcgagcatgaggtaggcgtctacttcgcttccctgtccgcccgtaccatcacgtacaagggcatgctcaccaccatgcagc

SEQ ID NO: 3862 - DNA, 11974 bp, Unknown
  R35_2m  MAG No. k141_21511
gcaagcctggcacaggctggtgtcgccgctctggtggtcgaactggtggagggtgtggtgcggatgccggacgaactggtgtctgcggccaggctgcatgggttgacgttgattggtctgaaatctcgcgtaccttttgtcgacatctgtcagagtgtcaataccgctatcgtgcacgaacagatgcacttgcaattggaggtggacacaatgtccacttcattacgtgagggattgtcccgtaccggcaatatcgaggctgtggccgaaaccattgcgtcgctgttcggcgaaagcgtcgccattttcgatggtgacggtctgttggccgctcgagcgggtcgtgcgttcgatgccggcaacgaatcgagcgccgtcatcgcccttgaaagtcgctcccggccggtgggagcattggagatcacgcaacgcaccatgactttcgacgccacgatgcgtcgggccatcgccaccatcgtgtctccggtggccgccctctatattgacggcggcgcgcgcatgggcatgatgcatcatctgagtatgggcccggccgacggcgtgcacgtcaatacatttgaggcgcaggaagcgcatgcgatgctcgacgcgctgggttttgccggatcatgtatctatatgccattcgcttttcggttcagatcggtggtggaaggcatcaaccatgtatcgacgatggtcgaacggttcgaagaacggtcgggatgcgccgtctcctgcatgctggaaggtgacttgatggtcggatggtgctccaccaccgattcctcagacggtgcggccgcattcggacgccattgcatggatgcgcttgccgtactggaaggcgacggtgtgtacgtggtgcatggccgagtggcattggacacggtgacgctggtcgacgggttcgcggtattgcgtgacatcgccaatcaggaaccggcatacgggcgaatcgtaagtaccatgtccgcactcgtcgaccgtttcgtcgcatcctctgatatggacaaggcgatgcgcatgctcgtggtgcagaccatcggattcgaggtcgccgcctctccgttgttgctggacacactgtgcgtctgcttcgacaacctcgatagcaaaaccggcgcgtgcgagcaattgggtatcagacggcaaaccctgtacaaccgactggacaaagtgacacaaatggtcggcgtcgactataacgacaaaccgaactggtcgatgctgctattcgccgccaaactcacgaaatcatggcaagaacagcatggtgaataatgcgccagcaccactgggcaacctgtccacttctacgccgaacgggttaatcgacgattcacgtttcagcaaatactcaagggcatagtcgaggctatcgcggcgctggtcgacctgctgcgaaacgaattcccacttgaatcccattcagtcacacgaacagcacatccttgaaaggacggtgacatcatgagttccgcaacgattactacatctgcacgactgatgaatttcacccctcaaactgaagaacaggccatggtcaggaaagtcgcggtatcttccttccttggcaacttcatcgagtggttcgactacgcctcctattcgtacttcgccaccaccatcgccctggtgttcttcccaaccgacaatcacaccgtcgccatgctgcagaccttcggcgtgttcgcgctatccttcatcctgcgtccaatcggcgcactgttctggggtagctacggagataagaaaggccgtaaagccgcattggcccactcgattatgttcatgtccggtgcgagcttcctgattggctgcctgccgtcttactcggtgatcggcgttggcgcgccgattctgcttctgctgctgcgcatggtgcaaggcttctccgcttccggtgaatatgccggtgcggccacattcctcggcgaatatgcacccacctcaaagcgtggcatctactgctcgctgattccggcgtccaccgccatcggtctgctcgctggctccacgctggccacgctgatgaccgccaacatgaactccagcgcgatggtcggttggggatggcgtgtgccgttcctgctggccggcccgctcggcctgattgtgctgtacatccgtaccaagctctccgattcccccgtgtaccagtcaatgaacgatgctcttgagtccaagagcgccgcctccgctgacggccaagtcgtttccaagagcggcatgttcgccccgctcgccgaactcttccacaaccatctcaaggccctgatcatcagcttcggagcctgcgtgctgaatgcggtcggcttctacaccgtgctcacctacctgccgacctatctgtctgacaccgtcggcatggacgccacccagtccggcaccatcaccaccatctgcttggtcgcctacgtgttcatggtgttcggcatgggccacatctccgacaaattcggccgcaagaaggtgctcatcggtgcttgcgtggcgttcatcgtcctcaccgttcctgccttcctcatcctcaacacctcccagttctggcccgtgctgctggttgagctggcaatgtgcgccaccctgaccgccaacgacggtaccctgtccagctacctgaccgagacgttccccacctccgtgcgcttcaccggattcgcgttcagcttcaatctggccaatgccatcttcggtggtacggcctcgttcatcgccactggcctgattgccctaaccggttcatccatcgccccggcctggtacatggtgggtgttgcggccatcgccttggtcgcgatgattctttcccatgaaaacaccgacaaggatctgaatcacatctgatctcctcagctccggctcctttcccgagggagccgggcgcattcattgaccatccaatccaccaccaacccaaaggagtactgcaatgggtagcaaccgccgtatggaccacatgacctggccggaattcaaggaggtgaagactcatcccgtcatcgtgccgatcggttcgaccgaacagcacggccagcatctgcccatcggtaccgacgcggtactcgccacgcgggtcgccgaagatctggcggaacgcatcgacggcaccgtgctgcccaccctgagctacggatacaagtccaagccgctctccggtggcgggccgctgttcccgggtactatcgacatgaacggcgtgacagtgatcacccaaatgcacgacgtgctgagcgaactcatcgccgatggcttcaccaagatcgtcgtcatgaacgcgcattttgaaaacgaggcgttcatcgtcgaggccatcgacctggtcacccgcgaaaccgggggagtggccaccatcgtggaaaccaattggtgggacccggttccgcagtcggttatcgacaaggtgttcgatggattggtgttccccggctgggcattggagcatgcggccgtcaccgaaacttcgttgatgctccactacgcgccggaactggtgcacatggaccgtatggtcgaggaagccggtgccacggcgaaatcctatgtacgctacccggtgcgtcaaggtgacgttcccgctcacggcggactcgccaatccggccggctcaagcgccgaacgcggccgcctgattgccgaggcgtgcgtggatgcggtagctgagatctgcgtcgaggaatttgccgagtaatctccccttgccgacgcattcgtagtgacacgggttgcaaaggcctgaccctgatagtacggggtcaggcctttcccatcccaagacgccgctaagaattcacctgagagtcgccttcctaggcatggccgttcaatcgacgatcctagtgtgactggtgtgagcaggaatatgaagaaccggcggtgggccggcaagcgatcggggatcgcttttggtgcagtagcgcttatccttacggctctggtggttccttatgcttgtgcgggaaccacgggagccgttcctttttccggcgataatccatcttccggcacccgtacggtgaccatcgccgacatcactgattttcacgggcatatcgaacgtggtgcggacaacgccaccgccttcaccgtggccgacagccataatcccggcaatatgatcccggtatcgaccggcgatttggtgggaggttccccgtatgagtcggcggtggagaaggaccaacccacgctggacatggccaaagcgtggggattgacgatttcggcggtaggcaaccatgagttcgaccgcggtgccgccgatttcaacaatcgcatcgctgatcccagcaatggcatcgactggctgtgcgccaacacgtctgccgccagtaagtcgcctgacggactgctgagccatgtacgtgactctacgattcgaacggtgaacggcaagcggatcggtttcgtgggcgcccttactgatgcgctcggctcggtagccactccgcagattacgcgtgatgccgatcttgacgaacgggcggtggacgcgatcaatcgcgtggcccgtgaactcaaacgctccggaaaggtggatgcggtggtggccttgctgcacgccgatgcttcagccgccgccgatattgggcgagatgttgatgtggtatacaccggccacaatcacgcgatcaagcgtggtacgaccgctggtggcgcgcctatttacgaggcgggcagcttcgggcggaatatggccgtgcaggatttgatcatcaccggtgccgggcgtcgcgccacggtgcgagtggccgatgtggacctcggcaatggcaccagccatacggcggttgacggcgtgctgggcgtggaagggcttaatgcgcatccggcgcaagccgcttggatgtctgccggtgctgaggcgaacgatgaggtatcgcgcgctcagcatatttaccaggcggcggcaacatattcgaatcatgccggcaacgcggtgattggcaccttggcctccggcgtgaatttcgacaaacaaggttcggataagcacgggaatacggtcggtgtgctggtggcggacgcgaaccgcgagtcaatcatgaagcatgtgtatgccggaaatcgtttgccggtaatcggattttcgaataatggcagtctgcggactccacggcttgatatgaatggcgatggcaaagtcaccgtgcgcgaggtggatagtctcatggccttgcagttcaaggccgcgcatgagacgctcaccgggcgcgatgtgaagagagtgctcgccgagcaattccaccgtgacgatgggcgactggagcggcgctggctcggcatctcctcgaacgtgacgtatcggtatgccgaatgcggtacgaccggtgggagcggcaatgccgatgccgccgctgatactgatgccgccgctgataccaacgctgacgctgacgagtgtgctgccgacgaacatgcggcggttcgtatcgtgaacctcgccgttgacggtcgaccgattgcggacgatgacctggtgattatcgcatccaattcatatctgcttcagggcggcgacagttaccccgccttccgtgccggaaccaattacggcgagctgaatatgccatacagccagccgttgcatgaatatctggccgcacatcaagggctcacggcaattgttacagcaccggtagggactcaggcgtaagacaccaattgctgggtgactgaggaactatggggtggagttatgagtatagggcagaagaaaacggcataaatatgacgaagctcccctcgctgaggggagctgtcgccgtaggcgactgaggggagcttgcggtataaccgtaaactcccctcagtcagccttgctgccggcttccctcagaggggaacctggcacgagacccttacttgatggcgttcagccactgctccttggtggccttctcggcttcgagcttggccttcttcttcgggtcggattcggccgcgatcttggcgtcgagctcggcgagctgggcgttgagctgctcctcgaagctggacttgcgggcgtcggcctccgggtcggtctgcttccaagcggcatcctcgatggccttgatctgcttgtcaacggcgtcgagacggttctcgatgcggcgcatatcgtcacgcggcacgtaaccgatctgatcccactcttcctgaatcttggccagctcctggcgggccttcttggcctcggcgtcggtcttcaccggcaccagagcctcggccttgaccagcagagcctccttggcagccagattctccttctcggaggagttgatctgatcgcgatcagcctgacgagcgttgaagaaggtgtcggcggcttcgcggaacttggcccacagctcgtcgtcctcgttacggccagcgcggccggccttcttccaacggtccatcagatcgttgaacttgcgggaagtctcaccccaagcggtggaatccttgagctcattggcctcggcgataatcgcttccttggcttccttggcggctgtacgctcgttgtcgcgagcctgagcccacttgcggcgagcctggttgaaggtggtgcgggcggcggagaagcgcttccacagcgcctcggcctccggcttgtcgatgcgcacggtggtgcgctggtggttctgccactcgtcgaacaggttacggaacttgtcggcggtggagcgccagttggtgttgtcgcccagagaagcggccagtgcttcagccttctcgacgatggcggtgcgctcggcgacggccttggcctgagcggccttgcgcgcttcggcgatctcggccttcttggcctcgccggcggccttcagttccacgtaacgggccttgagtgcggcaagatcgcccacgacggccggctcggaggtttcttcacccaagagcttcgcggattcgtcgatttcacgggccttgatgttcggggaagccagacgggtggccagcagatcgagcttggccttgagatccaggaaacgacgggcgtacagtgccaacgcctcttccttggagacatccgggaactggcctacctcgcgctcggcgtcgccatccttgacgaagacggtgccgttgtcatccacgcggccgaaggcctcggcggccttgacatcagcctcggaataggtggcggtggcggcggccggggcggcagcgcgcggcttggccgacggagtcttcttggcgaaggcggcgggggagggcgcgtgcggtttcggcatggaagcgggggacggagtcggcgccggcgtggccgcgctggcttcgggtgcgggtgtcgttgcctgctcttcgggcgcagcggtgtttacgggttcggtgacagtttcgtcggccatggccagctccttaaagcgtagaatgcataagcgggagcgtctcccatcccgggcgaaccaggaagttttgacgcaaccctcacctattatattgatttcgtggctaaaggtgcatcaatatcaggattcccggagtggctcccctccgaacgtgttgtggagcagcgtgttatcgatacgcttcgtaaggtttttgagctcaacggcttcatcggcattgagacgcgagcggtggaaaccggcgcttctttgctgaaaaagggcgagaccagcaaggagatctacctgctgagccgtttgcaggaggtcggtcatgaatccgacactccgattgaagagcggttgggcctgcatttcgatctgaccgtgccgctgagccggtatgtggtcgagcactcgggtgcgttggcgttcccgttcaagcgctggcagattcagaaggtgtggcgtggcgagcgtccgcaggaaggccgcttccgcgagttcgtgcaggccgatatcgacgtgatcggtgccggcgacctgcccgaccactatgaagtggaactgccgctggtcatggtctccgcgctggaagagctgcgcgcgtatggcctccccaaggccaccgtgcacgccaataaccgcaagctgtctgaaggcttctaccgcggccttggcctgacggacgtcgaaggcgtgctgcgcgagatcgacaagctcgacaaaatcggtgccgatgaggtggcccgactgctcaccgagacctgcggcgccaccgaagcacaggcacgcgcctgcctcgaattggccgagctcaccgcctccgacggtgccgagcttgccgccaagttcgatgcgctgtgcgagtctcacggcatcgccaaggattccgaggcatacacgctggctcgtcagggacttgataccctggccatgatcgtcgacgaggccgccgccatccgccccggttccgtcatcgccgacctgaagatcgcccgcggtctcgactactacaccggttccgtctacgagaccttcctcgacggtgccgcatcactcggttccatctgttccggtggccgttacgacaatctcgcctcccagggcaaccgcaagtacccgggcgtgggcctgtccatcggcctgagccgactggtcagctacatgctgcacgctgccggcgcgcacgccagccgcgtcagcccggccgccgtgctggtcgctgtgtggaatgaagaggaccgcccggccgccaaccgtattgcgaaccaactgcgtgcgcgcggcatcgccaccgacgtggcacccaccgcggccaagctcggcaagcagatcaagtacgcggacaaactcggcattccgtacgtgtggttcccggccaccgctgccgaaggtgcggaaggcgcagagcccgctggcgacgaggtcaagaacatcgtcacgggcgagcaggttgccgccgattgcacgtcgtgggagccggatactgtggttgcccagcaaaccgtcgaaatctgacgtattcgcgcgaaaaatcgaggagaaacaagataatgagccagacggcttacagaacacatcatgccactgaagtgaccgaggccctggtcggccagaaggtcacccttgccggttgggttgaccgacgccgtgatcacggtggcgtggccttcatcgaccttcgtgattcgaccggcctcgtgcaggtcgtcatttacgacgaggatatggcccgcccgctgcgcagcgaattcgtgattcagattaccggcgaagtgcgcctgcgcccggatggcaacgagaacacccatctggccaccggcaagatcgaggttgtggccgagaccatcgagatcctcgccaagtccgacgccctgccgttccaggtttccaccgctctcgagaatgagtccgagaacaagctgcctggcgaggacgtgcgtctgaagtaccgttacctcgacctgcgccgtccgtccatgcagcacaatctgaagctgcgttccgacatggctaaggccgcccgccacgcgctggaagacatggacttcaccgaggtcgagaccccgaccttcattaagtccaccccggaaggcgcccgcgacttcgtggtgccggcccgtctggtgcccggttcctggtacgccctgccgcagtccccgcagctcctcaagcagctgctcatggtctccggtgtcgagcgttactaccagctcgcccgctgctaccgtgacgaggacttccgcgccgaccgtcagcccgagttcactcagctcgatatggagatggcctacgtggaccaggaagatgtgatggccatgaccgagaaggtcatcgccgccatctggaagtccgccggctatgaggtccagctgccgctaccgcgcatcacctggaaggatgcgatggacaagtacggctccgacaagccggacctgcgcttcggcaacccgctggtggaactgaccgagtacttcaagaacacgccgttccgcgtgttccaggccccgtacgtgggtgccgtggtcttcaagggcggtgccgccacgccgcgtcgtcagttcgacgcttggcaggattgggctcgtcagcgtggagccaagggccttgcctacgtggtcttcagcgaaaacggcgaactcaagggccccgtcgccaagaacctgtccgatgaggagcgcaacggcctgcgcgaggccgtcggtgccgaggaaggcgacgccgtcttcttcgccgccggttctcgcgagtccgcccagctgctgctgggtgccgtgcgtgtggagctcgcctcccgcgaaggcctgctggatccgaagaagttcgctttcacttgggtcgtggacttcccgctgttcaagcccaccgacgatccggatgatgacgatgtggctgtcggccactccaagtggacctccatgcaccacccgttcaccatgccctccaaggattggatcgacaagttcgacaaggatcccgagcacgccatgtccgattcctacgacattgtctgcaatggtgaggagatgggcggcggttccgtacgtatccaccgcgacgacatccaagcccgtgtgctcgatgtgctgggcatcaccaaggaagaggccgacgagaagttcggcttcctgcttgaggcattcaagtacggcgctccgcctcacgcgggtttggccctcggttgggaccgcaccgtgtccatcctggccggtgccgactccatccgcgacgtcatcgccttcccgaaggccggcggcggccgcgacccgctgaccggtgctccggccccgatttccgacgagcagcgcgccgagactggcgtcgactacgacccggacgccgacgaaaactaatctacggagcgtataccgcctttcctcagcactcgacgcaccttagtgcgccttcggcttcgaacggcggtctccgcatgcgtagattaattttcgaggagtaatgctccggtgctattagccgcaaatggcccttggaataattccaagggccatttgctttttgcgggtggggcccaatgtgccaaatacctgccaaggggtgccaaatactccgcccgatggcacctccgccatgcggcaaacctcgcaccatgcggtgtcccccttggcgtttgccgattatccttccatggggcggtaacttcctcatggggcggtaaacaacccatggggcggtgaaaaccccatggggcggtaggtcaaaatggcttaattccgcggttttacaatttcttcaaaccgccccatgagcaaattgccgcctcatgggggaattgccgccccatgaggagcgatcgcaactccgtatttgattaatgttgtgatgctttgttgtgttttgcttgtttccgcctcctgtattcccctttgcgcgcattgatggtaaggctgccgtctattaatacccggcatgaaggttgaggacggccaggaagcggtatttgcatcgcggtggcaacctcttgtgcgaaggcacgttgtttggcggtgttccacaggtcatcggcgaacacctcgatgacggtccagcccaattgccgcagacgtcgacgtttttgctggtcccgcacatattgtttgcggaagcgacggtgatgatcgccatcatattcaatagcgactttgtattgtggataagccatgtcaacggtgtaggtgtatccgttctctgaatcggtaatgccatattgtgtttgcggtatgggcaggccgaaaagcataagcgccaagcgtgtacgagtttcctgaacggaatccgatggttttacgagcttcagcgctgcctcacaacgcgcacgaccaataacgcggtgaaaggccgttagtcgttgagtgaattgttcaatggcatatccataacgtctgatgagcgcttcagccagcaccactaattcagtgaggttgagatattgggcaaactgtatccacgcatccatgggatgcatgcaggttacgccgtttgaaaaagcgatactgctgaactttgcattccatatgcgatagtcgacattgatgctcctatacattgtcaagcgtttgggtgtgttgttttgggttggttgtcgagtgtatccactggatggcccgttgctcgagttcgggaaggtcgcgtgcgccgcgttcgatctcgctgatgcggctcgagggcac

SEQ ID NO: 3863 - DNA, 5273 bp, Unknown
  R35_2m  MAG No. k141_21918
cttggcggcgatgcgtgccagcgtgttctttgccacggtgtaggaagtatcgcggcctagcttttcacgcagatcggaaatctgcggaacggtaagcccgcggtactcggtcaggtagacggcgtcagcgttacggaattcttccgtaagctgagcgactaccgcttccttttcgggcctcttcatggcgttccttcctaagtcggccgttgacttggagttcggaactttcggccgggcaacaaaaaagccctgcgcacaggcagagcaatataatctcgcgaagcgaccttcgccggcccttgacgggcttatatctctcaacctgcgctggcttggcgaaccaaacttcggaaatgcactcgcgcgcacttcaaccaacggtctgtggtttacggatgattagattacggatggtcagcgacattgcagaattcgggcgtgtcgcaaggcattacaacgtggcggcgtactgggctacggacgcggtgacttccttcagatagtcgagcgagcgacgccagtggccaggcacctcgatcgaatggttggcatccgggtattcgtgcacgtgcggggtgagcgcgttggcgcgggctcgatcgtagaacgggtcggcggtgccggcgcagatcagcggtgccgggccggagtatcgggagctggcggcgtgcgactggtcggccagttctgcgcggatgatcgcccttgcttcggccacgctcggagcctcggattcggcgacgatatcatcgccgacagccggcaccggaatcacccgggcggatggatcgaagtcggcgtgatgcagcaccggggtcagcagcacgaacggcagaccgtagtgtgaggccacatgtgggtaggtcatcgtcgtcagcgacttgccgatcagcaacaggcgagggccggacggggtgtcggaatcacggttcggcgagccagctgcgccatcggccagcacggtagcagaatcatcggcggcaacgccatccccggaatcaccggctttacccgcgccggactcgcgcgcggcggccatccagccgtcaatcgcctgattgaggaccggaatcaccgtggacaggtcgtcggaagcgttgcgtacgttcatgcggtcgattcgccagccggcctcgaccagagcctgggccgaccagtagagcagcggacggtcgcagttgtagccggtgccaggcatcagcagtacgcggccgtactcctgaccgggcttgacgacattcttcttccaagaggtgatgctgacttcgacggccggtttcatcgcgcgccttccttccacgggtgtgccctgcgtgtccctgagttgttccgaattattctggcagtcagtctactcccggacccgttcacgttacctccacaagctataatcggccacggttctgattggatgcgcagcgcctgacgcgcgttgggcaggccgatcagggcgagtcgcaattctcgccggggccagccgcagcattatgcgcgcggtgcgcagccccgcataaaaccaaggaagtagagagtaaatggagaagttcttccatttgaaggaaaacggcacgaccgtctcgactgagattctggccggcctgatcacgttcttcgcgatggcctacatcatcgtcgtcaacccgcagatcctgtcgcagacgggtatgccgtggggcggcgtgttcctggccaccatcatcgcggccatcatcggcaccctggtcatgggcctgttcgccaatgtgccgtacgcccaggccgccggcatgggcctcaacgcgttcttcacctacaccgtgtgcttcggcctcggcttcagctggcagcagaccatgtgcatggtgttcctgtgcggcctgatcaacatcctcatcaccgtcaccaagatccgcaagatgatcatcatggccatcccggagtccctgcaacacgccatcggcggcggcatcggcctgttcgtggcctatgtgggcatgctgaacgtcggactgatcaagttcacccccggcgacccgaaagccgcggccaagggaggcgccgtggcggcgaccccgggtctggccgacttcaacgacaaggtgctgtgggtcttcctgatcggcctcgtactggccattgtgttcaccgtgatgaaggttaagggcggcatgctgctggccatcgccatcaccaccgtgatcggcatcccgttcggcgttaccacctggtccaactcgcagtccatcagcgaaaccttctcccagctgccgcagaccttcggcgcgatcttctcagctgagggcttcccggcgctgttctccgacgtctccaagctgcctctggtcatcgtgaccatcttcgccttctccatgtccgatacgttcgacactctgggcactttcatcggcaccggccgccgcaccggcatcttctccgccgaggatgagaaggctctggagaacggccacggcttctcctccaagatggacaaggccctgttcgccgactccatcgccacctccattggcgctatctgcggcacctcgaacaccaccacctacgtcgagtcttccgccggcatcgccgcaggcggccgcaccggcctgacctccgtggttgtggcgatctgcttcgccctgtccgcgttcctggccccggtcgtctccgccgtgccgtccgccgcaaccgccggcgtgctggtgatcgtcggctgcatgatggccgcttccctgaaggaagtcaagtgggacgacatcgccgaagccatcccggcgttcttcgcagccgtgttcatggccttctcctactccatctcctacggcatcgccggcggcttcatcatgtactgcatcgtgaagacctgcaagggcaaggccaaggaggttcacccgatcatctggattgtggccgcgctgttcattctggacttcgtgtgcatggcgattctgtaacgctgattgacaacggattagcctttaaggattaatccgccgccatacggcataaaggccgggctctcacaagggcccggcctttgttgttgccacagtgatcaacgcccatgagtaccttcgatgatcatccgccattcaatcaacggctggccatgactcggacatggcgcggcacggcaagcggattttgctgttgggcataacaacagacgagagaatagatccggtcgtgagcaacaggataggtgccatgcggtgccgtgtacaaactgttgtcagttgtcaacgctttttagcgtggctccaatcatcttaatggctgttttccgccattcttgatgcatgagaatagttgtcaactgacaactgaatgtacatggcagcagcacgagtgccctattcaacatcgaaatatgtagcgcgaagaagccgaaaaaccaaaaggcttctataccgtttcattcggtatagaagccttttggtttgcgattaagctcttctcacccgagagaagctagagaacgatcagtcctcgaatgccgaaccgttaagcgggaagccctgcgggcttcccgtaggtgaggggggcggctatgccgcgaccgatccgtgagagggctttagtcctcgaacggatcaaagtcgcgacggacgcggcgacgcgggcgctcagtgcgctcttcgcggtcggcgcggtagtcgtcgtagttgtcgtcggtggcatagcgcgggttgcggtccgagccacggccacggccgccacggaaaccgccacggcgatcatcgcgatcgccacggtcatcgcgatcggaagagcgacggcgacgcggacgatcatcatcacgggagtcgcgagcatcacggtcatcgcgatcgtcgaagtcacggtcggcagaacgacggcgacgcggacgatcatcatcgcgatcatcacgatcgaagtcacggtcatcggagcgacggcgacgcggacggtcgtcgtaatcatcctcgaagtcatcggagcgacggcgacgcggacggtcgtcacgatcgtcgaagtcacggtcatcgcgatcggagcgacggccacggccgccacggcgatcgtcacggtcaccacggccacggccgccacggcggtcatcgcgatcgccacggctcgggcgggcgttgttctcctgatcctcgaaaccagggatggccagggagatcttgccgcgatcatcgacaccctgaacgatcacctcaacggtgtcgccttccttgagcacgtcttcgacggcgtcaatacgctcgccgttggccaggttgcggatctgggagatgtgcagcaggccgtcggtgccgggggtgaggttcacgaaagcgccgaacgacgtggtcttgacgaccttgccgttgtaggtttcgccggcctcgggcacgtgcgggttggcgatggaatcgatgatggacttggccttcttagcggcctcgccaccctcggaggagatgaagacggtaccgtcatcctcgatggcgatttcagcgccggtatcttcctgaatctggttgatcatcttgcccttcgggccgatgacctcgccgatcttctcgaccggaacggtggtggtgatgatgcgcggagcgaactcgctcatctcagccgggccgtcgatgcactcgttgatgacctcgagaatcgtggcgcgggcttccttggcctgctgcaaagcggcggccaggatgtcggcggggatgccgtcgagcttggtgtcgagctgcagggcagtgatgaactcggaagtaccggccaccttgaagtccatgtcgccgaaggcatcctcggcacccaggatatcggtgagggtcttgaagatgtgcttgccatcaacgtcgccggacacgaggcccatggcgatgccggcaaccggggccttcagcggcacgccggcagccaaaaggctcagcgtggaggcgcacacggaacccatcgaagtggaaccgttggaaccgatggcctcggagacctggcggatggcataggggaactcttcacggctcggcagcaccggcacgagagccttctcagcgagggcgccgtggccgatttcgcggcgcttcggggagccgacgcggccggtctcaccagtggagtacggcggcatctcgtagttgtgcatgtagcgcttggactgcggaccggacagcgcgtcgatctgctgctccatcttgagcatgttcagggtggtgacgcccagaatctgggtctcgccacgctggaacagggcggaaccgtgcacgcgaggcacaatgtccacctcggcggacagggtgcggatgtcgcgcaggccacggccgtcgatgcggtagtcc

SEQ ID NO: 3864 - DNA, 49855 bp, Unknown
  R35_2m  MAG No. k141_22109
ccgtaccctgctgtacttcgctgagatctccgagtgaaccactgcggtctaggccgctacggttcgtttgagaactaagctgtgagacccccgccttgtgcgggggtctcttcgtagtagaacggtaatcatggcaaagaaaagcaagcatgataagggcgcgggttccaccccggcgacagtccaactggagaaggcgggcgtggaattccacgtatacgaatacgagcactccaacgaccatatggatgacggctacggcgtggaggcggccaccaagctcggcttcgacgagcatcaggtgttcaagacgttgatggcggacaccggttcggagcgtgtggtgggcgtggtaccggtcagcggacatatggatttgaaggccctggctgcggctgtaggtgccaagaaggcctctatggccgatcccaaggtggcaatgcgtgaatccggctatgtggtaggtggcatctcgccgttgggccagaagacacgtcataagactgtgttggatgaaagcgccctgcaattcgaccagattctggtctccggcggcaaacgcggactgtccgtaggcgtgaacccgcaggacctgctcaaggtcttgaacgccgttgccgcaccaatcggcacgtggtgaccgttcttggcttccctcggtgaggggagccaaggatgactacttcttcctgcgcaactccgacggcagcacgaagtgcatgttttccttgatggtttcgacggacttcataccggtgaaacccaagttttgcagagcgtcaatcacaccggacaccagttcgtccggcacggaggcacctgaggagacccccacggactccagtccgacgaaccacgccggatcaagctcgctggcatcatccacgcgatacgctttgccgcgcttccccaagccctcctgcgccacctccatcagtcgcacggaattcgaggagttggccgatccgacaatcaccacgcaatcggactgctgggccaccagtttgaccgcagcctgacgattcgatgtggcatagcagatatccgaactcggcggctcttgaatccacgggaacttggccttcagcgcggcaatggtgccggcggtctcatccacgctcaacgtggtctgcgagagcagcaccagcttggtgtcgggcgcaaaatccaacgaatcgacatccgattcatgctcgatcaagtgcacatgttcggggttctcccccaccacgccgactgcttcatcgtggcccttgtgcccgatatagacgatttcatacccctcgcgcacgaaacgcagcacctcacggtgcaccttacccaccagagggcaggtggcatccaccacatgcatgccacgacgttcggcttccgccttcactaccggagatacgccatgggcggaaaacaccaccggaatacccgcttgggcagcagcatccggaatctccgccaattcctggacgaacaccgcgccttgcccggccaaatcctcgaccacatgcttgttgtgcacgatctgccggcgcacatataccgggggcagcccatcctcgcgcgtccgctttccggaagcctccgcggctttgagaatggtctgtacggtaagaatcgcacggtccacacccgcgcagaagcctcgcggatcagcgagcacaacgcttttggtcatcggaacctcctgaacgtcaatagtgtttttccagtgtaaggcagggattacaggaatctgccgtcacaactattccgcgtctcccacgaatcaccggtttccaaggaatccacgtgcttctcgcatgatggtgtgagactcgtcactccacgtattgctaccgtgtctgtacgaattgtttattatatgccggctatcgccaatccccgcctcgatagaggagacgcgctagactggggccagcgatagcaggagctaccggcccaccaacctcactacgggagtgattccatgacgagtaaaacaccacgcaccggaaatcagtattcgattcactatggcgattattccgccgtcatctgcgaactcggcgccaagattcgccgattcgattatcaaggcaaggaaattttctgcccgttcggagtcaacgacctgacccccacctgtaacggttatgtgctggccccgtggccaaaccgcatcgaaaacggcgaatacgatttcaatggcaagcattactgcgcgccggtcaacgaatatcatcccgcaccgcgcaacaacgcgaaccacggatacgcctaccactacatgtggaagcttgaatcgttgaccgatagcgccgtgacgctttcactgcgcttccccaacctggacggatacccgttcgatgtgaccgtgaccgtcacatacgaactcggcaacaacggcatgaccgtgaccgtcaatgcccgcaatgatggcgacgagccggcaccgtgggctctcggcctgcatccgtggctggccaatggcaagcagggcgcgacttccgccgagcgtgactccgactccgccgcctgccacctgcagatcaaggccgccagtcatgtgacggtgaacgaggcgctgattcccaccggcaccgaaccggttaccggcatctacgacctgaacgatggcccgacgctcgaaggccgcgcctttgatgatgcctgggtcgacgtggagcgtgccgccgatggtacgaccaccaccacattcacccgcccggacggtattgaagtgaagctcattggcgatgagacgatcaatgcttggcagtgctacaccgccactggcgcgccgttcgccgagcatccgtatggtatcgccgtcgaaccgatgaccgccccggccaatgccttccgcactggtgaccacttggtgacgctcgcccccaatggcgactacaccactgtggtccgctacgaagtagtccagaagtagttccgttacgctggctcccctccagaggggagccaattttttatccttatgtgccgccgcgtcttgggacttatgcgatacgattgtgagcggtaacaatctgtttcacaaaggagtgtgcactatggctttgaagcctcgcactggtaaccaatatgtcatctcgtccggcgaatggagtgccgtcgtcaccgaactgggtgccagcctgcgcgagctgaagtggcgcggcgaagacctcatcgtccccttcgacccgaacaaggtcatcccctgctgcaacggctgggtgctggcaccgtacccgaaccgcgtgaccaatggtcagtattctttcgatggcgaagactaccagatgccgatcgacgagttcgaccgccaatcctccctgcacggctacgcctaccgctacatgtgggagctcgttgatttgcaggaatcacatgtgacgctctcctggcgttcccccgacatcgccggctacccgtttgatatcaccatcaccgccacttatgcacttgacgagaacggtctcacggaaaccttcaccgtgcacaacaacgacagcgtgaaggccccatgggcatttggcatccacccgtggctggccaacggcaagcacgccaccggtcaggccattaccgccgacaacgagtcctgccgtcttgagctgcactgcgatacccacgtgaccgtagacgaacacctgctgcccaccggtgaagagccggtttccggcatcttcgacctgcgcgataaccccacgctggagggacgtggcttcgacgatgcctggaccgatatcaccaaccgcggcgaagacggcagcacttccgccgtgttcacccgccccgacggcatcaaggtcacgctgaccggcgacaagaccatcaactcctggcaggtgtgcaccggcaacgaaatcggcgggaaggctcgtcaggccggcgtggccgtcgaaccgatgaccgcctacgccgacgccttccgcaccggcaaggatctggttgtgctcgagccgggcgatgactacaccaccgtggtcaccttccacgccgaacaaatctgaaaaaccgaataaccaagcctgacgatcatcgccacatggacacccgtgttgcatcacgtcgtacttatgtggcataattccgaaggcttatttttttactgcagcaaaggagtccatcatgggcatgcgcggacgtaagcgcaaggatcgtcgtaagaaggccgccaaccacggcaagcgtcctaacgcctgattcttcgcgtttcttatagaacgctcaaggcccgtctgatgatacatcagacgggccttgttgtatatgtgtcgttacttatcttcgccgcagcagtgatcaagcgtggccttgagccgggccatcagacattcgggtgccacatccgggcgcaagtaggcacgcaacgcggcaatcaacgcctgttcacgctcgtcgcagcaggtacgggggtcaaaacagtcgccctccgtaacgatatgcacgtctgtctggaccgacgcagcggccgagccggtatctactgaacgatgatgcaccgccgtgatatgcacttcggtctggcttaccgtgccatcggccgccgtacgggttatggagatatggcgagtacgctctaccggctgatcgttcatcagatctcctttcccgaaagcttgcttgactgttgtggcgtgtgggcgtgagtcgcatgactatgtctcactacggcttgcgtgtcgccattgctgccaacagttcgttcactactttcattatggccggaatcggcgattcgaccaacgttttcgctcaacttcgcggatggtgaaccagccgacgaaccagtcgcgtacccgcgctctttcgcatacgaggcgagctcacgcttgagttgcgtgcgggcgcgattcaggcggctcatcaccgtgccgattttcacgccctgctcatcggccacctgttggtaggacttgccgtcgatggcggcgtcgatgaacacctgccggcgttccggcgagagtttggcgagcgcggccatgatttcctcgggcgcgaaggcgtccaaatattcctcttcagcggacttgagcccgcccgacgtatgttcggcggcatcgtaaatgtcccaatcgtcgtattcgccggtggagtcgttggcacgctgcgggcgccgcttggccttggcatactggttgaagtaggcattgcgctcgatggtggtcatccacgcctcgaagttggagcccggctgaaatgagtcgaaggccttgaacccgcgttcgaaggtgtcctggaccagatcctgcgcgtcatcgggattgttggtcagcctcatcgcctgccggtacagtgcattgacggcgggcatggcgagctgctcgaatctggcgcgcttggctgccatggactcgcccgatccggctgactgcccggattgcgtagttgcttcgcttgtcgtcacgtttcaccattctaatcaaatcatgtgcccatatcgtggtcgatgacgtgtgagccacaacacgctgcaccccacctgtagaatggcgtatcggctagataatagggagtaacaattatggctttgactttggcttcggccgctgacctgctcaaggaacaccatctgctgcgtgaaatcatccaaggggatgtctggaccgatgacccggcccgtatcgcttcggcggatgaaccgttcgccggcatcacctacgacacccgcaaggtcacgcagggcaccctgctgtgctgcaagggccgattcaaggccgagtatctgaacggcatcgacgaagccggcctggccgcatacgtggccgaaaccgagtactcagccgcaaccgccgcccccggcctgatcgtcaacgacgcacgcaaggcgatgagcctgctgtccgccgcgttctacggatatccgcagaacgagctcacggtcatcggcgtcaccggcaccaagggcaagacgaccacctcgtacttcacgcaggcgcttatcaacgccgtctccggcggcaaggccgcattgttctcctcggtcgataattgccttgacggccacacctacgtcgaatccgatctgaccacgcccgaatcgatggacgccttccgcatgatgcgcgaggcggccgataacggcatgaagtatctggtgatggaggtctcctcccaggcgtacaaggtggaccgcgtctacggactgactttcgatgtggccgcgttcctcaacatctcccccgaccacatcagcccgatcgaacaccccacgttcgaggattacctgtattgcaagcgccagatcatcgccaacgcgaagtcgctggtactcggcgcggacagtctgcacgccgatctgttgcgggaggacgcggcggcagccggcatcggcgcaaccaccttcgccctgcatgacgcggataatgccggcaccagtgcggacgtcgtcgcctggcccgccgacacggcgcacgcctccttccacatcgccgacggagatcagacccttggcgactaccatctgtccatcgatggcgacttcaactacctcaacgcggcggcggccatcgccatcgcccatgcggctggcgtatcgctcgatgacgccggcgcactgcacgccatcgaatccgtacgtatcgccggccgtatggaacagttccgcgatccgcagtcgaacacgctcgccatcgtcgattatgcgcacaactacgcatccgtcaccgcgctgcttgacttcgtctacgagcgttggggcgaggaaaacccgcgtatcacgctggtaaccggatcggccggcaacaaggcctacgatcgtcgtaaggaaatcgtcgaggctgccgagaaccgtatcgcgaacttcattttcaccgccgaagatacggacaccgagccgttcatcgacatctgcatggaaatgcaaggctacatcacgaacaaggatgtggcctccacggtgatttccgaccgtccgacggccatcaccaacgccatttacgatgcccgtgcgcacgccgaccgattcaacatcctgctgatcatcggcaagggcaacgagcgttggatcaaggaccatcacaagcatgtgccgttcgacggcgacgatcacgtcgtcgaacgcatgtttggcttgtgacgggattccggccaatcagatcctgatcggatcccgattggcccacatcagatcacgcgcaatacgaccaaaccagaaacacgacatacggatacgaacgaaaaaggatagctgaatcgtaatgatcacgttggagaaagttgacggagccacactggaagccgaagccgagaaggccggcatcacgttgcccatcgaacagaccaaggtttggtctggttttcaggcggatatcgacggacgcacaccatggggcgattatctgatcaagcgtgatggtgaattggtcgccgtgatctcctttatcgattttgagacgcacggttatcattatctgcgctcgatgcatgggccggcgtgggtcgccaagcccaccgaggctgaggagcgcgaggtcgtcgacgccatcgtggacaccgtcaagaaggccgacaagaacatcgcgttcctgcgtatcgacacctggttcgccgatggtacggagaaggtgctgtccacagtgccgtacgaccagaccgtggtcatcgacgtcaccggtggcgatgatgagattctggctcggatgaagcgtcgtggacgccgtgacgtgcgcaagtctctgcgcgagtgcccggccgaggttgccgatgagacggataaggcgctggccgatttctccgaatactacgatgtgatggtcgagaccggccagcgcgatggattcacgcctgctccgatgagcgactactccgatatgatcggcgcgttgggtgccgatcattgccgtgtgttcgccgcacgtattgaagaccgtgtggtggcatggtcgattgtcaccgtgaatggcacgcatgcggtgcgctactatgccggcatgcgcaacgaggttatgcgtctgcatgtgaccgacaagctgctgtattccgaatgctgcatcctgggctcgcagggtattactgaatacgatctgatgggcattggctccgatttcgcgccgtctctcaagggccttaacgagttcaagtgcaagttcaccgaggaaatcaccccggtggcccccgcccgcgacgtacccatcaagaaggtcttctacaagacgctgcaaaccatccaaggcgtacgcaaggcattgcgctaataccgccccgctcccgctggcgggagctgtcgaacgaagcgagactgagggcggtctttcgatatggaccgccctctgtcacctgtggtaccagttcctgtcagcgggaaccattcgtttatcgttcgagtttttgactcaccacggctgttacgccgtcggctctcatggttacgccgtaaagcgcgtcggcaatcgacatggtgcgttgctggtgcgtaatgatgatgagctgcgcatgggcgcgtagctcattgaacgcattaatcaaacgggtcaggttcacgtcgtccaacgcggcctcgacctcgtccatcacatagaacgggctggggcgggcggtgaaaatcgcgaacagcaacgccagcgcggtcagtgaacgttcgccgccggacagaagactcagctgtttgacgcgcttgccggccgggctggcctcgaccagtacgccggtggtgagcatgtcttccgggttttccaggcgcagtcgtccggtgccgcctgggaacagcgtggcgaacatctgctcgaacgcctcggcggtatcgtcgaacgcggatttgaacacctggaccatcgtggaatcgagatccttgatgagctgcatcaaatcgtcacgtgatttgaccacatcgttgcgctgatcattgagatacttgttccgctcctcaagcgcttcgaattcctcggtggccaaagggttgatcttgccgagtgcggccagatcgcggcgagccttatcgagacgcttcttctgctcctgacggttatacggcacggtcttaaagcgggcggaatcgccgttggtgccggcctctcccccggtttctccctcttcggtcccagcctcagcttccgtctcatccaacggcacagggttgccctcatcatccagcacgggcaccggctgttcggggccgtaaccactaaccaattcctccaaagtgagaccgagttcgtcggacactttttgcatgagctgcccggattcggcggccaaccgttcgcggtttacatccaaggcatgttcgcgcccggtcagatcggtgaccttgggctcgatctggttgcgctgcgcgcgcagggccttgagttcctcgtcatggctggaggcggcggcctgcagctcgtctcgtttggcggccacgtcatgcagcgtatgttccaccatggcggccactgctcgcgcgtcatcggccacgccttgcaggtgtgcggcctgctcgcgtctgcgatcgttcaacgcctcgatgcgggcgcggcgttcggcggcttctctggcgttgtcccgcagcagcccggcctgccggctcagtgactcccctttgcggcttgcttcggtccacgcgattttcgcggcgacctcatgctcgcgagtcaggttcagttcgcgctccagcgtgcgttcacgttcatcaagttcgtcgaaatcggcatgttccgctgtggattgctgggccgatgccaaagcgcgattgagatcgtcgagcttgagctgatgctcgttgcgattctcttgggtctcggtgattttcctatccagctgctcaagctgacgggtgaacgatgcgacgcggtctgtggcggatttcagagatttctccgcctgttgggctttgagccgggcttcggtgcgtttggcggattcctggtcgacgagtcgggccgcttcatcgcgtttggctttggcctcggccacttgctcagccattccgccgtcttgggcggccaactgtttgacctgtgccaatgctttgtctcgacgggcggccagagacaggtccgattgagagatggaagagccgccgaccgccgccacgccgtgtgtgaagatctcgccgttcttggtgacggcccgcatggcttcgccggatgccacgatgtgctgtgcttcgtcggcggtgccggccatggctacatcagccagcaggagacgcacggtgcgcacgacagcttcggcctgtgccgggttctttgcatccgggttcgcggtgacgagtgctgccagcgcgttgcccgattgcggggcggccgccgtgttctcggcgctactctcctccgactccgtgcccggctctgtggcgggatcgccggcaatgctcgcggtcagcaccacggctttgccgagcttatcttctcgagcgcgttcgagggcgtgcaacatgttgcctgcctcgggtaccacgatggcgctggcatactggtcgagcgcgtgggccacggcttcttcccagccttcggccacatggatgaagtcggtgagtcggccaagcgaggccacgtccgtgtcgcgttccaatgatccggaggcattgcggctgcctagcgtgtcggcaagcgcatcggccttggatttgagcgagatgatcttggactgtatctcgcgctgcttatcggcgagttcgttcagtcgttcgcggcattcggcgagcgttgcacgcgcggcgtccaatgcggcaccgtcatcgtcggcaatggagtctgcttcgctgcgcaatgcgtccagctgttgctgggcatcgtcgcgctgggaagtcagcaagtcgcgttgggaggcataatccttggcgcggctggtcgccagttgcacggcggattcctcgcgggcgatgagttcgcgcagtcgggcgatctgcgcatcgcgctcctgtgcggttttgcgcagttccgtcaaggtctggcggactgaggcgagcttcttctcgtcgtcggcgcgttcctcggtggccttgtcgagtgcgatgcgtgcatcggccacggccttggtttgtgccgcggcctgagactccagttcctcggctcgtttgacgagcatgccgggatcctcaccgaagttggtgacgatctggccggtgagtgaccggctgcgctcttcggccaactgagcgagcgcgttcagtcgttcacgggtctgtgagaattcatgccagtattggttggccttggcgatggtcggactggattcagagctcaacgcctcgacctgttcgatgcgtactttgacgtgggcgagttcacgttgggcgacggccagctggttgcgcacatcgccaagctcttgacgtaccgtgtcgcggcggctcatcgagcgttgggcgtcttcggcatacagacgtgcttgggcgtcgcgtacggatatctgaatcgcgtcggcgcgccgggagatgcgtgcctgacgtccgagggggccgagctggcggtgaatctcccccagcaaatcgtcaagtcgactcaggttcgtttcggtattggccaacttgcgcaacgcgcgttccttgcgcttgcggtgcttcaggatgccggcggcctcttcgatgaacgcgcggtggccggacgggtcggccttcagaatcgcatccaatcgtccctgacccacaatcacgtgcatctgctggccaagaccggtatcggagaggagttcctgaatgtcgagcagacggcattgcgagccgttgatcgcgtattcggagcctccgttgcggaagatggtgcgggatatggtgacttccgtgtaatcgatatcgagcgtgtgatcggaattatcgatggtcaggctcacctgtgcacggcccaatggcgggcgggaggacgtgcccgcgaaaatcacgtcctccatcgaagtgccgcgaaggtttttggcaccttgctcacccatcacccaggtcagggcgtcgacgatgttcgacttgcccgaaccgttggggccgacgaccgccgtgatgccgggctcgaagcgcagcgtggtggcggaggcgaaggatttgaatccgcggagggtgagttccttgagatacatggcgtgagactgttttccgtatgtcgggcgtccgggtatccgatatgccttggattcgggttaccgggcgtcggcggaatcgtcggtgacggcgcctgtgtcggcgctggccgtgccggtgccggcgttaccgacgtcactggcctgttccttgccgagaccgaggacgtcgaacacgtcgaagtcgtccgggctcaccgaatcctcgaggttgtcggcggcctcatcctcggccttgtctgccggccgatccgaatcgtccgggtcgaccgccggctgatggacggccatggcctgcctcatcgtggggctggcatgctcctcaagcatcaggcgtgcgtcgccggcggtgacgaagctgccgcagataagcacgccgtggccgtagcccacgcccagctcgtcctcggcatcgaccatgttgacggcagcctgaatcgcgtcgggcaggttcgcttccttgatcacacggtcacggccgaacacgtccacggcaatcttctcgagctcatcggccggcatcacacgctcgcgccacgagttctcggtgaccaccacggagctcaggatcggctccagaacacccagatattcctcgacctgcttgtcgcgcatcatggcgaccacgccgaccagctgcttgaagtcgtagctttcctctatggccttgcgtagggcttcggcggcattcacgttgtgtccgccatccagaatgatggtcggtgaggtgcggatctgttcgatgcgtccgggaatcttgaccgagctcaacgcctcgcccaccaagtcgccgtccagcgggccattgaccggaatcaccacttcagaggcggcaagcgcggcaagcgcgttgtgggcctgatgctcgccgaacttggcgatcggcacgccctcgtaagtgccgttgggcgtggtcagggtggcgacctggccgccgactgcggccatacggtcggacacggtcatttcgtagccgtcgcgcacgagcatggcgtggttgcgttcggcggcttcggtgagaatcggcatgacggcttcctcatgcggctgaggcccgatgatggcggtgcagttcggcttgatgatgccggccttctcggtggcgatctgttcgacggtgtcgcccagccactgcatgtggtccatgtccaccgggccgatgatggccgcatccgcgttgagcacgttggtggcgtcccacaggcctcccatgccgacctcgacgatggccacgtccacgggcgtgtcggcgaacttccagatggccatggcggtgagcacctcgaagaagctcatcttcggcttgccttgctcctccatcctggcgtccaccagggccacgagatccttggtctggtcccagatgtcgatgaaatcgtcgtcggacagctgctggccgtcgatggcgatacgctcgttgatcttctccagatgcggcgacgtgtacaggccggtgcgcatgccgtaggcgcggcagatggcctcggccatgcgtgcggtggagcctttgccgttggtaccggtgatatgaatcacgcggaacgactgctccgggtggcccaggatgtcgagcatcaggttcatccggtcgagatccagattggtggtgttatgctccggcgggcggctcatgatgtccagttcgacgtcccgcatgctctcgttgttccgattcggatgctcgaatgacatatcctcttctgacctctgctcgtgttgctgttgaaccgttcggagtgcgtatgccacttacgtgttcgtgccattctcgtcatgtctacgcatgcccgcatatattccgcttccgcatgcgcaggaggctcccctcgcacaggtttgccctgcatggttcgggattcttgccttcacgcgtggagccgcactccctcaattccctctatcctagccgccggggtggtttatcgtgcgcgcacagtgaaaccgtctcatatgtcgccgccgcgcgggcggccttttcctgcagcgcgcacagtgaagccatctcatatagttgcaatgcggctcttgccgtcggcatcccattcttagtcggctgcaatccaaaacttgtatgtccggcgacgctgatgctattcagcgtcggtacagtgccagcttctggcggtacaccgacgctatgatgctcttgcgagtcggtagctggccaaaacctggattaatcccgactccatcgcctctcagtgtcgcctcctcgccaaggcatgccattctgccgtcgctgagaaatttcaacatcgtcaatcgaccatgtcttgccccggaaacgactctcacaaacgtcctctacatcatcttttgaactcgcagaggctcattcactgttatgactgctctcaccgtcggcaaccgtccaagccctggatctatgccgccaataaatcgcagcaaatcgtcggccacgatacaaccattggactcacgccgacgctagattccacactcagacagaagccagccaatatctgaaccagcaccgacggcgtacaaagcataagcactgttaaccgtcaattcgccgccctctaccagctacatccgccttcgccgatgatatcttgttcgaatccccaaagcacgttgttcgaatgacattactgatggtggataagttttgcatgttatccactattccgaattagtggcctaataccttgaaattatcgggaatatctcactccaagacagccaagctccgaggctagaaccacaatggctgaaatccatacttacgctgcttcgttccggctacgctcgacgtcatgaagacacacaaagcagtggcctcgctcatatcagccgcgcagaatgagctgagatgcgtctattcaagaaatgaagcggaacagaccgctctacgccgccgtgcccagagtggcgagttgttgaaagtgtatgacggcattcccagtctttatgcaaataccgcatactgggatggtttgacgccgccggagcgaacgttgcatatggcccgcgctcttgcgcaagagcatcctcagtgggtttttggcggcttggtggcagtaagtgcctatggattcgaacatcaatggcatttgcatgatggctgcataaccatcgtgacctccgatcatggatctcgtcaatgccatcagcgcttacgacatgtctatatgcccgatatgaacaatccgaagacacattacgaggcctccggcctatccctgatatcaccggctagaaccttggtcgaggccgctatagaccttgattttcggtttgcgctgccgatctttgactcggcccttgccaagggaataaccaaggaagagatagccgccgactgcgttcaatggagaatcgattatgcccgagtattccgcctgctgcgctatgcaaacgaaaggagcgagaatggtggagaatccctcgcgcgaggcaccatcatcgaggatcgcttcctcacgccgcgtattcaggtaacggtgaccgacccgcagacgaataccgagcaccgcgttgatttcgtatggaagctcgatgacgggcgcgtgatagtggccgaatatgacggcacacaaaaatacgtggacccagccatgaccgataaccgcagcattcaggaggtggtggccaaggaacgagcacgcgacgagggactgaaacgagccggtgccaccgaaatcgtccatttcacatacgtcgacgtcatcgaacgcactccgctgcgggtaaaactgctcaaagccagagtgccccagatggaggcatccgcagagcagcgggtcccgtgatgcgatgaaccttcatcgcatgggttcacatggattcagcccgcaaaatatgccaatatcaatcggcaagctccagcccatgcccctccttccctaccgagaacaataaacgggcccgcattccagcccgatgcactcgccatatgggcatgtccggaagaccgtccaaattccgtacttggttttaccgtcagccgtcaatcgtggcacatcgcataaagccgactagtatgaggtgggaatcgatgattcgacaacaactacatacaggagagtggcaatgggtgaagtgatcaccgccaaggacaaggaatatgaggccgaggagcgcgctacggcgccgggcgcgaaccagtcgatgagcgaccgtgtgaacaaccgctcgctgcgcccgcagtcggccgcattcaaggagtttatgaagtccggctgggccgacgatgatccggagatcaagcctctcgaatcctccaagttcacgccagcccgccttgaggcgctgggcaaagccttcccgggcgagcgtctggtcattccggccggccagccgaaggtgcgcaacaatgattgcgattacatgttccgcccagacaccacgttcgcctactacaccggtctgggttccgattacgaggccggcgccgtgctggtcctgaacccggtcgaccccgactcccccgaagccgccgccggcaagacgcacactccggaactgttcgtggcacctcgcgccgacaactccaccgaggacttcttcatgtccgcccactacggcgaatactgggttggcccgcgtgctggcctcaaggagatgcaggcgatgaccggcatcgagacccacgacatcgcccagctggccgacgccctgtccaaggacgtgggtgccgaggccggcgccgtgcgtgtgcgcgtggtcagcgagaccgatcccgaaatcacctcgatggtcgagtccatccgcgaggccaacggtttcgccgatccggacaagaactccgcatccgacgacaagctgcacgagttcgccgccgaggcacgcatggtcaaagacggctacgaaatcaacgagatgcgcaaggccgtggacgccaccaagcacggcttcgaccgtctgctctccgcactgccggccgcgctcgacaagccgcgttccgagcgtatcctcgaaggcgcgttcaacgccgtgtcccgtgagctgggcaacgccgtcggctacgactccatcgtggcctccggtccccacgccccgattctgcactggatgcgcaacaccggtgtggtgaagaccggcgacatgctgttggtggatgccggcgttgaggtcgattccctgtacacggccgacatcacccgcaccttcccgaccaacggcaagttcaccgacttccagaagcgtctgtaccaggccgtgctggactcgcagcaggccggtttcgaagccgccaagccgggtgccacctattccgacatccaccatgcctgcatgcgtgtgatcgccgagcgtctgcacgattggggtctgctgccggtgagcgtcgaggagtcactgtccccgcaaggccagcagcaccgccgttggctcgcctgcggcgtggcccaccacctaggtcttgatgtgcatgattgcgcgcaggcccgctatgagtcctatcagggcgcgaagatcacgcccggcatgatcttcaccatcgagcccggtctgtacttccgcgaggatgatctgctgattccgccggaataccgcggcatcggcatccgtatcgaggacgacgtgctcatgaccgagaacggccccgaatggatttccgccggcatcccgaagcagatcgacgacgtcgaagcgtggatgcggagccgtaaagcaatcagtccggtggactgattgtaggcgacgccgaacgctgacaagcgcgaggaaaatgaaatcatgcgcgaagcgcaccatattaagcaggctgcccaagccaagtaacccttaagctccctcatcagagggagctccttttttctactaaggaggcaatgtgcctactccggaatttgtgttggaattgcgtaagaagatcggccatgatctgctatggctcaatggcgtgaccggttgtgtactgaacgaacatggtcaactgctgttgggccgtcgttcggacacgggcgaatgggcgatggtctacggcatcaacgagccgggcgaacagccggcggacacggtggtgcgcgaaatcaaggaggagacgggcatcgatgccatcgtcaccgatttggtggccgtcacctcgtcaaacaaggtgctgacctacgccaatggcgacaacaccatgtacatggatcattcgttcctgtgcgccctgaagcccggcggcaatgccgagccgttcgtgggcgacgaggaaagcctcagcgtcggctggttcgatctggatgacctgcccactcccctggcggccagcacgagcgagcggctggagctgttccatacttacatcgagaacaaaaagcacggcgacgcccacgccctgttccagttcgatgggcagcagtactagcggatataaagttagctccctctgacgagggagctccaatgctatgcgattacgcctcttgggctaggagctcgtggaggtgggcgcggtgctgctgctgttcgcgcgggtcgggcacgggcagggaggccagcagcttcttggtgtacgggttctccgggtgctgcataatctggtcggcatcgccgtgctccacgatctggcccttatgcatcaccatgatgcggtcggcgagcatatcgaccaccgccaaatcatgggtgatgaacaggcacgcgaagccgatttccgcctgcagtcgcttgaacagctccaacaccttggcctgcaccgacacgtccaatgcagaagtcggctcatcggcgatcagcagcgacggcttcaacgccaaaccacgcgccaaagacgccctctggcgctggccgccggacagctcatgcgggaaacggttcatgtaggcgcgcggcagctggaccatctccagcaggtcgcccacatagttcttggcctcggccacggaaccgtacttgtggtgcacgagcagcggctcggccacattctccgcgatggtcatcagcgggttgaacgaggagcccggatcctggaacacgaaaccaatgtccgcgcgcttgggcttgaagtcacgctccttgacgccgttcatctcgatgccaagcacgttcagggagccgccggacaccttctgcaggccggcgatggcacggccggtggtggacttgccggaaccggactcgcccaccaggcccagcacttcggagcggtggatggtgaagttcgcgccgtccacggccttgaagtcgggctgcatgagatggcccgggtacgtgatggtcaggttcttggcctcaacggcgatcggctgttcgcgccaatcggccttgcgctcgatcggcttgccctcgcggtcgcgcacgaccagcttctgaccgatgcgcggcacggcacccagcagtcgcttggtgtagtcgtccttcggatggtagaagatctgctccacgtcgccctgctcgaccacgtggccgcggtacatgacgaccacctggtcggcgatgtccgcgatcacgcccatgttgtgggtgatgatgagcacggaggcgtcgaactcgtcacgggcgaggcgcagcaggtcgagaatttcggcctgcacggtcacgtcgagggcggtggtgggctcgtcggccagaatcaggccggggttcagcaccaacgccatggcgatgacgatgcgctgcttctggccgccggagaactggtgcgggtagtagtccacgcgggtttcggcatccgggatgccgaccttcttcaggatgtcgatggccttggcgcgcagttccttcttgtccttcatgccgtgggcgcgcaggccctcttcaatctgccagccgatggtgtacaccgggttcagcaccgaattgggctcctggaacaccatcgcggcctcggaaccacgcacttcgcgcagctgttcgccgctcagggagagcacgtccagcgaatcggagccatcgcgcttggacaggtagacggcaccggaggtggtggccgtctccggcagcagcttgatgatggagcgcgcggtcacggacttgccggaaccggattcgccgaccacgccgaccacggtcttgcgcggaatggtgaagttcacgtcctcgacggccttgatggaaccggcgtcggtcatgaaggagacggacaggtccttgatatcggcgagattcttgttgtcttcgctcatctctcactccttgccttccggcttgccttcgccggtccattcggaggcgacgatggtcgggtcatggtcggtgacggtggccggtgggtcgacgttcgcgtcgagttcggcgatcacctcgttgcgtgcggacggcttctcgtttgggtcgacggacgtgtcttcgatcgatccgaccacttcgccggcggacttgcgggcgcgcagacgcgggtcggccagatcgttgagcgattcgcccacgagcgtgatgccgagcacgataagcacgatggcgatgcccgggaacacggcggtccaccagatgccggcggtcacgtcggaaaccgaacggttcaggtcgtagccccattcggcggcggcggtcggctcgatgccgaagccgaggaagcccaggccggcgagggtcaggatggcttcggacgagttcagcgtcaggatcaccggcagcgtgcgggtggagttcttgaacaggtgcttggtcatgatgcgccaggtggaggcgccgaccacgcgcgcggactcgacatacgcggattccttgatgcggatcacttcggcgcgaattgtgcggaaatactgcgggatgtacaccacggtgatggagatgccggaggccaggatgccgctccacaggccggactggccgtgggagatcatgatggccatcagaatggcgagcagcagcgaggggaaggagtagacggcgtcggcgatcatcaccaggatgcggtccacccagccaccgtagtagccggacaccagaccaagcagcacgccggcgaagatggagagcagcacggccacgacgatggcgatgacggcggtgcgggcaccccacaccacacgggagaacacatcgaatccggcggcggtggtgccccagatgtgttcggcggagggcgcggcctgcgccgggaaggacgtgccgtcggcggccttgatctgggcgtggccgtagggggcgatcagcggggcgaagagggccacgagcaggaagaacgcggtgatcgcgagaccggtgatcagcatgcccttctgccagccgaccgccacgcgcagttccttgatgattggaatcttggtccagaacggcgtcttggtgctgacgttgagcttggtgaggcggtcgtcaccggggacggtgatcttgtcggaggatgcggtggtcatctcagtacctcactctcgggtcgataagcgcggcgatgacgtcgacgaggaagttgacgacggccacgatgatggcgataaggatcacgatgccctgcacggccacgaagtcacgggccttcaggtactgggacagcatgaagcccaggcccttccattcgaaggtggtttcggtcaggaccgcaccggcgagcatcagggcgatctgcatgcccatgacggtgatgatcgggatcagggccggccgccaggcgtgcttgttgagcaggcgcttttcggagacgccgcgcgagcgggcggcctcgacgtagccggaattgtaggtggagatgacgttggtgcgcaccagacggatgaacacgccggcggtcagcaggcctagggcgacggccggcagcacggcgtggcgcagcacgtcgacgagcacgttcatgtcgccgagctggatggcgtcgatgatgtagaagccggtcggcgataccagacgggtgaactgcatttcggagttcaggtcggagcggccggaggctggcaggatgttgagccagacggcgaagatgagcttcagcacgaggccgaggaagaacaccggggtggcgtagcacaggatggcgaagatgcggatgccggcgtcggcggcacggtcgcgtttgcgggcggcgagtcggcccaggccgatgccgacgatcagcgccacgatcagggcgaggaaggccagttcgaatgtggcggcgccgtagtgcgtaaggatgctgatcaccggctggttatcggtcagcgtcgtgccgaggtcgccgtgcagcaggccgccaagatagtcgacgtattgcacgatcagcgggcggtcatagccggccgcgtggatgcgctgctggagttcggcgggtgtcaggcggccgcccagggcggcggaaatcgggtcgccggtggcgcgcatcacgaagaacacgatggtgaccagaatgaaaacggtggggataatgaggaggaacctcgtcagcacgaagcggaagaaactacctgacagtcggttcttcttcgtcttggctttcgccggagtggtgctggaggtcgctgtggcgctgtctgacacgcgatgctccttggtgttggtaatcggtatataaagcaataaaggctcccctctccgaggggagctggcggcgaagccgactgaggggagtcatacgagttgggctcccctcagtctgccgtcgccagacagctcccccctcaaagaggggagctcatgctggatcagcccttggtgacggaggcgtagcggaagcggaaggaagcgtcgagggtgacacccttcacggaggtgccggtgacggcgacctgggcaccctgcagcagcgggatggtggagaggtcttcggtctcgagtttctggacctgcttgaggatgtcctcacgggcggaggcatccttctcgccggcctgcttgacgatcaggtcgttgacttccttgttggagtagccgttgttcacgaagttgccgtcgcggaagaacggggacaggtagttgtccgggtcggagtagtccgggaaccagccgagctggtagaccgggtacacaccgtcggaatcgtcggtgaccacgcggtccttggagtactgggtccattcggtggactgcaggtcgaccttgaacaggccgccttcctcaagctgggacttcaaggccgcgtactcgtcggcggaggcggagccatagtggtcgctgttgtactggagcttgaggtcgaccggggtggtgacgccggcatcggcgaggaccttcttggccttctcggtgctcggcttgccgttgccgtcgccgtaggcggacttcagcgtgtcatcgtgaccggccaggccgtccgggatgaaggagtacatcggggtgtaggtgcccttgtagaccttggtggagagctcttcgcggtcgatgaggttggcgacggcctggcgcacggccttggccttgttagcgtcggcgtcgggctgggattcaccgtagggctgaatcttgaagttgaaggcgatgaagcgctcctcaccgcccgggcccttgacgaccttgaccttggagtccttggagaggtcctcgatgtcggtcgggctcagggagcggtaggccacgtcgacctggccctgctggacggccatcttcaggttggaggcgtcggcgaagtacttgacctgcacggcggagttcttggccggggtcaggcccttgtaggagtcgttcttagcgtaggcggcggactcgttgatcttgaaggcggtcagcgtgtacgggccggcgaaggccttcttggagacgatggtgtcggcgtcggtgagcttgtcggcgtcgaaggtatcctcatcgacgatcgggccggcggggctggacatgacctgcttcaaagtcacgtcgaaaggcacggaatccttgaacaccacggtggtgtcgtccttagcggtcacggattcgacgttggcgagcagggagctcgggccgttcgggtcgttgatcttcttgatgcggtcgtaggagaacttgacgtcggaagcggtcaggtcgttgccgttggcaaacttcaggccgtccttgagcttgacggtgaattcggtgccgtcatcgttccaggtaccgtcatcggcggcgatgtccgggctcagctcggaggtgttgtagtcctgggcatacaggaacgggaacacctggatctgcacggcgtaggagccgttgtcgtaggagccggcggggtccaggctggtgatcttatcggtggtgccgatggtgatggcgttgccggaatcggcgcctgcggtggtgtcatccttcacaccgccgcaggcggtcagggatgcgatggcggccacggagacggcggcggccagaatcttcttggaattcaacaggaatcctctctcataacttgtttccacgccatcactgcgggcgtggattaccgcctgactatggtgaggatgtgttactcctgcgtttccacagccatcgacttatgtttcgcttgtggcgaccatggccggttttatgcggtatcgagcagtattacggattcttgtattacgacgtgaataacgttcaaatggtgagatgaacatactatcatgtcaccatttgaacatgcttgtagacgaatgctttccattcgtcaaccggtcggcctactgctacttgagcttgcggcccgcgcaccacacctgttcgaccgtccaatcggtcggatcggcaaggttgaaatcggcggcatagccgggggcgatgaggccgataggcaccccggtgaccgggttcggccggtcgaagccgaacgccttggccggcgtcaatgtggcggcctcgaccgcgtccaccgggctcaagcccagttcgcacaccgcacggcgcacggcgacctccagcagcagagtggagccggcgatggcgccgttggagaccaaacgcgcatgcccgtcgaccacgttcacgtccagtgcacccaacttgtaggcaccgtccgggcagtcggtcgcggccattgcatcggttacgaaggccgtacgatgaggcgcgaaccggaaggagaggctcaccatcggatcctgcacgtgaaatccgtcgttgatgagctcgatggtgacgcgcggatcctccaccgcggccggaatcggaccgggctcgcggtggtgcaggccgttcatcgcgttgaacatgtgggtcatgatgcccgcgcccgcgtcgaagccggctttggcggtctcgtagtcggcgtcgcagtggcccacggccggcaccacgccggcagcggcgaactggcggatggcggagatgccgtggggtagttcgggggcgatggtgatctggcggatgcagccaatcttgccgttcgccgcgcctgaagcctcaagcatgtcgtcgacgatgtcgggtaccggatccttgagacattccgggtcatgtgcgcccttgcgggccagagccaggaacggaccttccagatgacagcctaggatgtcggggcggccggactccatcttggcgcggacggtgcggatgttccggcagatcacgtccacgggattggtgatcagcgagagcacctggcgcgtggtgccgtgcacggcgtggccggcccgcgccacatcgatgccatccgacccgtcgtcgaagctcttcacccatgcgccgtgcgcgtggatgtccacgtagccgggggtcagaatacggccttcggcgtcgatgaccgcgttgcgatcggccgggtcgagccccaccgtgcggcagtagtgctcgaaggcctcctcccccgtgccggccgccacgatgacgccggcggcatcggagacgacccaatatccgcgccgttcgccgcacgcatccaccttgcgcgcgttgcgaatcgccaccggagccggcttgccctccagtgccgcggtcacgcgcgagactatctcgttcctatcagacatgttgttctccttaccgctcatgcgctcccgccaacgggagctggctcgcgaaacgagactgagggtggtccaatcgggaagcaatacacatatgccgccgccgataaccaccctcagtctcattacattcgacagctcccctcacacaaagagggaagccagcacacgataactcagatgccctgccaggccggcttgtgggtgtaggcgtagcgatagtagtccttgtggcgcagacgagaggcggcctcctcatccacgataatcgtggcgtgcgggtgcatctgcagcgcggaagccgggcagaacgcggacaagccgccttccaccgtctcctcgatggcttcggccttgccggcaccgaacgccagcagcacgaggtgacgggccttcatgatcgtgccaataccctgcgtgatgcagtgggtgggcacttggttgatgtcgttgtcgaagaagcgcgcgttgtcgatgcgggtctgttcggccaaggtcttgacgcgagtgccggaggccaacgaggaaccgggctcgttgaagccgacgtggccgtcggtgccgatgccgaggatctgcacgtcgatgccgccagcggcttcgatggcacgatcataggccgggccggccagcgcgactttgtcgccgtcttcgagcggagtgccgttgagtacgtcgccgggcacatggaccttggccgggtccaggccaagcggttcgaccacggtgcgatggatggtcgcatgataggactcgggatgggtcagcggcagcccgatgtattcgtcaagcgcgaaaccacgcacgcccgaaacgtcaatggcctcgtccttgacgatcttggcgagcgcctgataggcggccagcgggctggagccagtggccaggcccagcacggcgtccggctttgctttgatcaggtccgccacgcaacggccgtagatctcgccggcctcggcttcgttcttgacaatgatgatttccggcatcggtttcctccagttccgtgcggcccgcccgatgcgagtcgctgtaccgccgcccgtcttgcggataatggcaacatccttgtcacgtccgggtgccacgcggcgttccaaccaccgttcggcgtagcgccgattggtgattcgctatttgttaatgatagtaacaattttggacctcatgaacactcacggtgtttcctgacacttcacacaggtacactggaatttattagtgaagtttcataacagtttcaacgacgaaattgcgcttcaccgtctaagctgtgtatggaacaacaatcgccgtccactcgctcaccatcaggtaggaggaaacatgtcatatctcggtctcaacacaacgaccgacgaccatgcggccaaggcttcccccgccgatgtgcgccgcaagaaccgccaacttatcttcaggttgttgttccccaccaaccagtattcgcgcgccgagctcggccgacgcaccggattgagccgcgtggccgtttccgatgtggtcggtcggatgctggaggaaggattgctgcgcgagaccggtcaggcacccagcggcggcaaaggcaaacgaggcacactgctgagcatcgatatcgatcgactgcgcatcatcagcatcgacctgacgcaggagcacctgctgcacggcgcagtcaccaatctgctcggccagccgctgcgtcacgccgaagtcaccctgaacaccggctcattcgtttccgtggatgtgatcatcgagctcattgagaagatgctgggcatgtccgatggcgaggtcatcggcatcggagtcgcctcccccggcgtggtagacaacggcgtggtccgctcctccacgatgcgcggctggaacaatctcgacctgtccacgccaatcgccgaacatttcggacttgaagtaaacgtcagcaacgacgccaccgcagccatgctcaccgaacgtttctttggccaaggcgggccgaatatgcttttcgtgcgcatcgaaagaggcatcggttcggcgattctgctctcggacacgccggtaatcggcgaactgcacgcggctggcgagctcggccatatttccatcgatcttgacgggccgctgtgcccttgcggcaagcacggttgcttggagacgatgatttccggaaccgcattgaagaagcaactcagcgcagcagacgtggagcagcatcagggtatccttgctcgggcgggccgctatcttggccaagccctggccatgcctgtgggccttttggatatggcagacgtatgcgtctatggccagccgaacatcatcaacgcgacgttcatcggcgcggcccagcaatatctggatgccgccacatcctcgtccttccacaaacacacggtgattcggcgctgcgaatgcggacctgacatcaccgtacagggcgaggccatcgccgtggtcttccaacacttggccaaataaaagccggtcaccccggcaacgaaacgcgcaagaccaagcgcggcacagcacgacataaagcgatataggactgcgcgggagatggggcctcggagacaaatctgaggcctcatctcccatgccccggcactatgccaggctacgccgccatggcggcaccgatggctccgactggttggccgacaggtgccagacgcagccgggccggcaggtccagcgtttcgaggaatcggcattgcgattcgcgccggcgcagctcagccgtgatcacctcgaccaatggttcgccggttttggccatgccaccgcccaagatgatgagtcgcggatcaacggactgagccaggatttgtatggtgtcgccgatggcgcgcactaccatgtccagcacatcgacggccttggcctcccgctttttcgcgcgacgaatcaggtcgggcatcggcgggtcggcgttgggccacagacgccccacggatgcgcccgagcagactgtttccaagcatccgtattgcccgcaagggcacttgaggcgatgaggttcgactgggatatggccgatttcgccggccgcgccgctatagccatgcatcagcacgccgttttcgacgatgcccgcagccagtccggtgccgaagttcaggaacgcaatggtaccggccatgccgtccgcaccgcccaatacggtggccgcgccgacggcggcggcattgacgtcgttttccacatgggccggcacgcccgaacgctgcgagaccaacggccccatatccagcgagaccacgtcgagattcacgatattgcccacatgcccgctggccgaatccaccgtgcccggggtaccgacaccgatggccctcacctcgtcaaaacgctcacccgctgcctgatgtgctacagcgacgatgtcttcgatcacggcatcgttgccatgcctggcgggaatacgggcggaacccaataccgtgcccattgcgtcaaccagcacagcttcgatttttgttccgcccacgtcaacaccgattttgagattgttcatagtgttttcagacatcagtcctcccctgttcttcatcgaacgtttcgcttgatatcagtgtgcatccgactattgacaaccatcttaacaaattcccccaagacgacactcacatgcacgacacaccgaatgacatattgattgcgtcaatcaattaacagcgttaatatcttaatcaagttcagattcaaagacgagcggaacaactcgcaacggtgcagacaaggaggacttaagaccgatggcaacaaacaccacccatgccacttcccaagccagtgtctccgaatccaaccgctcccgcatcgtcaagcacctgtatcacaacggcatcagctcccgcgcgcaaatcgccaaggcactggaactcacccccgcggccatcaccaaaatcaccgcacgccttatcgaggccggcatgattgaagagaccggcgatttggaaggttccaagaaccgccgttccatcggtctcaaactcgacaccacgcggttccgcatcatcggcatcaaattcgcccgctcgctggtgcagatcggcgtgttcgacctgtgtggcaacaccctgagctttgaaaacctgcccacggtgtacggcaacaccatcaacgacaccatcgtcaccatccaccagcgcgtcgaacaactgctcgacaacgacccgtccattgtggccatcggcatggcggtgcccggcccctacctgcgtaacgtaggccgcaccgccgtggtgtccagcatgcagggctggcgcaaaatcaacttcatcgacgaattcgccaccgctttccgcgtgcctgtgttcatcgaacaggacgcccgcgccggagccctcgcacattatctcttcgacccgtcggtgcacgccgacggcaacctcgcctattatctggtcggcgaaggcgtgggcctcggcgtcatcgacaacggtcgtctcatcaacggcttcctcggtgccgccaccgaaatcggacacatctccatcgacgtcaacggccgcccctgcgattgcggcaacgtcggctgccttgaacgctactgctccacccccgccattcacgacatgctcatcgccgatggcaccgtggttcccggcgcggccgatatgacccacaccgaagccgcccgcgccctgttcgccaaagccggcgacggcgacgaagcgtcaatcgccattgtccgcgaagtcgcccgatacgtcggctacggatgcgtcaccatcttcaatggatacaatcctgagcacatcatcatcggcgacatcgtgtccgaagccggcccgatactgctcgatgaggtgcgcgccacggtggccgaacgggccatccccgaaatcaatgcctccacttccatcagcctatccaccctgtccgccgacgcggcggtctccggtgccgcagcagtggcggtgacccaattcctcgaacacccctcggtgttcttcgacgtctcctaaaccaagcgccgacatcacaagatgttccatacgaaacacccggtaaaagaaacaaaggaaaggaaaccaaccatgactaccccgatcgttctgagcctcggtgaactgctgtgggatatgctgccgagcggcaagcgagccggcggcgcccccgtcaacttcgcctaccacgcgatgaagaacggcaccgaaggctgggctatcagcgcggtcggcgaggatgagctcggcgacgaactgattgccaaggccaacgaggccggcatcaacaccgtcatccagcgcaacgcctggccgacctccaccgtcgaggtcgcgctgaagaacggcatcccggagtacaccatcgtcaagggcgtggcttgggaccacatcctgtacacccgccagctcatcgacgtggtctccaaggccgacgccgtctgcttcggcaccctggccctgcgctctcccgaatcgcacgccaccatcaccgagctgctcaagcacaccaagccgggcgcgatgaagttcttcgacatcaaccttcgcggcgaccactactccaaggatctcatcgaggaactcctcaaggcggccaccgtcttcaagatcaacgacgaggaactcctgctgctgcgcgacatgttcgacatccgcggcacctccggcgaagacgcctcccgctggttcatcgaggaattcggccttgactacgtgattctgaccgccggctccgcctactccaccatcatctcccgcaagggcgaggtctccacgctggacactccgcacgtcgaggtgaacgacaccgtgggtgcgggtgactccttctccggcaccttcaccgcccgcatcctgctgggcgacacgctggcagaagcccaccgcaaggccgtcaacaccgccgcctacgtctgcacccaggccggtgcctggcccgagtacccggccgagatgcccgactatctggctgaaatcggcaagtaatccacccatccccttatccgccattcgtgcgacttcacgaatcgactgatcgcaaccggtgagattctccgaacaggaaatctcaccggtttttcatatggtgcgctcacactcatgctcttcacatcctttcgcgtgtcatgaactaaagcggtttagaataatgctgttcccttgatatgtatatccctcaaacaaagaagttgaatttatgacgaccaccgcgataccgaagtcggtctcggatttcatgcagcacatcacggacctgtgtggcaccgaacacgccgcctgggccgagaacttcaatgcctgctttgccgacaccctgaccaccacggtcaaccggcatgacgacggcaccacattcctgcttaccggcgatatcccggccatgtggctgcgtgattcgaccgcgcaattgcgcccgtatctggcccttgccgccgaagacagcgatattgcgaacctgatcgccggtctgatacggcaacagttccgctacatcatcatcgacccgtatgcgaatgccttcaacgaggaaccgaacggcgcctcctgggacaaggacgaccggtccgatttctccagcccttggctttgggagcgcaagtacgaggtggattcgctgtgctaccccatccagttggcttggatgctgtatgcgaacaccggcaacgccgatcacttcgatgccgaattcattgccggcgtcaagaagattcttgacgtcttcgagaccgagcagcatcatgaacgctccccgtatttcttcatccgcgacacggatatccccaccgaatcgctgagcaatgacggcaaggggtcgccggtggcgtacaccggcatgacctggtccggcttccgccccagcgacgacgcctgcacctaccactatctggtgccctcgaacatgttcgccgccgtggtgatgggctatctggaacgcatcttcggcggtgagattctggatgacgccgatatcgccgcccgtgccggcgagctgcgccgcaccatcaccgaaggcatcgaagcccacgccaaaacgacgaaccgcaatggcgagacgatttacgcgttcgagaccgacggcctgggtcacgtcaatatcatggacgacagcaatgtgccctccttgatggcggccccttacttggggtactgcgcaccggacgatccgacgtatctggcgacccgacgcacgctgctcagcgacgaaaacccgtactattacgagggcgagtatctcaagggcatcggctcaccgcacaccccgccgcgctatgtgtggcccatcgccctgtctatcgaggcgatgaccagcgacagcaaggacttcaaggcgcatatcctcgaccgtcttgtaaccaccgacgccggtacacatctcatgcacgaaggcatcgacgtggatgatccgaccaagtacacgcgcgaatggttcagctggtcgaatatgatgttttgtgaactggtcatggactatttcgacattcgtgtgaagcactaagacgtgcccgctgaatgctcattgcgcacccaccgcatgttctcgttaaggaaaggaacaatcattatgaccaataacccacgttatgcactcggcaccgaagccaaccgcattttcatggcttccgaaacctatgagctgctgaagttcggcaaaggcttcccagcgccgaacggcggttccggctggctgaacgccgacggcaccctcgacccctcccacggcgtcgaaacgtggatcaccagccgtatggcccatgtgtattcgattggcgacatgctcggatatccgggcgccggggagctggccgacgcggcgctcaagggattgaccggcattcttcatgacgacgagcacggcggctggtacccgcaggtgttcgcggacggcacccatgctccgggcaaggtctgctatgcgcatgccttcgtgattctcgccgcgtcctccgccctgctggccggacgtccgggtgccaaggaactgcttgacgaggcgcttgccacgtatgataagcatttctgggatgacgaaatcggtttggccgtcgatacctggaataccgaattcaccgagctcgacccgtaccgtggtctcaacgccaacatgcacaccaccgaggcattcctggccgtggccgacgccaccgggaacaacacctatcgcgtccgcgccggccgcatcatcgaccacgtcatcgaatgggcggcacacaacgagtggcgcatccccgaacatttcaagtccgattggtcgctggacctcgaatgcaacgtcgacaagaaggatgatcagttcaagccgtacggcgccacgccgggtcacggcatcgaatgggcccgcttgatcacgcagtgggcgttaagctccttcgccaaccttgacggcgcacagccgtacgtcgacgccgccgagcatctgttcgcgcgtgccgtggccgacgcatggaacgccgacggcaccgtgggactcgcctacacgaccgactggaacggcaagcccgtggtcaccgatcgcatgcattggacgctggccgaatcgttgaacacttccgccacgctgtatgcggccaccggcgaggagatgtacgccaactggtacgccacattcgcccagtatgtcgatgagcatgtcatcgaccacgagggcggttcctggttccatcagcttgacaagaacaaccacgtgatcggcacggtctggccgggcaagtccgacctgtaccacgccttccagtccacgctgattccgttcttggacccggccgtgtccattgcgacggccgtgaagaacgccgaataatcgacagcatctaagcctctatatccttttttcttcctctttctcaacggcgttggcccccgtggaatacgggggccaacgccgtactggtcgcatgtcattgtctgcaagccgatgcaatgaccgttctacgccatggtatccatgggcttggcggtgctgtcccgaatcaccagtttcggggtgaggattcgccggttgccgctcacctgctctccggcaagcactttgagcagcagtttggccactttggcaccgtattcgctggcatcacgatgcgcggcggtaattgacggatacgccgcctcacaaatgaaactgtcttcaaaactgacaatggcgggcagcccattcggatagacttccgcatggccctcccccgcctccatctgccgagcggaataatcttcggccatggcgtgaagactggccgcggcgaggatctccgtttcatagatgaacgcggtaggcggcttcggtgaatgcagcatctccaacgtgagcatcgcggcctgttccgcaacaaaatcggtgaattcgatgttgatggattccagctttcgccgtttggcaaatgcgcggaacgccgcgacacgcccctgtgaataatccaggttcggatcgccggaaagataggcgattcggcggtgtcccaatgacgacaaatgttcgagcacggttcccatcgtgcgtgaatcatcgatggacagtgacggcacataattgttcgggtcgggtcctccggcaagcactgcgcgcacacccagattcttcaacaattccgggcgtggatcatcggctcgcaaatcgacgaggataacgccatccacgcgcttgcgcgacgcccaatccttgtatacgctcatctcctcgttcaggaatcggcatgggcggtacagcaaaccatagcctttggggctgagcgaggcgtgcacacccgccatgaagtgcagcatgaagctttcatccgtgagcccctgcgtggatcgtgcgggggcaaagcctatggtcatggtcttcgaggatcccagtgcttgtgcggcgtagaccggcgtccagccgagcctggctgcagcctctttgacccgacgtttggtttccgcggaaacaccgggccgatcattgatggcgaaggataccgcggtctgcgagatgcctaattcatctgcgatgtctttcaggctcacacgctgcgtgccgtcagacgatgacgatgcctcgcgagcagatctcatgaacactcctttttacgaccgcattgcgactattgcgatacggttgacggcacccccgcattgggccatatgcatcaaccgtgcgctaactcttatgatatcaataattttagtcaaataactaaagcattttagtcactggtctcggcatatgtcctgcgacaaaacaaacgggatttagggggcacccattgggcaacccctaaatcccgcttatggcacgagtatcaacacccgtattgcgacgaactactccgtcttgctacgagcgcgaagtaccaccgcacccgtggcaagcagcaccaccatggccgccacaatcgcaatgaccgacgaacccgtggcactcaacgaagcgccattcttgtcattgttcttgttgtcgttctggctgggcttgttcggcttggtatcgccaggcttgttctggtcgccgggcttgttcggcgtcaccgcgaccttggtgaattcgatggtgacaccctcaccgatggacttgtcgcccagtgcggccttcaccgtgtacttgcccaccttcgtggacacgacgttcagtgaagccacgccagcggcatcagtcttgacagtggcgttgccgtcaacggccgtgacaccctcgggcagcgtaaacgccacctcggcgttggtcagcggattgccgaacgaatccttgaccgttgcctgaaccgtgcgcgtgtccttgccatcggccacggctgagccgtcaacggcggtcagcgtggacttcttggcatccggctgagtcgggtcggtgaccgtgcacttggcgagttcgtcagaggtcggaatcttgaccggatcggtcttgttgccgctgtagtcctcgacctgcacccacagttcatggccgtcgggaatggacttggtgtacgactccggagtggtgcggccacgaataatgccggtaatcggcggagtgttctgcgaataggtgtacttggcacccagctgcttctcctgctttttaccgttctcgtcggtccacttctcggtcatgtagaggtaacgccaatcctgagtctcggggcgaatcagcgacacattgtcgccattccacgtcactgagcaagccgggtatggctcgatggtggcatcggcgaatgcacctgctgccgtggtggtagcgccacctgcgttgtcgacagtcaccacataacgggaaccgtcaaccggcgcattcggaatcgtcacgtcgctcttgtcggcagcgaccttgacggtctgggagtatggctgaccggcgtaacgccacgaaccggtgtcggacttaacggttacggttttctcgccggagacctgcgggttggtccaggagaccttgacgttaccgtccttgccgggctcaaccttcacgctggacacggccgccgcttcgttcagcggcgcttcggcagccatcgagcgcgaaccgtccgcgcccacggcgtacaacttcagcgtgccggtcttggcaggcaggtgcttgacgtacagggtgtcgtcgtagcggccaccgaggaaggtgttgtccaagtacagcaggtagttcttggtggtggcgtagtcggcgagatcccacttgacggtcaattcgtcggaatccgcgtaggcgcgctcgaccttgaagccggtcggggcggccggcgtgtaggcagcaccgtcggtgacggtaatcttgccgatgttcacctggtagttgtcgatcgggttcgctccggccttgacgatcaggcccagcgtagcgattttcttgcccgcgtactgggagaggtctacggttgcggtcttccagccgttgctcgccgcgccatccgccacgtccaccggcactacggtattggtgtcgtcggcgaagatgaggccgagttgcagcttggaatcgtcactgttgagcttgttgtaggtcaattcgatcttggagccggcagtgacgctcaagtcggtcttgtagagacggacggtgttgtcgctggagagcttgccgctcagcaccagcgaatcgccgccttcgtagccgccgaccttggtgtagttgaagcgcggtgccgtctcatagtccttgccatagtcgaagtcggcttgcagcgggtcggaatcggcatcaatccaccactgccaagtcggcagaatgtcttgcaggttgatgttgccccactgctggttgctggtctgttcgccattgtcccgccattcaagaccgtgaccggtgttgaatgccgtggagaagaccgggccaccgatgacggagcgttcggcgatctgtgaggcgaagcccttccagccgtcgctgctcgtaccatcatcgatatacggatcagagatatccgtcgtgcccttctctccggtggatgaaccagtccacaagcgacgttcacggtcgaacacctggttttgatacttcggatagaccttcttgtcgtcacccagctcatgggagacgaagtcggtgccgagcgcggcaaggctcacatacggtttaccgtcagcatcaaggttgacgttcatataatccgcgttgctaccgatactgccgaatttctgctgtccggcctcgatgcctgcgaacaccgcatacttcggatcaatgccaaggctcttagcgtggtcggccgaatctttcagcatgtttccgctgaaccagtagttcaggaagatcgaatcggagattttgccctcggccccatcttgcacccacggtgagtttttctcgttaaatctgttctggtagccgatattaccacccgggtatgttgcagagtcataccactggatgtaaatgccctgattgacgatctgcttcatgaaatcccgataggctggaacatcatcggagtttacattggattcctgattgacgaagtaaccatcaaagccgtagtacttggcaatttccaccaacttgtcggccaccggataggtgccatcggcacgcttgccttgaagcaaatccttataggtctgttcaccacggtcgttgcccgagtagaaaatcgtcgcaatcgacttcgcgccattcttatgcgcggcgttcgtgtacgctgcatttggcaagttcagcgtaccgaattcaaaccatttctgagtccaatcagactgggccttctcatcgtagaggctcttcggcacgttcgcggtcggctggccatgccaggtgccgtaataatccgtgtactgccagtagttgaacaggtactgcgagaacacattgttgtcatggaacgactcaaagaacgcgttgccatagtcgccggcaaggttgaacatctccgtatcggccggaaggttcgggtccttctgcgtcgcggcgttggcggcgatgcgggtctgcaacggcgcgcgggaacgcaggtactccgaatccttatccactgccggattccagttcagaatatctagaccggtgtaaccatgctgatacggctggttggctcccgcagcctgctccggatgactggtatcggcatactggcctccccacggcatggtgtcggtagcgcttgccggtgcagccagtgccgccagcgtggccatcgacagcaccgcggccaagccagtccgcagccatttcctgtgttgagtccaagcagaagcacgcccagcgggatcgcctgatgacaatctcatctataatctcctttgatttcctccgactcacgccggaaatcaaccgtctatgcggcttgcgtagacggtggctcaaaccggtaggacggtttgagccacgggatacggcgatatctcaccaacgccatatcccacattctctttttctctcacccgccgaccatatcggccgcaatgagtaggtcatgagacttacggaacatacccctctccgacttgtctcatgcacatcgtcagcgatgtatcacgatgcttacgctggtatcgcagtcgtctgtatgtcgggtatcatcgctattcaaagcggctgtcagggcaaacgtcacacgcacattgtcatcagcttcgtccatcagccgttcaaagggtaccgagaacgataccgcgtggctttcgcccgcctcaagcgtcagagcaacggaatcgaccagcactgccaaacgtgggatacgacgaccgccactgacgtgtgcgaagaggttcaccgaaccggccgtcttatggtcgccggcatatgctgtcacctgcaccaacacctcattcgtgcgggattcggcatcggcatgcatcccactaaacgtcactccagccaaagaaccggctccgtagccaaactcgcgcaataccggttccgccgcatccttgtatacatgggcggcactttgccggtcgttgtatcgaaccggaatggctgcgggatgcgcaggcagcgttacaggaaggcagcccggcaaaccggcaccgtcaatcagcacatcagccacggcctgcggaccatactggccagcatatccggcccaaatcgtcacagcggattgacccattacatgagtcagcacatgcgccctgccgcacaccgccaccgaaacaactggagcggtggtcaatgccacgacttcgtccagcatttcatcctggtgccaaggcagacggatgtcagacaagtccacgccttcgccgcaggtggcaccgtattcggttacggccttcgccgcgccattgtcgtcgaattcactgtcatagctgcgttcgctggtgctgccgcatacgaataccacggtcgacgcacgcgcccattgatcggccggcgcatcgctcggcttggcggccaagagaacccggtcctccccgagacgtgccaccaattgccggtagacgcttgactgttcatcggcgggcagaggggcggtgtaatcgcccaggaagcagccgaaatcgtcggcgaacgggccggcgacaatcacagggccggcttgagcatcagctatgacgctgcggatatcgtcgagcgtggcggcagactggccatcattgatcagcgttatcgcctcgcgggccatgcgcttggcctgctcacgcccatccgcagtggcctgcgcgatggcgtcggcgctcggcatggcaattgcggcggtatcggcatcgtcttcgggcaagagaccgaacatggctttgagttccagcacccggcgcaaggccgtgtcgacagcggccactacctgttcgtcatccgcatattcttcgaggcgggtgaatccttcatcccacagggagacgtccacgccggcgagcagtgcggcacgccctgccgcgggaatggagccggccatgtcttcgagccgatccacggccaggccatcggccatcacgatgccgtcgaaaccgagctggtcgcgcagataatccttgagcagccacgggttggcgcagcaaggtacagaatcgatatcgttgtaggctgccataaagcccaaggcaccggcgcgcacaccggcggccaccggcggcagatgaatttcatgaagatcgtgcgggcccagtacggcggactgtccgttgcggccgcccacggcctcgccttgcgccgccagatgcttgagcaccacggccactcccccgtggccgaccttgctgcgatgctcaccctgcatgccggtaacgatggcctcgcacatgcgggcagccatcagcggatcctcgccgaagcattcctcgcaacggccccagcgtgggtcacgggcgatgtccaaaccggataccaatgcgatatgaatgccgctggcggccagttctgcggcaaccgcggcttccgcttcctgcaccccctgcgggtcaaacgtagcgcccaaacccagattggtgggcagcaccgtgccgcccagcgcctgatgcccgtgaggcgcctcttcgctaagtaatacgccgatgccgtgcgcgccacgttccagcacagtttgctgcaccacggcaatcgcctcagtccgctcctcagggcgtatgccgttaccccaatgttgaccagaccatgggtcggctcgcaatagaccgtacagggtgccgagtccaccccatcggtcaatctcctgcttgagctcgtccgaggccaccagccgtcccgcagcattgcgttccacggacttccaaccgagcagacgctggttcaactggccaactttctgcgtgaagctcatcgaatcaatgagtcggtccactgcggggcaattgatgctcattgagcgctcccccttctcgtatattgtcttctcgttcttctcgctcttcggcgagtaccgggtcttatgttttgccctgcgcactgcaattgtgcgcactgcaattgaaaatatccggctgtggaacaaggagtagatgattccacaaccggatatcggtttaatcagccgtttcgaacgatgggtccgaaaccgcagtgtagtaacgggcggcataggggtgttcgtcagcgtgcaattccagaatgccacgctgcgcgagcgcctcttgattggccgccacctgcgaggtgatgatggtcgggcgctggcccgccacctgcagcttcatccacaggtcgcacaccgagcctcccgggccgagcgcactgcggttcaccgggtttccggcctcatccacatcaatcaccacggcgacggtcttcgactgagccggcaatgcggaacggtactgtgcggcgagttccccgaacgtacggccgatcggcttcagctggccttgctcgtcgaacaagcccagagagtgctcgaagaacgggaagtcttccatgctggcgggcacatcgtgcgagcaccaccacgtcacaccccacaggttccggcaatccatggcacgttcaacggtcttgcggcagaattccggcgtgtagtcggtttccagcacattctccggcgcaccgacttcctggagccacaccgggcgctcggaatccttgccgaacgccttggccagctcggccaggtacagtgcgtacgacgagcactcctcactggtggcgccgtatccttgcgcgatgccgttgaacacccaggagtgaatcactgtcatatcacccttggtggcggactgcaccggagtgaacgggtgcccatcgatgaaccaggtgccatcgttgacgctgtacagcgcgttgtgcccttcaccggcggcggtcggaagcagcgcgtccagccatgcgtcgatctgccggtccgtggcgctcatcttcgtgggatgcggcctgtcagacagctgattgacctcgttgcccaaggtcagacccttgaacgcgggttccttggacagctcatcggtcatggtcttgaccagttcacgctcggccgcaacggcgtccgcatcggtgaacatgttgcccgcatgccaggtgaccagccatgaaggcaggaagtcgaagctggacagatgcccttggaacacgtccacataggcatccaaaccgtgctcgccggcgatgtgcaccatgcggcgcacatccgccacgcccttcttgttgatccaggtgcgattaggttgcagatacggccagatcgggaagatgcgcacatggtccatacccagttcgctgatctgcttgagatcattgtcgatgccgtcccagtccgggtcgagccatgcgtggaaccagccatgcgacggcgtgtagttgactccgaatttcattggagtacctcctttttccagtccgctcagcccttgagtccaccctgttccaagccacggaagaagtagcgctggaagcagcagaagaagacgatgatcgggataagcgagacgagcgcaccggcggcgatcagtcgcggatcttggatgaacatgcccttgagtcggttcatgccgagggtcaaggtgtacttgctttcatcggagatcgcgatcaacggccacaggaagtcgttccaggcaccgacgaatgcgaagatgccgacaacggtcatcgtgcctttgacctgtggtacacagatgtggaagaaccgctgccataggttggcaccgtccaccatggccgcctcttcgagttccattggaatggatttgaaggcgttggtcatgagcaggatgttgatggcgccgcacaggccaggcagtgcgactgccagcagtgtgttctgcaggtggatggagcgaatgatcaggaactgggagatcatcacgccttcgatcgggatgaccatggtgcccatgaacatggtgaacaccagtccgcggccacgccacttcaggcgtcccagtgcgtagccggccatcgtggagaagaccacgttgccgaagatggagatcaggcagaccaccagcgtgttgagcatgtagtggaataccgggacctgcttgaacacggaaatgtagttgtccagcgtcggggtcttcggcatcaggtagggaggcacggcgtagacgttgtcgcccttgcccttgaacgacagggacagttcccagacgaacgggccgacgagcagcaggaacatcagaatcagaatcagatactggacgactttgccgacggtgaccttatgcgtgttggtattcatcagtcctcacctcgcttttgtacgatctgctgcacgatgagcatgacaccgacgatgacgagcacgacgatggagatggcgctcgcgtaaccagtgcgggcctggataccggtgccttcgcgcttgataagcatcgacatcgtcatatccatgccgccggggcctgcggagccgttggtcaacacgtagatttcgttgaagactcggaatgcggcgatggtggacagcatcatgatgagcatcatcgtggagcgcacgccgggcattgtcacgtagatgaactggcggacagggccagcgccgtcgagggaggcggcttcgtaaagggattcatcgatgttggcgagggcggtcaggtagatgaccatgtagtagccgaggcccagccagattgtcacgaacatcgagctgaagagcacgccccatcgatcggtgaggaatggaaccggcttggagatgatcttcaatgccttgagcacggagttgaccagaccggcggaatccagcaggttggtccagatcatacccaccacaacggcggacataaccaccggcatgtagaaggcggtgcggaagaagcccatgatgcgggagttgcccttgaccagataggccaggatcaacgggaggatcaccatgaacggcactacgcagatcacgtagagtgtggagttcagcagtgccgtgaggaagtactcgtcatggaacagtttgatgaagttttcgagtccgacgaaggttcccggacggagcagtgtggagttggtgaaagcaagcctgaaagtgttgagtgccgcaaggacgatgaatacaaacacaatcgcgaacgctggcagaacaaacaggtagggggcaatgatggtgccgaagctacgattctgcttcttgccgtggttgaggttcatcggttcaggccggtcggaggccgtgcgggcctccgacctgtcagcggcgagtgccgcgttgctcactgtgcgagcttctcgtttgcgaactcgacggacttgtcaagggcttccttggcggtctgcttgccctgcatggcgagggcgatctgctgctggaagttcttggagccgttgttgtcggtgaactcggacggacgagagccgtagccgtccttgacctggtcgagcgtgatcttcagagccttgccctcaagggtgctttcgtcgatgctcttgtagtagtcgtcatccagaccccccttggcggacgggaacacggaggccttcttgtcgaactcgatctggttcttctcgttggtcacgaatcgggcgaagtcaatggcaacgtcggggtgcttcgagttggcgctgatgccgagcatctcgtaggccacggaagcggacttgccgtcgttgctgatacgcgggccgactgcgaggttcttgtaaaggtccggagcgttctgcttgaagccgtcagcggagtaggcggagccggccatggagaccaggttgccacgctggaagagatcggcggcctggctccaggaggagtcgagggcctccggcgggatgccgcccttcttgtacagctcaacgaagcggctgatctgcttgacaccggcctcatcattgaaggtgtacttgctgtggtcatcgttcatgaaggacttgacgcctgcggtcatcagatcttcggtgttgtaacccatcgtggtgcccaggtagacatccttgcagttctgcacgatggtgtcgccggcggcgaagtactcatcccatgtggtcggaatcttgttcgggtcaaggccgcacttctgcatcagctcggtgttccagtaggtcgggccatcgttgacataccacggcaggccgtaggcacccttctcgatgccattgccctgcatggtcacggacttccatgcgccttcgtagtagtccttttccgcatccggagcctgcttggagacatcgagcagcgcgccggccttggcaagaccgtacaggatggagttgccgccgtcgacgatgtccggcagttcgccggccgcagcctggctggacagcttgtcttcgtaaccgtcggacggggcgtcaagccacttgacggtgacgtccgggtggtccttctcataggccttgatcagcgcctcgaaatatggggtgtacttgtcgttcttgaggttccaggtctggaaggagatctccttcttgccgccgtcatcccccgcagttccgctaccacaggcagccaccgatacgagcatcgcaccggcaccggcgatggcgaggatcttcttcatagaaaacatgatgttttcctttccttttggttcctttttcaccccgccctgctgtggacggagaaacctaatcgttgtgctccagcacagtcacccgtcgcggtgattgacgtggtatcacaacctttattcagttctcatcgctgagactaaaccgctttagtttccggccagttgcgagcctgtaaactaaatcggtttagcaataatataacacaatcgaaacatgcacgcaacgaattcatcgttgcgtgtcgcattgatatttgcccaacgggatcgctctccctcttctcatacaataatgggccgcgcccaaccgtatggcagagccggtctgttccggttccgttacggttgggcgcgacccaaaatatcgagcctaggcccaatatcccttatcggcgaatacgcagcgtggcgagctggaagggcaccaacgaaacgaccgcaccgtcggcgggcattggttcgtcgccggcgagcgcgcgcggcaattcggtgtccagttccggctcctccatgagattcacctcccgcacgccggccttggcatcggcgagagcggcgtcaaggcgcagtgtggccgtggcattgccgccggcggcctcgtacaggcgcacgatcagatcgctggaaccgtcatcggcgagcttgatccagtccaatacgatgacgccggtggcgtcggcgagcgagaccagcggcgccatatcaggcaactcccctattacggggctgttgagtcgcgccgcttcgtccagcaccgcattcatatcggcgtcagcgaccagagaccacgcgaaggagtgtgcgccttggtcggtacgtgggtcggggtacagcggtgcggacagcagcgagagccgcaccatggtgccgcggccggtgccatgtgccgcatcggcgtggatggggctgacgtcggagccgtaggtggaggcgttgaccacagcggcggcatagtcggcgtcggcgatccgcacgaagcggtgcgtgcagctttcgaatttggcatcatcgctgcgcgtgttcttgttgatggggcgttcgaccagaccgtattggcattcgtattgcgcgttcaccgcttgcacggtgaccggcatatccactttgaggaactgttcgacggcatgccagtccacatcggcggtgaagtccagtgtggcggagcccggccttaaggcaatgcccgtacgaatttcaacgcccttcgcgcgagtgacagcatgcacgacggccccaccgttggcggtttcgtccacgcttgcaatcgatgcctcgctgagcgcgttggcggtgaggaacgcatcgcgttgaatatcccaggcgtcccagtggaagggttcgtctttgagcatttcgtagcggcccagtcgggtgccggcgggcaccagttcacgattggttcgctgatcgacgattgacgaaacggtgccgtcggcttcaatgcgcacgtgcagtcggccgttgtcgagcacaatcgtatcgccgtcatgggtaacggcgacccgagccatggatgcggttcccgcttcggctcggctcgaagccgggcgtaccacccacgtctcacaggcttggcgggaatatggggcgattacggcgtcggttatggttgcgtcatcgggttccacggctgcgatcgcgcgcccggcttcaagggcgatctcgttcagccgagcgatgtcacgcgcgtattcggtccgcgcctgacggtgtacccatgcgatggccgaaccgggcagaatgtcgtggaactggttcaggagcagcgttttccaaatacggtccagctcttcgcgcggatagacatagtccgggttcttgatgcgggccgcggcgcacaggtattcggtgacgcgcagcatcgactcctcctggcggcagccgcgcttcatgtcctgctgggcggtgagggtggcacggtgcagttcaaggtacagttcacccttgaacaccggggtctccccttgcgcatcgtcgacgatatccttacgcacgcggtcgaacagttggtcgggagtaccgaattcgatcttcggcgcgccggcgagatcatggtcgcgccggatgcgtgcggtcatctcacgggtgggaccaccaccgccgtcgccgaagccgtacagcagaatcgcgttacgggagaggtccttgtccaggaagttgcgctgcgaatacatcagctcgtgcatgctcatccacgagcagtaggtatccgagggcgggaagtgcgtgagaatacgcgtgccatcgatgccctcccacatgaacgagtggtgcgggaacttggtggtgtcgttccacgagatcttctgcgtgaggaaccagtcgaatcctgcacggcgggcgatctgcggccaagagccggtgtagccgaaactgtccggtagccagatgccgcgcggcgcgacgccgagatgctccttgaaatatcggcggccgaacgtgatctgccgcaccaatgattcgccggaaggaatcatgttgtcggattccacccacatgccgccgaccgggatgaagcggccctcttcgatgcgccgcttcattcgtgcgaacaggtcgggatgctcctcttccagccatgcgtactgttgggcggaactcatcgcatacgtgaagtccgggtcttcgtccatcaaagccagcacgttggatacggtacgggccaccttgcggcgggtctcgcgcaccggccacagccatgcggagtcgatatgcgcgtggccgatggcgatgtgtttgattgcgctggaggcggccggttcggcgagtacgccggcgagcgccgcacgggctgccgacacggtttccaagtcgcgttcatcgtagatgttcagggagcgttgcagtgctttggcgagctgccagtagcgtgggtcgtcgtccttgagctcacgaatcagcgaggagacggtttccagatccatgtagtaggcgaacacgtcttcgttgaagatggtgacgtccatacgactcagtgtgtatgggaagtcacaggtgccggtggcctcttcgccgagttcggtgggtgagaacggggtggggccttcgacgaatgggttggcggcggcttcgatatagacggtgaagtcgccatgctcatcgagttcgacagtgctgctgccgtccgcgtagacgagtggaatccagtggttgcgtgggttcgcggatttgatggcggtgccgtcggcacgatagacaagtccctcggattggaatccggggccgcggtgatcgagccagccgaggtctaccatgagttcgacttttcggcccttgaccgccgccatgtcgatatggccgttcacctcgaaccatgtggtgccccatgtggtgccccagactccgggaacgcggaaaggttcgaagggcacttgtccgttgcgcactttggctagaaattcgctggagggcaccggttcgccgggattgtggaacgaacgcaaggtgcatgcggcgagtgtggtgtggatatgcggtttgacgcgctgctgcatgacgcggtcgcagcgctccaac

SEQ ID NO: 3865 - DNA, 7317 bp, Unknown
  R35_2m  MAG No. k141_22292
catgccggtgctggaaggctacggcatgacggaaacctgtggtccggtgtgcgtgagcttgccggaagacaatcgcatcggcaccatcggcatgccgatgtgcggcatcaccgccggcatcgccgaggatggcgagctggtgatcaagggaccgctggtgtgcaaggggtaccacaacaaccctgaggtcaccacccagcagatcaccgatggctggctgcacaccggtgatttgggcgatatctccgaagacggattcatttccatcactggccgtaagaaggacctcatcatcaccgccggcggcaagaacgtgtcgccgggtctgcttgaggcttccgtgatgacctcgcccgtggtcaaccagtgcttggttattggcgataagaagccgttcgtggccgctctggtcacgctggatctggcggatgccaacaactggttggaatcccaaggcgccaaaccggaacccgatctggcctcgctggccaagaacgccatcgttcatgccgaggtagagcgtgcggtgaacgccgccaacgagggcgtttcccgcgccgagtcgattcgtaagttcgagattctgccagacgaattcaccgaggccaacggcatgctgaccccgagcctgaagacccgtcgcgcgcaaatcgttgagcactatcgcgagctcattgacgacgtgatctacgtgccgttgaagaagtagctatcaactccctctgatccaaaaaataagctctctctgacgagggagctgtcagccgcaggctgactgggagagaccgcggctagcccgcgaaacaacaaggccgggtgcgacttgcacccggcctcagcttattcagtccaaaatcgccgaaacataatcggcggcggcctgatccagctccgcatcgccgatggtggcggtgccctgcaccaggaacggctcagcatagttcatgccgatcttgtacgccacgacctcaaacgggctcagcagctcctccatggtgcggctgtactcgccatccttgcggtacttggcggcgtcggaaccagtggtgaccaccagcttgagctccttgcccttgagtgcgtggcctccaccgtaggcccagcctgcggtgatgacctcgtcttcccattccttgagcagcgcgggggaggagtaccagtagaacgggaactggaggattacgcggtcggcggcctccagtagctcgtgctccttgtcggcgttgacggagaagttcggatattcggcgtattcgtcgcgtacgatgatgtcgtcctcgccttgtgcggcgagttcggcaagcagacgggcgttcactcgcgagccgtccttcaggtgcggatggaatacaagaatcagcgttgacatgggatttcccttctataactgctaccaatgtggcctaatcaccactatcgtatgccgggaagcagaactcagtccagtccggattcaggtgcgagccgcgggatgccgcgccgggaggcaactcagtcgaggttggactgcgtgcctgcggtggcttcgttggcggcttgctcggcttgtgcctggtcgagcttggctcgtacgtcgttgagcaggccctgggcgcgcttggccaaggcctcgccgatttcccattgacgcatcgactggtcaagattgaggccgccggtttccagtgcctggacagcctgaatcagcttgtcgcgcgcctcctcatatggcatctgggcgatgagctcgcgttccttgtccgtcagggacgaggcgggggtgttcttgtcggtgggtgtggtgttctcggtcatcttgttctccttatatatacggtatatatgcgtgaatgcatatggtgcattacgcggttgcggttgcggatgtggcggtggcggtaatgacgccctttttcagggtgacggtgatgtcatccccggtactgacccgcgaagcgtcatccagcacgtggccatcggaggactgcaccaccgcatagcctcgattcaatgtggattgcgggctgagtgcggtcagtgaggcgtgagctcgctcgacggtgagctgggcatcgtccacgatgcgtcgcaggccgatgtcaagccgctgcagggaatcgtcgattagccgctgatgcggttcgagcatggtatgcggttgggtcaggcttggccggttcgcatatccctcgataagtcgaatctcgttctccacgcgcgaacggacccgcagtcgcatacggtcgatggcaccttcgatgagctgcgactgctcacgcacatccggcaccacgcgcttggccgcatcggtgggggtggaggctctaagatcggcgaccagatccagcaacgtccagtcatcctcatgcccgatggaggagattaatggtgtggtgcaggcatacgccgcacgaaccacacgctcatccgagaaaccgatgagatcctcaaacgagccgccgccacgggccacgatgatcacatccacgctcgggtcggcatcgagttgtgcaatggcctgaaccacttcggccgggcattgctcgccctgaacatgcacatggaccaccttgaaggttacggaaggccaacgaaggttcacattggtgatcacatcgccttccgcacgtgcctgaggtgcgcaaatcaggccaatagtcttcggaaactccgggagaggcagtttgtgatcggcatcgaacaggccctcgcccttaagctgcttgcgcaattcgtcgatcatggccttgaggctgccaccggctccgaccttgagaatcgtgtccccgcgcaacgacagcgaagtgcgcttcatccacaggttcggtttgccatgaatcaccacgcggtcgccctgaacgaactggctggccgcggccgcgaacctgccgaagccattgacttccatggcgatatcctcgaagtcgtcgcgcagcgtgatgtaggccgagccggcgcgacgggtattgatctgcgtgatctggccggtgacccacgcggacggccatcgttccacggcaccgtagaacttctggctcagcacacttaccggccacggattttgcgcgctggtttcagcggcgcgtgcaggcagctgatcgatagggcgaggctcattcggcagattgatggtgccctgatcaggcgcgaaagtgccttgacccggctcaaagccagccgagaccagtgaagcggcggtcggtggacggccggtagatgggtagcccattgcagtagtcatgcactccactataagtgcgttggttgatgacggtaaatatttaccgtcgcctgaaaacggtgtgatgatgaatgcgagaaccgtacgaagcgatgtatcagccgatgatggagatggtctggtgcatcagaagaaaggagtcattatggcgaagaaacgggtgctatgaagaggagtgagatatgcgttgcgctgacgattgagagtcgttagtgagctcgctgtgcgacacgcgagcagaaaacagttacgctaatcacacacttgtggttttggcggaaaatagccgaaaaccctataaatagttcgacacaccactgttgagcactagatatagtggtggagatgccgtattcttctagaggttcaaaaaacgacatcaatgtaatttcgtgtggcccacgtcgagtgcggccaaaatgcggaactcaggagagtgttcgccttataggaaaggggtgcccgatgggcgcacaggtgttggaggaaatcgtcaccgataacgagaccaaggtggccgccaaggcctccaccgtgctcgttgagaagcgtgatggtcgtgtggtcgacttcgaccccattaacatcatctctgcggtcaagtctgctttcggtgacctgaacaaggaagtcggccccgaagaagatgccatgatccgtggtttcgccaaccaagtcgaaggcgaaatcaaggggcgttacgccggccccgccaagatcgaggacatccagaacctcgtggagcacgccctcattgacgcccacctgtacgatgtggctcgcgcctacaccaactaccgtctcgacaaggacattcagcgtgccaaggccactgatgtcaacgaggccgtttcccgcttcatcaaccacgacccgaccctgattcacgagaacgcgaacaaggattccaacgtctactccacccagcgtgatctgctggccggtgccgtgtccaaggccgccgcgttcaacatgctgccgccggcggtgtccaacgcccacatgaagggcgacattcacttccacgatgccgactactcgccgttcactgcccagtccaactgctccttgccgaacttctgggacatgttggccaatggcttcactcttggcaacgctccgatggcttccccgaagtccatcgccattgcggccacccagattacccagatcatgaaggacgtggcctccagccagtatggtggccagaccgccaaccgtgccgatgagcatcttgcccagtatgccaagaaggattacgagaagttcctcgaggaagctcgtgagaccatccccgacggcatgccagttgaattcgcccgtcgtcaggtcgagagcgccaagaggaacgagcccgccaagctgcatttcggttcccgcgaaccgctgccgatggacaccccgttccacaccgacgttgacgaacttgagcaggagcgtgaaatcctcgccaagattcgtacccgcaaggccatctatgatgccatgcagaccatggaataccagatcaactccaaccgtgtgtccaacggccagaccccgttcgtgactgtcggctttggtctcggcaccgactggttctcccgcgaggtgcagcgcgcgatcctgctgaaccgtattcgtggcctcggcaaggaacaccacaccgccatcttcccgaagctcgtctttactgtgcagcacggcgtgaacgccgacccgggtgacccgaactacgatttgaagcagctcgccctcgagtccgccaccaagcgcatgtacccggatgtggtgttctacgagaacatcgtcaagatcacaggctccttcaaggctccgatgggttgccgctccttcctgcagggttggatcaacccggagaccggcaaggacgaggaggatggccgtatgaacctcggcgtggtcaccgtcaatgtgccgcgtatcgccatcgaatcccacggtgacaaggctcgcttctggaagctgttcgaggagcgtatggaagtcgcccatcaggccctccagttccgcatcatgcgctgcaaggaagccaccccggtcaacgccccgaccctgttccgcttcggtgcgttcggtcgtctcggtgccaacgacaacgtggaccagctgttcaagaacgagcgtgccaccgtgtcgctcggctacatcggccttgccgagaccaccgcggtcttctacggcaagaactggattcgcgaccacggctgggatccggaaggcaaggagttcgcgctgtccatcgtcaagcgcatgaacgagctgtgcaagcagtggagcaaagcggagggctaccactattccgtgtactccactccggctgaatccctgaccgaccgcttcaaccgcatggaccgtgaaaagttcggccgtatcgaaggcgtgactgaccacgacttctacaccaactccttccactacccggtgtggttgcagcccaccccgatggagaagctcagctacgagaaggacttcccgtactacgcttccggcggcttcatcaactactgcgagtacccgtgcctgcaggacaacccgaaggcgctcgaagccgtgtgggattacgcctacaacatcggcatcggctacctgggcaccaacaccccgatcgaccactgcttcgtgtgcggcttccagggcgacttcgagccgaccgaggaaggcttcaagtgcccggagtgcggtaactccaacccggacaagtgcaacgtcaccaagcgcacctgcggctacctcggcagcccggtccagcgcccgatggtgcacggccgtcacgaggagatcgcccaccgagtcaagcacatgagcggcgaaaccggtcgtgtgacgctggatgacggcaccacccgcgagtggttcgaagaggccaagtagggttattcgtgagtaggctcccctctctgaggggagctgtcagcaaagctgactgaggggagtccgaagagctattccgaagctcccctcagtcgcctacgacgacagctccccctcaaagaggggagctaatgctttccgcaaggagggaatcatgccggagttgcatacgaccaagcccgaacccaagcgccatgactttgcggccagcgagaccgggcgtggcccctccgtaccctccaacggtcttgccaacgatccgaaagccggtcaatgggatggccggcgcatgtccaagcggatgatcgccgactacaaaaccttcatcgtcaccgacggagaaggcgtgcgcaactccctttacgtctccgggtgccccttccactgcgtcgactgcttcaacgcctccatctgggacttccaagcaggccacgaatacacgcaaaaacttgaagacaagatcatcgaagacctgaaagcgccatgggtgcaaggcattacgttccttggcggcgagccattcctcaacactcccgtgctggtgccgctcgcacaacgtatccgccaggaattcggtcataccaaagatatctggtcgtggaccggctacacatgggaagagctcatgcgcctcggagaaacaccagacaagcttgaattgctgcatcttatcgacatcctcgtcgacggccgctacctcaaagaccagaaggactcgctgctgcaattccgcggctccagaaaccagcgcatcctcgatgtgtccaagtccctagaagccggcgaaccggtcatctgggccaagctccacgatcaagaacgagatatccccgaaatctatttgagagaccgcgaagccggcgaaggccaacaggcctcgtagtagcaggtccggaatgccgcactcagcaatatcgtcggaactgttggggaacgcccttcccgtgagcgaaatcaccatgcccggcgtcacgttgggcaggtggtcggactaatattccagaagaagtagccgggcgaagccgtccgcaggtatctgccagccgtcccgaaacggctcatgatgcctgaaggcgcacatacccggaagtcggaattaagaggaacacatggttgacatcgtcactgacgcgagcgtaaagcccgcttcacacccgaagcccctgcgtgtgggattggacatcggttccaccaccgtcaaggccgtggtgcttgatcagtcc

SEQ ID NO: 3866 - DNA, 17088 bp, Unknown
  R22_24m  MAG No. k141_216
cacctccggcctcaagctgccggccgtctcactcggcttctggcacaacttcggcgacatcacgccattcgaccagatgaagtccctggtcttcaccgccttcgacaacggcatcacccacttcgatctggccaacaactatggccccgaacccggccaggccgagaagaactgcggcctgctgctcgccaagtacttcaggcaccaccgcgacgaactcgtcatctccaccaaggccggctacgaaatgtgggccggcccctatggcgacctcggcagccgcaagtacctgctcgccagcctcgaccagtcgctcgaacgcctgggcctggattatgtggacatcttctaccatcaccacccggacccggaaaccccgcttgaggagacgatgggcgcgctggctcaggccgtgaactccggcaaggccctgtacgtgggtctgtccaactacgatggtccgacgatggagaaggccgccgcgattctcgccgacctgcacgtgccgttcatcatcaaccagaacaaatacaacatcctcgaccgcaccgtcgaggagaacggtctgaaggagaccgccttcaagctgggcaagggcctcatcaccttctgcccgctggcacagggcctgctgaccaaccgctatctcaacggcattccggccgacagccgcatggctcacgatccgcgattcctcaacgattccgccctgaccgagaaactgcacaagcaggtcgtggacctgaacaatctggccgccgaacgcggccagacgctggccgagatgagcctggcatggctgctgcacgatggtaaggtgacctccgtgctgaccggagcctccaagcctcagcagattctcgacaacatcggcgcgctgaagaacacccacttcagcgacgaggagctcaagctgatcgacgagatttcggctcggtgaccattttggcttccctcgctgaggggagccaagtaccacctttagcgcgtcatttcttcgtagatgcgcttgcaatcggggcaaaccgggtacttggacggatcgtgcttgggcacccagaccttgccgcacagggcgaccaccggacgaccggtcgcgcgtgattcggcgatacggtccttagaaacataatgtgcgaatcgatccgcgtcgccgccatcgtcacgaaccggagactccttggtttccgggcgttccagcaccgacgtgccggcaccttggtccgggttgcgcagcggttcggcatcatcaacgaacatctcggcaaaagtcatggtgcacttctttcctcgtattcaacgattcgactgcactccatcatagattcccgtcgttacccgcgaaacccattggcgcgtaatccgcacacctccacacacccatgtcgcgcatcacgccaccccgccacatacaatgccacataacaatgccgcacacaacgccgcaccgacgccacatacggcaccgcacacactgcctcatacgccgacgcgacaacaatgcacgctcggcagcacgaagcacaccattcgcggtaggctataaggcatgactatcgcagtatgccccggctcgtatgaccccgttaccgccggacacttggatgtaatcgagcgctcggcgcggtttttcgacgaggtgcatgtggtggtggccatcaacgccgcgaaaacaccgatgttttccgaagccaccagagtcgacgtgatccgccgtacccttgacaaagccggttgcaagaacgtcactgtttcttccaccgacggcctgatcaccgactactgcaagaaggtcggcgccaccgttatcgtcaagggtctgcgccagaacggcgactatgaagccgagctcggcatggcgctggtcaatcgcaagctcgccggcatcgaaaccctgtttttgccggccgatccgattcttgaacacatctccagttccatcgtcaaggacgtggcccgccatggaggcgacgtgaccggcatggtgcccgattgtgtcgtgccgatgctggccgatgccctggccgaggaacgtcagcggaaggactgatgcactaatgactatgagcgatgaccaccccactggatacgtcgatctgaccaaaccgaatgcggacgccgcatcgtccactccggagccgtccgccccggaaccgcccgcgtctacgcaagccgcgccggcacccaccgaagaggccgatgttctcgccggatcgccgcccgccgcgcctacccctactccggcacagatgcaggccaaagcgcaggcccaagcagctcagcagacccgggcacaagctcagaccgctcaggccgccggcactcgcccctcgttcatgaacgaaatgcccgacctgcgagaaaccacggacgacgacccggccacggtcaagagccgcgaggaattcaccacggtgtatgacatcatcgaccagctcgaggcggcactgggcgaagcgaagtccagcatattcgcccccggcatggtgaaggttgaccgcgacgaattcaccgaccagctttccgagttgaagaaaatgctgccggtgcagttggagcgcgcctccgccctcatgcgcgaggccgagcgccgtctggaatcggcacagacccagtccaacgccatcgtcgcctccgcacaaagccgcgcagccgacatgatcaaggacgccaacgaacaggcacagttcctggccggccaagagaacgtcaccgagcttgcacggcagaaagcgcgcgcgattcttgaccaggcacagaccagagccgaccatctgacccaaggcgcggaccagtactgcactacggtgatggaagggctgtcccagcagctcggcaaactcagtcgggatgtgcaggccggtcttaacgtgctggaagagcgccagcgtgcggccggcgaacagatgccgcacctgacgctgaacgactatcccgaagcccagtaacgccagcaacgccggcaacatcagtaacgcgaataacgccagtaacgaataactccagccaacatacgaaaggcaccaagaacataccatggcacgagttgaagattccccgtgggccattccggtagcgcagattgcttcgcgcgccggtcaatccaagccgattgacgccgatttcccggccccttccggcattggcgacagcatcgtcggcatcaaggatggtgagcccgtacatgtgagcgggcagttcgattcgattgtggacggcctgatcttcaccggccgcctggtcgcgccattcgtcagcgagtgcacgcgctgcctgaagccgattgacgaggactggccggttgatgtgacggtgttcttcccgtatgagtcgggtcaggacaaggccaacggcaagggcggcaagaacaagaaggacgacgagatcgacatcatcgccggcgaggacgagtcggaagacacgtatccgctgctggagaacggcgcattcgcggacatcgaggcgatgatccgcgacacgctggtcgaatcgctgccgttgcagccactgtgccgaccggattgcaagggcctgtgctcgcagtgcggtgccgatctgaacgaggatcccgaccatcatcacgatgtgacggatatccgttttgccggattggcggggctcaaagcccagctcgaggccgagcagaacggcgagcaggccgagtgacgcgcgcctgaacggagtttgtacgagccgtgcgttaagataacggacgcttaagctcaattgttcgaacgaaatagaggatactcaaatggcactgcctaagtacaagacctcgcgcgccaacacgcactcgcgtcgcgcgaactggaaggccaccgctgctgcgaccgtgaactgcccgaactgtggcgctccggccctgccgcacatggcttgcccgagctgcggtaactaccgcggccgcacctaccgctccgccatccagccggctcacaccaagtgagtcctgcgataacggcttgaatgaaggccctgccatcgacgggtggcggggtcttcgcataagtgcaccattacgtacaccatcgcatcgcaaacaacacaacacaacacatcaccatcgcgtgaaggaccatacaacaatcatgagcaatgaaaccccacagcagccgacgccggccaacgagcttcttgaagcgttgggcaccactctcagcccggatctgctcgtgcaggcactcacccaccgctccttctcgcatgagcaccccggcgtggccaattacgaacgcctcgaattcctgggagacgcggtgctcgaactggtctccactgaaacgctgttcaccattcacccggatatgaccgaggggcaactggccaagatgcgcgccaaggccgtctccgaagacgcgctgagcgccatcgccaaaaccaagctcaaggtgggcccctacattctgctgggtcacggggaaaccgagcagggcggcgcggagaagaactccattctgtgcgacatcgtggaatcgctcatcggcgcgaccttcctggaacacggcatcgacgaggcacgcaaggtgattcaccggcttattgacgacacgctcgccgaagtggccaccgagggcccggcacttgactggaagacctcgctgaccgtcaaggcgcacggcctcggcaaggatgagccggtctaccatatggaggtctccggcccggagtacgcgcagatcttcaccgcgcgcgtctcattgggcgagaacggcgacatcatcggcatcggtaagggctccagcaagcgtaaggcgcagctggcggccgccgaagcgggctggaagtcactggactcgctcaagacgcggactaagtaagcccgctgtcagatttgcgaatagactgataccaacatgagcgacgagtcgtgccggggccacaagtctcggagaagcgactggaatcagacacgcgggcacccggccccatcccaaggtcgggcaggttcgcggcaaaatctatgaggtgagaggaatcatggctttacccacgcctttgcaggcattcagcggcgtgccgaaaatcaacgcggcccccgataagcagaccatcgtcgatggcgagaagatgactggcgcccaagcgctggtgcgttcgctggaggatctcggcgtcgaggacgtcttcggcattcctggcggcgcgattctgcccgtctaccacgagatcaaagacaacacgaagttccgcttcgtgcttatgcgccacgagcaggccgccggccacgccgccgaaggctacgcactggccactggcaaggtgggcgtgtgcatcgtgacttccggcccgggtgccacgaacgtggtcacggccattgcggacgcgaatatggactccgtgcccatggtcgtgattaccggtcaggtgggcgtgcaggccatcggcactgacgccttccaggaggcggatatcgtgggcatcacctacccggtgtccaagcactccttcctcgtgacccgcgcgcaggacattcctcgcgtgctttccgaggcgtactacatcgccaacaccggccgccccggcccggtggtcgtggatctgaccaagaccgcacagaccggcgacatgtactactcatggccgcagcgcatgattctgcccggctacaaccccaccaccaaggcgcacggccgtgtgctgtccgacgcggcgaagctgttctctcagtcgtaccgcccggtgctgtatgtgggtggcggcgccgcccgctccaacgccggcgcacaggtcaaggctctggccgacctgaccggcgcccccgtggtcacgaccctgcccgcacgcggcatcattcccgactccgacccgaagaacctcggcatgctgggcatgcacggtacgattgccgcaaccggtgccgtgcagcgcgctgacctgcttgtggccatcggtgcacgtttcgacgaccgcgtgaccggcaagctcgacgccttcgcaccgaccgcccgcgtgattcatattgacatcgacccggctgaaatcggcaagaaccgtcagcccgacgtgccgatcgtgggcgatgcggctaccgtgctcgacgacttgattcccgaaatccagcgcacgcaggccattcagggcaagccgaatctggccccctggtggaaggcgatcgacggctggcgcgaggaatacccgatgacgtgggatgagccgaccgacggatcaatggccccgcagtgggtcatcaaaaagctctctgagatggccgatccgtccaccatctgggtgaccggtgtgggacagcaccagatgtgggcttcgcagttcatcgatttcgagaaccagcacgcttggatctcctccggaggcctcggcacgatgggctacggtctgccagccgccatcggcgcatccgtgggctcggcccgcgagttcgagggcaagaagccggtgtggctgatcgatggtgacggttccttccagatgacctctgaggagctggccgccgcgttcctggaccacgctccggtgaagatcgcgattctgaacaactccgtgtacggcatggtccgtcagtggcagacgctgttctacgagcaccactactcgcagaccaacctgctcgatggcgaggcgcacggtgccgatggtgcggcggcactggtcgacggcgatgcgccgctcgaagtgcctgatttcatcaagttggccgaggcatacggctgcgtgggtatccgcgcgttcaccgaggaagaggcgattgccgccatcgaaaaggcgaaccagatcaacgaccgcccggtactgattgatttccgcgtgtggaaggatgcgatggtgtggccgatggtagccgccggcgcttccaacgacgaggtgacgtacaagcccggcatcaagccgctgaccggcggcaccccggctccgggaaccggtccggacgagcatgcgaccggcgtgttcgagcacgagaccgccgctgccgctgcgagcgagcactgaggagaggagaacactcatggctaactatcctgcatcccagcctggttcccagcgtcatacgctgtccgtgctggtggagaaccgcccaggcgtgctggcgcgtatcgccggcctgttcgcccgtcgtgcgttcaacatcaactcactgtccgtctcccccaccgagcgtccggacatctcacgcgtcacggtgaccgccgacgtggaggccgtgccactggagcagatcatcaagcagctcaacaagctgctgcacgtgctgaagatcgtggagctcgacccgaactccaccgtggaacgcgaactggtgctcatcaaggtggccgccgacgaatccaaccgttccgacgtgctggagatcgtgcgcctcttccgcgtgcgtgtggtggacgtgaatccggaatcgctgaccattgaggccaccggtgccgaaggtaagatcgatgcgctgctggggcttttggagcattacggtgtgattgagctggtgcgctccggtgccgtagccgtgacccgcggcccgcgcgccctgagcgaaaaggtcgtcggttccgaggttaccgggcgctgattcggcgactgcggggagacccagtccaagctcaaagggcggatgtgcatgatgcatatccgcctttttcatgcgtgcatacctcatcacccgtgctgcaagcaaaatgacagcaccttatgctagcattatgacagcaacaaggaggtgcatcatggcaacattgaccatccgaaaaatacccgatgagcagattcaacagctcaaagaagtggccgagaaaaacaaccgctccatggaatctcaggtgcgatccattcttgaagaatggctggccggcacggtggcgcatgaaatcacacgaaagaccaatttctacgacgagatccgcgaattcatgaagaacatggattttgagggactcgacaagggggaactcccactatccgagcgaaattccgccgattcccgaccgccagtatcttttgaataggaatcggccatgattattctggacaccaacgtcatcagcgaaatcatcaagaaacagccagacgaacacgttgccaattggctgaggaaccaagatacaagcaatctggcaaccaccgccatcaccgtcgccgagttgttggtcggaatatgtcgcatgcctgaaggcaaacgacgaaagtacacagatacgaccgtcaagctggcgcttatgacattagaggacaggacgttcgcatttgacacccaggcagctgcggattatgcccatatccttgtcgaacgcgaacgcaggggcacacctaccagtattcaagacgccatgattgcggcaattgcctgttcctgggatgcggccatagccacgcgcaatatcaaggacttcgaaggtaccgacgtggaattgattaatccgtgggagtttgcatagcggtaggccccggcaaactaccgaggccttgtgaacgttacggtttctcccgctactccaattgttcggagagttcgagccattcggcttcgagattatcgctttcagtattgacggcggtgagttgttcattgagcttgttgagaccctcgtagtcgctcgggtcatgggcggccatctgtgcctcaagttcggtcttccgctcttccagtttggcaagcttgcgctcgatggcattcacgcgcttggatgcctcgtggaaggccttgccggtgagcttcgaggtggagtcctcaccgttattggctccctctgacgagggagctgtccgcgaagcggactgagggagagatgcagcaacattgacggcggccgccttacccctaccagacttcgccgagctgctaccggtgcccgcgaagccaggcgtgtcagccggcaatcccttgccgttcttaatagcctcaaccatatcgaggtaatcctgcacaccaccgggcagatggcgtaccttgccgccaatcagcgcgaactgctgatcggtgacgcgctccagcaggtaccggtcgtgggatacgacgatcaacgtacccggccaagtatcgagcaaatcctccatgacggcgagcatatcagtgtccagatcgttgccgggctcgtccatgatgagcacgttcggctcgtcgagcaggatgagcagcaactgcatgcggcgcttctgtccgccggagaggtcgcgaatcggcgtcatcaactgggcggattcaaagccgagacgctccatcaactgtcccggcgttacttccttgccatccacaatgtagctcggcttatagcgggaaagcacttccttgatcttgtactggcccagtttctccagctcatcgaggcgctgcgagagtacggcgaacttcacggttttgccgatgttcacatggcccacggtcggagtaatcgaaccgtcaatcaacttcagcaatgtggacttgccggcaccgttcgcaccgacgatgccgaaacgatcgccggggccaatcagccaagtcacatcgtcaagaatctcgcggccggaaaccgtcaccttgcgtgcagccgaggtgacaccggctgcagcagtgccatcatccgaattcgttgcagcagtgtcaccgccgatggtttcaccacccgtgttcatgcgacgaacctcgcgatcgtcagcaagctgcggattgccgctctcagcctcggccttcttacgcgcttcctcagcggcctcgacggcttccggcacgccggcgtccaccaggcgcaggtcagtcatgtcggtgaccgccacctcaacggaaccgtgcagctgcggctcggcgtacatggcgttgaccacatccacgcgggaagcggacgcggagagcgccgccacatccgggtcgatatcggccatgccctgcggtttttcgaaaatctgcgtcacgtcgaccaaatcgaccacctgtttgccgaggcgtgaggtggccatttgcttcagttcaagtgtgttacgcatcggcggcacatcggcaatcaattcgcgtgcggccttgacgtggaacttctgcttggtggaacgggcacgggcaccgcgggaaagccatgcgagctccttgcgggccagattgcggcgcttcgtttcacgcacatcagcctggcggtcgcgttcgacgcgctgcagcatatatgcggaatagccgccctcgaacggctcgatcacgccatcgtggacttcccacatcgattcgcagacctcgtccaagaaccagcgatcgtgggtcacgagcaacagagcgccctggcctttggaccagcggttcttcagatgttcggcgagccagtggatggtgaccacatcaaggtggttagtgggctcgtcaagcgcgagaatatcccaatccttgagcagaagtcgggccaaatcggcgcggcgacgctggccgccggacaaggagccgaccttggcatccagactcatgccgccgagcaatgcctcgacgatttcacgggaggtgttgtcggacgcccattcgtagtcggcgcgcccctcaagtgcggcttcgcggatggtggcgttgtcgtcgagcggatcgcgctggtcaagcatgccgaacgtgagtccgccgcgcttcgtcacgcggccggaatccggctcctgggtgccgcggaacaggtgcagcaacgtggatttgccgtcgccgttcttgccgacgatgccgatgcggtcgccctcgaaaacaccctgcgtcacatcagtgaagatggttttggtagcgaaagcgagcgaaacgtgttccagtccaatgtcataagtcggcatgactcaccaatgtagcgccacgcttgcccagcggcggcccacaaacgttatttgcccagcgtctgagcgtaggagttgcagcgggccgcaaaaccggagaacacttgctcggcgagcggatgcagtagctgatcgtattgggcgaactgctcgcgcaattgggacttggacccacccgcggccttgagatccttgaccatgctcggctcatccagccattcgtccagcagcgagccgcacacctcaagatggaactgcatgcccagcgcggatcccagtcggaatgcctgcaccttggtggaagacgaacgtgccagcagctggcctccctcgggcaagcccaccacgtcgttatgccagtgtagcaccgtcagctgcttatcccacatggagaagaagtcatgcttgtccacacgcttgatcggcgcgaacccaatctccggcgcatcgcccttgcgcagctgcgcaccaagcgcagtggcgataatctgatgccccaggcatacaccgagaatcggcttgcctgaagccacggcggcacgcgccaacttggcttccgccttcagccccggatacttgtcgtaatcaagcgcgcccataggcccacccatgattaccacgccagccagttcgccgaaatcaggcaagtccggtttctttttgtcgacgatattcatcgtcaccgtctcaagaccgatgtcttcgaggttcgacaatatgcgtcccgggcgttcccatgggacatgttgcaaaatgagcacttgtggtgtggccatgacttctattgtggcacgagcgttccccgtttgcgtaacgagcagggcaaatccatgaatctcgcagtttccgcagcggtcaaagacgtattctcgcgagactgttgtcccgcttctcatccgtctgtcacctcgttcgggccccacctgtgaagcgttcatcaaactcttcgagtaacgattcagcatgtctggttcggaccctacgcttgagcgttatgggaaacagccaagaaccgcaggatttcaacatttccgtcatgccttcaagcctgacgccggtgcatgtcgccaaggccgcagaaggcctgaatctgtatgacaccgcctcgcaccaggtcagccatttcgtgccgctcaagccgggcgaagtcggcatttatgtgtgtggcgccaccgtgcagtcgtcaccgcatatcggccatatccgtgccgccgtggcgttcgacatcgtgcgccgctggtttttgaagctcggttacaaagtcacttttgtgcgtaatgtgaccgatatcgacgacaagattctcgataaggccgcggccgccggccagcgttggtgggcccgcgcctattactacgagcgcgaattcaccgaggcgtacaacacgctcggcgtgctgccgcccaccgtggaacctcgcgccaccggccacatgtcggacatgatcgacctgattcagcgcattctcgacaacggccacggctatgtggtcacggatgcggacggcaagcccaccggcaacgtgtacttcgatgtggcatcctggccgcattacggcgaactcacccaccagaagcagacctccgaagtcgatgaggccgctgccgtggccgaccgcatgggcccgtccgtggacgccaccggtgccgacaagtacaatccggtcgacccggccgacgcctcccccgacaagcacgacccgcgtgatttcgccctgtggaaggcccccaaggacaccgatcccgaggacgcccgttggtcgacgccgttcggcgtgggtcgccctggctggcacatcgaatgctccgccatgtcccaccgttacctgggcgatggcttcgacattcacggcggcggtttggatctgcgcttcccccaccacgaaaacgagatggcgcagacctgcgcggccggctacccctctgctgcgcgctggatgcattcggcatgggtgaccgccaagggcgagaagatgtcgaagtcgctgggcaccggcctgtccgtgccgagcgtgctggccgagcattccgcttgggtggtacgttacgctttgggctccgtgcagtaccggtcgatgctcgaatggtccgatcaggcgttggtcgaggcgcaggccgcatacgaccgtgtctcgaacttcatcgagcgcgccggtgtggcactgggcggtcagccttctcgcgaggaggttgctgccgtctccgccgacgatttgcccgccgatttcgtggccgccatgaatgacgacgtcaatgtgtctggtgcaaccgccgcgatcttcaccgccatccgttccggcaatacgttgctttcacagctggctgaccgcgccgattccgaaaccgccaaggccgaggtgcgtgaggcgctgctcgccgtgcgtgccatgctcgacaccttgggtctcgacccgctggccgagccgtggatgtctgctggcggtgccgctgatggcacggccgagtcgcccgaacatgcggcgctggaggcactgattgccgagcagctcaacgcccgcgccgaggcccgcaaggccaaggacttcgccaaggccgaccagattcgcgacgccctgaccgaggccggcatcgccatcgaagacggcccgcagggttccacttggagcctgaagtagccgcttcaaacccatcaatcagtcaaacacgaagtccacgtccacgatgtgcaggcgcttggcgagctccttctccagcgagcgcttgcattcgatgaggtcagctacatcaatggtttcgccgatgccgctcagatacacgtcaacggtgtagttcatgccggtcttgaagatcagcgtctgctcgtagtcggtgttggcaggcagatggcgctgtgcctcggcctccacgtaggcgttggtctcatcgtcatcatgcacgccgccgaccaattccacgaacgcctctttgagcacgctgaacggctccttgatggtcaatgccaccaaagccacggtgatgaagaaatcgccggtgtagtgcaggaagtcaagcggaccgccggccggtagcagcatcaggaagatggcaaccacgccgatgccgaacgacatcgatccgtcgaccaacgtgctcttgcactcggcggtgagcatggtgctggaatcgccgatggagcggttggaacgccggtaatacatgtataggctgaagcacactattacggtcaggatctcgtagatgaccaccgggccggtttcaatgcgttcgccggacccgaacacgaagtagtcgtacgctactcggcacacgtcaatcagcgaatacaccaacaacgacatggtgaaaatggccttgcagatcgcgtagatgggttccagtgcgaacatgccattggggaagcgctcggtggttcgcaccgtgcgcgacgagagatacaccgccaccattccggacaggacggaaatcgcggtgaaggagaagtcgaggaacatggccttgaggccggtcatgaagaacacggccatgccggctaagacctgcaacacgttgatgacgataccaacgatcagggctttgcgttcgagtagtttttgggtgggcatcagtgggccttccttattgcacggcatgtctgcgttggcccgaacgtcatggttcggagcgcacggcagtctgcgtataagcggtgtccagcgattttcaaaacagcgtaagcattccaaaaaacacaggattctttacggtttccatggtatcggaagcactcgattggcttcgccacgagcggacggcacggcatttgccgtctgaatgcccaacatccctgactactacgcgacgcaatccccggaaagagtcgtccccaacaccgcaatttcccgcgtggcggctagactgttgcccattatggcagctttttcatctttgacagacagactctcgaatgcgttcaagcatctgaagagcaagggcaagctttccgaggcggatatcgacggtacgatccgtgaaatccgccgcgcgctgctcgacgccgacgtggcgctcgacgtggtgcgttccttcaccggcaaggtgcgtgagcgcgcactgggaaccgaggtgtccgacgcactcaaccccgcccaacaggtggtgaagatcgtcaacgaggagctcaccgacgtgctcggccaaggggtcgatcgtccgctgaacttcgcaaagaacccgccgacgatcatcatgctcgccggccttcagggtgccggtaagaccacgctggccggcaagctcggctactggctcaaggattccggccacacgccgctgctggtggcggccgatttgcagcgtccgaacgcggtgacgcagctgcaggtggtcggcgaacgcgccggcgtgcccgtctatgctcccgaaaagggcgtccaatccgatggcggcgaggccgtcgcagctccgggccagacctccggcgacccggtgaaggtggcccgcgattccatcgaactcgccaggcagaagctctacgacacggtgatcatcgataccgccggtcgtctgggcgtggacgaggagctgatgaagcaggcccgcgacatccgcgatgccgtgcaccccaacgaaatcctgttcgtcatcgacgcgatgatcggccaggacgccgtcaagaccgccaaggcctttgacgagggtgtggacttcaccggcgtggtgctctccaagctcgatggcgacgcccgcggtggtgccgcgctgtccgtggcgtccgtgaccggcaagccgatcctgttcgcctccaacggtgagggcctgaaggacttcgaggtcttccacccggaccgcatggcctcgcgtatcctcgacatgggcgacatcatgacgctcatcgagcaggcgcagaagcagttcgatgaggaggaggcccgcaaggccgccgagaaaatctccgaaggctccttcggcctggacgacttcctcgatcagctgcagcaggtacgcaagctgggctcgatgaagtcgctgctcggcatgattccgggcatggcccagcaccgcaaggaactcgagcagttcgatgagaaggaaatcgaccgcaccgaggcgatcattcgctcgatgaccccggccgagcgccgcgatccgtcgattatcaatggttcccgccgcgcccgtatcgcctatggttccggcgtgacggtttctcaggtgaacgctttgctgcagcgtttcgagcaggccgcaaagatgatgaagcgcatgtccaatcgtggcggcatgggcggcggcatccccggcttcggcggcccggctatgggcggcggcaagaagaagggcaagaacaagaagaaaggcggcaaatccggcaatccgatgaagcgcgaggccgaggagaaggcattgcgcgacaagctggccggcaaatcctccggttcgaccggcggttccgccttcgccaagaagccgcagaacccggccctgcccgccggccttgaacagatgatgggcaacgtcgatggtggcactgaactgccgccgaacctcggcggaggccttggcggactgttcggccgctgatctcacaacttggctcccctcgcagaggggagccaagttatatctcggttcaatttatatttcgaaaggaacttccatgacgacaatcttcagcgcggtggcaatcatcgcactgttatggacggccttaagcgcgctgcccgccggtctcgaggcccgtatgccgcttccgtacatgattgccctgactccgctgctgtgggttcctttgatgattctggccgcggtcgccgcatggcaacatgaatggactgcgatgtcgtcgcttattgtggtcgcgctgattgccagctcacagcgcatcaactactggggtacgtcaatcgacccagccggcaaacgcagagaatcccaccgtgaaacagcccgtgaaacaacttcgccgacgctgtcaaaaagccataacagcaatacatcgggtacctcaaacactccgaaggaaggacccgaaacaatctccgatggtcaccgtgaaacaacgcgtgaaacactctcgccccagttctcggttatgacgatgaattgtcgatacggacgcgccgacgccgctgaaatcattcgcaatattcgcgaacgcaatatcagcgtattggccttgcaggaagtcaccgacgacctcatcacacgtcttaccgaagccgacatcaacgaactcctcccctaccatcagttcggagacgccaaagagaccgataacggcggattcaacgtgatctattcccgctacgagccgagcgcagcggtgcccaacgtggtctccatccctgccgccgacgttcccgccatcaccctcaaaacctccggtaatcgcacggtgacgctttgttcggctcacccgaaatcgccgatgcgcggctgc

SEQ ID NO: 3867 - DNA, 3100 bp, Unknown
  R22_24m  MAG No. k141_418
ataatccgcaaggtgcttttgcgtaggaccaaggcgccggcgatgacacgggacaaccacaacagcgaatgacgcacaacgggccgtccgggacacccccgtaaacggtcgcgtcgttttccattggtgtcattacggggtccgggtcccgcaaaacgttggaaaatcagcgtttcttgaacggtaaggtaacatatggctgaatttgtgtttcagatgatcaaggcccgcaagtcttacggcgaccgcgtgattctcgatgacgtgaccctgagcttcctgcccggcgcgaagatcggcgtcgtgggcccgaacggcatgggtaagtccaccctgctgaagatcatggccggcctggagaccgtgagcaacggcgaggccacgctgaccccgggcttcacggtcggcatcctgcagcaggagccgccgctggatgacaccaagaccgtgggcgagaacatcaagatggcgttcggcccgattgccgagaaggtcgcccgattcaacgagatcggtgaagaaatggccaacccggacgccgacttcgacgcgctgatggaagaaatgggcaagctgcagaccgagatcgacgccgccgacggctgggacctcgactcccagcttgagcaggcgatggacgccctgcagtgccccgatccggacaccccggtcaacgtgtgctccggtggcgagcgccgccgtgtggccctgtgcaagctgctgcttgaggccccggacctgctgctgctcgacgagcccaccaaccacctggacgccgagtccatcctgtggctggaacagttcctgcaccagtacaagggcgcggtcatcgccgtcacccacgatcgttacttcatggacaatgtggccgaatggatctgcgaggtcgaccgcggccacctgtacccgtacaagggcaactactccacctacttggagaccaaggccaagcgtctggagatccagggagccaaggacgccaagctcgccaagcgactgaagaacgagctcgactgggtgcgctcctcccccaaggcccgtcaggccaagaacaaggcccgtctggaacgttacgaccagatggagaacgaggcacgcaacaacaagaagctcgacttctccgagattcagattccggccggcccgcgcctcggttccaccgtgcttgaagccaaccacatccataaggctttcggcgatcgcgtgctcatcgacgacctgtccttcacgctgccgcgcaacggcatcgtcggcgtgatcggcccgaacggcgtgggtaagtccacgctgttcaagaccatcgtgggcctggaaccgctgaccagcggcgagctgaagatcggcgacaccgtcaaaatcagctacgtggaccagaaccgtgaaggcctggacccgaacaagaacctgtgggaggccgtgtccggcggcctcgacttcatcgaggtggccggcgtggaagtgccgacccgcgcctacgtggccagcttcggcttcaagggcgccgaccagcagaagctgaccggcgtgctgtccggtggtgaacgcaaccgtctgaacctggccctgaccctgaagcagggcggcaacctgctgctgctcgacgagcccaccaacgatctggacgtcgagaccctggaatccctcgaaaacgcgctgctcgagttcccgggctgcgctgtggtgatctcccacgaccgttggttcctcgaccgcgtcgccacgcatatcctcgcgtgggaaggcgacgacgacaacccggccaagtggtactggttcgaaggcaacttccaggcctaccaggagaacaaggtggcccgactcggtgaggatgcggcccgcccgcaccgcctgcacaagaagcttgtgcgcggctgagatacgccggcattagtgccacaacgcgctttatacgtcgaaagccgtccctcaggggcggctttcccataattgcccccatgactgccccgccccgcatcccataaaatcccacagtcacctacggcaacgcaccggcaacacaccggcagtgcagcagcaacgtagcggcaacgcaccgcataaccaaccgtttaccttccaaacagtctcgttacatttcgctcccggaactcttaacccccaccggatagactgccaaccataggttggaatacgataaccgaatatcgaacacagcagaacaagaatcgaggaacgccatggctcaggcaaccaccgtaactccattggaccatctggtgaaggtgctgaagttgggcgagccttccgcttaccgcaatcacacatacatcaatggcgagagtatgtacttccccactggccgcgtctacggtggccaggtcatcgcccagtcggtgatcgccgcgtccaaaaccgtgggcccttcacgcctgccgcattcggtgcatggctatttcattgccgccggcgatattcgtcaagacctgctgtttgacgtcgagaaccttcgcgacggccgctcgttctccgctcgtcgggtcaacgtcacccaagccgaggggtcgattctcacggccatcgcctccttccaggagaccggtcaggagggtgtggaatttgccgatccgatgccggaaaacctgcccgatcccgaaacgttgacttccgccaaggaactcatgcagccgttcgccgaaaagtcgccgttcgccaatttctatgtcgagaaatcgccattcgatatccgccacgtgacgccgaccgtgatgctgcgcgcagacaaggattccgccgagcatgattccggcaagcagatggtgtggatgaaggccgatggccacgtcgatgtgccgcaggtcatgcatcgtgcgatgctggcactcggctgcgatcaggtgatgatggagccggtgctgcgccgcgccggactgtcgatttccacaccgggcatttcctatgcgtccatcgaccattcgatgtggtggtatcaggatatcgatatcaacgaatggcatttatatgtgcaggatacgcctatcgccgcgcacggacgcggactcggcatcgccaaagtgtatgcgcagaatggcgacttggtggcggccatcgctcaggaagctatggttcgcgtgccgcagga

SEQ ID NO: 3868 - DNA, 9934 bp, Unknown
  R22_24m  MAG No. k141_442
acctcaagtggcgcacggtggacttcaaggaggtccgttacgacgagggcgaccacttcggttgcccggtgatgaacttctccgacgctgacgtgccgtacacgcgcgcgatcgagttcaagaacttcaacccggagcgccacgactcccagaacccggacaagaccgtggtgtgggaggaatacagccgcttcgccgagcgcggcgacgagccgtactacccggtcaacaccgacgcggacaaggcgctgtacgcccagtacgaggccaaggccgcggccgagccgaacaccgtgttcggcggccgtctgggcacctacaagtactatgacatgcaccaggtaatcgacaccgcactgaccgcctacgaggaacaggtcgcgcctctgctgaagaagtagaccgtcgtttcaccagaggattaacgatttagcttgaaaccgactgaatattgctgaggcaatagccggtttcaggcttttgtgtttttggaagccaaatttcctggggtacttaaggctcgccacgaggagtacagttgtctgtaacgcacaatgtggcgcgtaagacgaggggcgtatctcgcaagtggggtgcgatgcagttgaaggagtgcatgtcatgactgatccgaatgccaatccgaacggccaggtgccggggcagcaagctgacgccaatccgactgagccgttaaatgcgatgacgggggaagcaggaaccgccgccaacaatgctccaacccaagcactcgcagcgggcgaacagcccactcaggcgttcactcctgttgagcagcctacgcaggcgtttacacctgccgagcagtccacccagcctcttgcgccggtcaatcagccggtaccgcctacgcaggctttgccaccagtgactcctgccgctgcgcccgcgcctgcgcccgcaccagcagcgcccaattcgccctatccggggacggctccggcagcgtcagtgctccggtatccgggcggcggggccgtgcctccgcaaacgccctataacccgtatatgcaaggcggccaaccgaacggccagccgggatggtctggttcttacggcagtgtgccgcctgaagcgaaccagaagtacaacggcctggctattgccggttttatctgctcgttccttgtctcgctccccggtctgatcctgagcatcgtgggcctcaaccagattaagaaacagggcggcaagggcaagggcttggccatcgccggcatcatcatcagtgcggcgggcatggtgatacaggtaatactggtcatcgcgctgatcgtcggcggtgtctcgtacaccagcaaggctatagatgaggcgaaaaccgattccttctatagtcagtcctcttcgggcaacggtgatagcagcgataagagcaaagctcaagataatcttgacgatgcgctggacgacacgttggacgaaacccatgacgatctaaccgacggcgattatgggctgtacgattcgattcaggatttcgtcgactattcggaattcaaggactccattgaatccgaagcggatacgtttgcagataccggcatcaccttcaactaccgtgtcgacggtgacaccttggtgtacgagtacgtgctcgacgacagctatgcctcgctaggcgataccgtcgcttcctcactggatgctatggacagcacctatcaatccaccgcgaatctgctgggctcgatgtgcaagacctccagcggcaaggcatcattgcgcgtcatcatgcacacgcaaagcggccagtcgctgtacgacaaaacctggaccgaaaagtagcaatcccagcgaacgtgcgttttggtcgattgaaggccggtctgcttgctccttggacgtatgcttctgcggaaggaaccgccaaggagtaggcttagcaccatgagactcgcacgtttttctttgaatgattcgccgcgctacgccttcgtacaaaaggacgaaacggacggcaaggactacctcatcgaacttgacggtcatccgctggccggcgaccaggtcaagcctaccggcaaccggtacccggtcgacggcgacggcatccgcctgctctccccggtcatcccctccaaggtttacggtctggccaagaactacgaggcccacgcccagttcatgcacgaggccggccactccgaaatcgcccacgcgccggaagacatggtgatcttcaccaagccgtccacctcggtgattggccccgacgatccgatcgtgtacccggcctgctccaaggacatgaacttcgagccggaagtggccgtggtgatgggacgcatcgccaagaacgtgaccgtcgagaacgcgatggattacgtgctcggcttcacctgcgtgaacgacgtgacgttgcgcgacctgcagggcatcgaccccacgtggacgcgcgccaagggcttcgatacttcctgcccgcttggcccgtggattgtgatgcgtgacgacctcgactggaaggacgccaagatttccttcacgctgaacggcgaggatgtgccgatggcgtctggcaccaccgcgaacctgattcacggcatccccgagcagattgccgcgatttcgtcgttctccacgctgctgcctggtgacgtcatcatgaccggcaccccgaacgcctccggccacctcgacccaggcgacgagaccatcgtgcacgtcgagggcatcggcgatctgcgcaacgtaatcgttcgggcgtgattcgactgacgaacgcatggcccggtcattttcctatttgggggatgtccgggccttcgtgctttgtttcatatatttcatctatatatgcatctgtctaatgtacagatgattttttcgcgaaatctaagtgttgcaccaagctatatgttacacttatttcagttatgaaatgaggtatgtgcattatgactgcagtaatagaacgtgaacagcttacagaacgcgatttggatcaggcgaaggcgtgccgagagctggtgcaaaaaggctctgtactcgctgcaattttggatggcattattgacgataatgtactggtggttcgcaaggacgaagaattatcccctgctcaagctgctgagattcttggcgtgagtcggccctatgtgactcgtttgctgaagtcaggactgctcgaatctcatatggtgggcagtcatcatcggattacggtacttgctttgcggacgtacatggctaatcgtgatgcgggacgtaaggaatacgcccacgcaatcaattctcgggcaaaggatattgccgatgcggttgacgaagtcgctccggtgtctgagacaagtcgaaatcgtatgcgtgatttagttgcagagcaccgccgtgaagcgatcaaagcgagtagtgccgcagtttctcccgcagagtgaggattgtctcaggcgaatcgtggtgaatctattgtctgtgcgatttacccggtatgcgtcaagtcatgactattgctcaggcgtgtaattacgtctcagatactccttgacttccagtatgtcttggcaatcggggcatgcaggaagtcctgagtattcatctctggttggcacgaaccatttcccgcacagagaacggatgagggtgccttcaacatatgcgtcggtcagagtctctttgggtacgcgatgtagcatagattctggctcggtgtcgcctatcgtcttgtataacgattcggaatcatcgaggaagttcgggcttgtgatgcgcttgatgtcgtctggttccagcagcacgaatgctgacatagttgcgcgtctttgctgaccgtcgctgtatgtcttcaacgacgtttctgctggctgattggggtctttgggctggcagatggcgttaaagcatctcaagaggatgcggtgaagtcgggcgtatggagaactgttgtcctgttcctcgaccggaaaatcaagggtcaattcaacgaattgattgacagttgctgagtcgtcatcgtcatcttgctgaatctgaatactggcctttacgggggctcctgaaatctgataggggatatccagcgctgagagggcttcggactgggaagttgtttggcccgcataaattcctgcacgaattttgttaagcatctcctgaacgactcgtcgctcaaaatccagaaaatgctgacgttcttcttctcgtttccgaaccagataatcttcttcgctgggcatatagttgctggcgttggaagccttaatgattgatttgcaattgcctgaatggaaatccccatgcgatccgcaatagaccatccacgggtcgccatattggtcaagaatgacgatgcctcgccagccggtttgcttgttccttatttcatagactgggcgctttgccacagcgctaaattccgaatgcttggtggcagcgattttgtcaccagcgaaagcctgacgagccatattgagtagtgtgacgtcgaatgcggtgaaatcaagaccttcgaacggtgttactgcttccgtccgcatgttctgttcaatgagttgttgagggttctctgagttgaagagattattgtcaatcatgctcaacagaacttgaattgtagggcgaactggtctcatgatgattaaccatagtcggtgatgcagcttagtcagtgattgatatcacatagaagaagtattgctctttttggctcccctcgtgtctgggcccgtaattcccccttacgctcccggcagaagtgcgtgcagggcggtcatcaccaccaagctgatgatggccgtcactgtcagcgagaagccggcgagcttggcgttgccggttagcgaatcggtgaacttggttgagaagatcgtgataggggcgaacgagcccaacacgatgatctcgcgaatcctcatgtcgaatggcagtaggaaccaggcggccacggcgataatcgcgccgaataccatgcgccagacaatcaccttgcccaactccaccttgtccttgcgattgttcggaatctccatcatcagtccgatcatggccatcgcgcagaaggcgttcgcattggcgaacggggtgatgagcgtaacgatgggctgtgggatcgtgatgtgcaggaacatgaacaccagcatcagcatgtagatgtcgaaggaaatcgagcttaggaagtccctggcaatattgcgcagacgcaggatgagcggtagcgacttgaaattgtcatccatatgcagcagcgtgcgtgtgatggtcagtgacccggccgtggccacggtggcgttgccgatatcgagcatgatgatcggcagaccggcggacgggcccatgaacgtctgaaccacaggcaggcagaacgcgcccaggttcaggcccgaggcgttgagcatctggaaggcgcggtagttcttctcgtcgccgcgagaaccgaaatacacgatgaacagcggaatcgcgcaggcgaagaagccgaacaacacgatccacagcatgcgcatgtcgtgcttgttcgtggcgaacgacaggataatcgcacaaggaagcgtcagattgaataccagaccctgcacgattttgtaatcacgctcgccgaaaatgtggacatgtttgagtatgtagacaccgatgataacgagcagcagcgaaccggcctgaaaaatcatgttcttctcttatcccacaagcacccgccgcagcaccggcggcggtcaggcgcataacaaaccagccgtgagtataggagcgttcgcgcggcgctggcgcggggcggtgcatattgtggacagtcccgtaacgttgatatgccatgctggcgagatgaatatatccaataccaagtggagctcggcacgatagagaggtaggaaaacatggcagagcagacggtcaccgtaggcgttggggcattgagcatcgaggacgttatcgccgtagcgcgcggcggtgccaaagtggcgatttcggacgaatcgaagcatgagatggcgctaagtcgcgcggttatcgatcatttggccgacgacaccgtgccgcattacggtatctccaccggattcggcgcgctcgcctccacttccatccccagggaacagcgcgcgcagctgcagaaaagtctgatccgctcgcatgccgccggtgccggaccggaagtggagcgtgaggtggtgcgcggcctgctggtgctgcgcctgagcaccctgtgcaccggacgcaccggtgtgcgcccggaaaccgcgcaggtctacgccgatatgctgaacgccggcatcaccccggtggtctacgaatacggttcgctcggatgttccggtgatttggcgccgctcgccgcctgcgctttggtggcgatgggcgaaggcgaggcccgcaacgctgacggccgcaagatcggcggcggcgaagcgctgcgtgcggccggcatcacgcccgtcgatttgaaagagaaggaaggcttggcgctggtcaacggcaccgacggcatgctcggcatgttgtgtatggccatcaccgatctgcgcctgctactcaagacggcggacatcgccgccgcgatgagcgtggaaggcatgctcggcaacgaccgcgtgttcgccgccgacttgcaggcgctgcgtccgcatcgcggccaaggcgattccgccgcgaacatcgtccgcatgctcaagggctctggtctgatcgaagccggccgcccgggatccaccgtgcgtgtgcaggacgcctactcgctgcgctgcaccccgcaggtgcacggcgccgcccgcgacaccgtggaatacgcggcctccgtggcgggcgtggaactcgcctccgccatcgacaacccgtgcgtcacgctggacggccgtgtggagtccaacggcaacttccatggcgcgccgctggcctatgtgctcgatttcctggcgattccgactgccgacgtagcctctatctccgagcgtcgtaccgaccgcttccttgacgtggcgcgcaaccgcggcctgccggcgttcctggctggtgacccgggcgtagactccggtttcatgatcgcccagtacaccgccgccggcatcgtctccgaaatgaagcgcaacgccgtgcccgcctcggtcgattcgattccgagctccgccatgcaggaagatcacgtgtcgatgggctgggccgccgcccgcaagctgcgccggtcgattccggcctttgcgcgcgtgctggccgtggaactgctgtgctcctgccgctccttcgacttccgcaagccgtaccgtccgggtgcggcgggcgccgccgtataccgcgtggtgcgccagtacgccaacgaaatcggccccgacgtacgcgatacctggaccaccccgcaaatcgaaggcgtagccaacgccatcctctccggcgaaatcctatccgccgccgaagctgccgtcggcctcctgaaatagatgtgagctccctcatcagagggggctactgttcaccctccccaccaaaatccaaaacttgagtcacctgcactcaagttttgggaatagaatgggttctaggtcggttgaccatatcagataacgacaagttgtggtctgcggtggcgcttgcggggctttcgaagcccgcgagccgctccgcgcgggccgcatgatatggaggaatacgatatggaacagaagttcaccactatggcccaggaggccgtcggcgacgcgattcagagtgcgtccgccgcaggaaacgcgcaggttgagaccctgcacgtcatggatgcgttgctgcgtcaggaaaacggcgtggtgcgctccctcatcgaggccgcgggcggagacccacaggccatcggcgccgccgtgcgtaacgctttggtcgcactgccgagcgcatccggctccagcacttcgcagccgcaagccagccgccagctgaccgccgccatcgcccaggctgagaaggaaatgcagcagatgggcgacgaatacgtctccaccgagcacctgcttatcggcatcgcggccagcaagccgaaccagtcggccgaaatcctggagaagaacggcgtcaccgcagcctccctgcgcaaggccgtacccggcgtgcgtggcggcgcgaaggtcaccagcccggacgcggaaggctcgtacaaggccctggagaagtactccaccgacctgacggccgccgccaaggaaggcaagctcgatccggtgatcggccgtgatcaggaaatccgccgcgtgattcagatcctctcccgtcgtaccaagaacaacccggtgctgatcggcgagcccggcgtcggcaagactgccgtcgtggaaggcctggcccagcgtatcgtggcgggcgacgtgcccaccaccctgcaaggcaagaagctcatctcccttgacctaggctccatggtggccggctcgaagtaccgtggcgagttcgaggagcgcctgaagagcgtcctcaacgaaatcaagaacgcggacggccagatcatcaccttcatcgacgagattcacaccatcgtcggcgcgggtgcggccgaaggctcgatggacgccggcaatatgctgaagcctatgctggcccgtggcgagctgcgcctgatcggcgcgaccacgctggacgagtaccgcgagaacatcgaaaaggatccggcattggaacgccgtttccaacaggtgttcgtgggcgagccgagcgtggaagacaccatcgccatcctgcgtggcctgaagcagcgttacgaggcgcaccacaaggtgacaatcggcgatgacgcgctggttgccgccgcgaccctctcgaaccgttatattccgggccgtcagctgccggacaaggccatcgacctggtcgatgaggcggctgcccacctgcgtatggagctcgactcctcgcctgaggagatcgatgaactgcagcgcaaggtgacccgtcttgaaatggaggaaatgcagctcaagaaggctgaggatcctgcatccaaggagcgtctgggcaagctgcaagccgaactcgcggacacccgtgagaagctcagcggcctcaaggcgcgttgggatgcggagcaggccggccacaacaaggtcggtgacctgcgtgccaagctcgatgacctgcgtgtgcaggcggacaagttcacccgtgagggaaatctggctgaggcctcgaagattctgtacggagagattccggctattcagaaggaactcgccgccgcggaaagcgcggatgccgaatctgccgatgccggcgcggccaacccggccgatgagccgatggtcccggaccgtgtggacgccgactcggtggccgagatcgtctccgactggaccggcattcccgttggccgcctgatgcagggcgagaacgagaagctgctgcatatggaggactacctgggcaagcgtgtgatcggccagaaggaagccatcgccgccgtgtccgacgcggtgcgccgttcgcgtgccggcatctccgacccgaaccgtccgaccggatcgttcctgttcctcggtcccaccggtgtgggcaagaccgaactggccaaggcgctcgccgacttcctgttcgacgacgagaaggccatggtccgcatcgacatgtccgaatacatggagaaggcttcagtctcgcgcctgatcggtgcggctccgggctacgtgggctacgagcagggcggccagctgaccgaggccgtgcgccgccgcccgtattccgtggtgctgttcgacgaggtcgagaaggccaatccggagatcttcgacgtgctgctgcaggtgctcgacgatggccgcctgaccgatggccagggcaggaccgtggacttcaaaaacacgatcctgatcatgacctccaacctcggctcgcagttcctcgtgaacgaggacatggacgccgacgccaagaagaaggccgtgatggacgccgtccacatgaacttcaagccggagttcctgaaccgtctggacgacatcgtcatgttccacccgctcacgcg

SEQ ID NO: 3869 - DNA, 48292 bp, Unknown
  R22_24m  MAG No. k141_530
atgattctgtccaccaccaccgccggttccagcccgaaggagaactacgacttcttcccgctgaccgtcgacgtggaggagaagatgtacgccgcgggcaagatcccgggctcgttcttccgccgtgaaggccgcccgagctccgaggcgatcctggcgtgccgtatcatcgaccgtccgctgcgcccgctgttcccgcacacgctgcgcaacgaagtgcaggtcgtggagaccgtgctgtccatcgatcccgacgacgcctacgacgtcatcgccctgaacgcggcctccgcttcgacgatgatctccggcctgccgttcgaaggcccggtctccggcgtgcgtctggcgctgatcgacggccagtgggtcgccttcccgcgctggagcgagcgtgagcgcgccgtgttcgagatcgtggtcgccggccgtgtggtcgagaacggtgacgtcgccatcgccatgatcgaggccggtgccggcaagaacgcctggcacctcatctatgacgagggtcagaccaagcccgatgaggaggtcgtggccggtggtcttgaagccgccaagccgttcatcaaggtgatctgcgaggctcaggacgagctcaagaagatcgctgccaaggacaccaaggagttccagctcttcccggagtacaccgacgagctgtatgcccgtatcgacgagatcgcccatcaggatctgaacgaggcgctctccatcgccgagaagctgccgcgtcaggatcgcatccatgagatcaaggagcacgtgcgcgaggtgctcgcggacgagttcaccgacatggacgacgccgagaaggacaaggagctgggcaacgccttcaaggagctgcagcgccagatcgtgcgtcgccgcatcctgaccgaggactaccgcatcgacggccgtggcctgcgcgacatccgcaccctgtccgccgaggtggacattgtgcctcgcgtgcacggttccgccctgttccagcgtggcgagacccagattctgggcgtcaccaccctgaacatgctcaagatggagcagcagatcgacgcgctgtccggtccgcagtccaagcgctacatgcacaactacgagatgccgccgtactccactggtgagaccggccgcgtcggctccccgaagcgccgcgaaatcggccacggcgccctcgctgagaaggctctcgtgccggtgctgccgagccgtgaagagttcccctacgccatccgccaggtctccgaggccatcggttccaacggttccacttcgatgggttccgtgtgcgcctccacgctgagccttttggctgccggcgtgccgctgaaggccccggttgccggcatcgccatgggcctcgtgtccggcgacgttgatggcaagcacatcttcaagaccctcaccgatatcctgggtgccgaggatgccttcggcgacatggacttcaaggtggccggtacttccgagttcatcactgccctgcagctcgacaccaagctcgacggcatccccgccgacatcctggccgccgctttgcagcaggccaaggaagcccgcgccacgattctcgaggtcattaacgagtgcatcgacggcccggctgagatgagcgagttcgctccgcgcatcatcaccaccaccgttccggtcgagaagatcggcgaggtcatcggcccgaagggcaagatgatcaaccagattcaggaagataccggcgctgaaattgccatcgaggatgacggtaccgtcttcatctcctccgagggtggcgaggccgctaagaaggccaagtccatcatcgattccatcgccaacccgcacgtgcccgaggccggcgaaacctacaacggcaaggtcgtcaagaccacgtcgttcggcgctttcgtgaacctcacccccggcaccgacggcctgctgcacatctcccagatccgcaacctggccaacggcgagcgtattgacgccgtcgaagacgtgctcaaggaaggcgacaccgttgaggtgatcgttcagggtgtcgatgatcgcggcaagatctccctggccatccctggtttcgaggatcaggagaacaacgcccgcccgagccgtggcgatcgcgatgaccgccgtggcggccgtggctgtggtgaccgtgacgatcgccgtggcagccgtggccgtcgctccgatcgcgatgaccgtgacttcgacgatcgtgacgaccgtccgcgtcgccgtcgctccgatgacttcgaggatgattacgacgaccgtccgcgtcgccgtcgctccgatgaccgtgacttcgatcgcgatgatcgcgatgatgatcgtccgcgtcgccgtcgttctgccgaccgtgacttcgacgatcgcgatgaccgtgatgctcgcgactcccgtgatgatgatcgtccgcgtcgccgtcgctcttccgatcgcgatgaccgtggcgatcgtgatgaccgccgtggcggtttccgtggcggccgtggccgtggctcggaccgcaacccgcgctatgccaccgacgacaactacgacgactaccgcgccgaccgcgaagagcgcactgagcgcccgcgtcgccgcgtccgtcgcgactttgatccgttcgaggactaaagccctctcacggatcggtcgcggcatagccgcccccctcacctacgggaagcccgcagggcttcccgctgaacggttcggcattcgaggactgatcgttctctagcttctctcgggtgagaagagcttaatcgcaaaccaaaaggcttctataccgtttcattcggtatagaagccttttggtttttcggcttcttcgcgctacatatttcgatgttgaatagggcactcgtgctgctgccatgtacattcagttgtcagttgacaactattctcatgcatcaagaatggcggaaaacagccattaagatgattggagccacgctaaaaagcgttgacaactgacaacagtttgtacacggcaccgcatggcacctatcctgttgctcacgaccggatctattctctcgtctgttgttatgcccaacagcaaaatccgcttgccgtgccgcgccatgtccgagtcatggccagccgttgattgaatggcggatgatcatcgaaggtactcatgggcgttgatcactgtggcaacaacaaaggccgggcccttgtgagagcccggcctttatgccgtatggcggcggattaatccttaaaggctaatccgttgtcaatcagcgttacagaatcgccatgcacacgaagtccagaatgaacagcgcggccacaatccagatgatcgggtgaacctccttggccttgcccttgcaggtcttcacgatgcagtacatgatgaagccgccggcgatgccgtaggagatggagtaggagaaggccatgaacacggctgcgaagaacgccgggatggcttcggcgatgtcgtcccacttgacttccttcagggaagcggccatcatgcagccgacgatcaccagcacgccggcggttgcggcggacggcacggcggagacgaccggggccaggaacgcggacagggcgaagcagatcgccacaaccacggaggtcaggccggtgcggccgcctgcggcgatgccggcggaagactcgacgtaggtggtggtgttcgaggtgccgcagatagcgccaatggaggtggcgatggagtcggcgaacagggccttgtccatcttggaggagaagccgtggccgttctccagagccttctcatcctcggcggagaagatgccggtgcgacggccggtgccgatgaaagtgcccagggtgtcgaacgtatcggacatggagaaggcgaagatggtcacgatgaccagaggcagcttggagacgtcggagaacagcgccgggaagccctcagcggagaagatcgcgccgaaggtctgcggcagctgggagaaggtttcgctgatggactgcgagttggaccaggtggtaacgccgaacgggatgccgatcacggtggtgatggcgatggccagcagcatgccgcccttaaccttcatcacggtgaacacaatggccagtacgaggccgatcaggaagacccacagcaccttgtcgttgaagtcggccagacccggggtcgccgccacggcgcctcccttggccgcggctttcgggtcgccgggggtgaacttgatcagtccgacgttcagcatgcccacataggccacgaacaggccgatgccgccgccgatggcgtgttgcagggactccgggatggccatgatgatcatcttgcggatcttggtgacggtgatgaggatgttgatcaggccgcacaggaacaccatgcacatggtctgctgccagctgaagccgaggccgaagcacacggtgtaggtgaagaacgcgttgaggcccatgccggcggcctgggcgtacggcacgttggcgaacaggcccatgaccagggtgccgatgatggccgcgatgatggtggccaggaacacgccgccccacggcatacccgtctgcgacaggatctgcgggttgacgacgatgatgtaggccatcgcgaagaacgtggtcaggccggccagaatctcagtcgagacggtcgtgccgttttccttcaaatggaagaacttctccatttactctctacttccttggttttatgcggggctgcgcaccgcgcgcataatgctgcggctggccccggcgagaattgcgactcgccctgatcggcctgcccaacgcgcgtcaggcgctgcgcatccaatcagaaccgtggccgattatagcttgtggaggtaacgtgaacgggtccgggagtagactgactgccagaataattcggaacaactcagggacacgcagggcacacccgtggaaggaaggcgcgcgatgaaaccggccgtcgaagtcagcatcacctcttggaagaagaatgtcgtcaagcccggtcaggagtacggccgcgtactgctgatgcctggcaccggctacaactgcgaccgtccgctgctctactggtcggcccaggctctggtcgaggccggctggcgaatcgaccgcatgaacgtacgcaacgcttccgacgacctgtccacggtgattccggtcctcaatcaggcgattgacggctggatggccgccgcgcgcgagtccggcgcgggtaaagccggtgattccggggatggcgttgccgccgatgattctgctaccgtgctggccgatggcgcagctggctcgccgaaccgtgattccgacaccccgtccggccctcgcctgttgctgatcggcaagtcgctgacgacgatgacctacccacatgtggcctcacactacggtctgccgttcgtgctgctgaccccggtgctgcatcacgccgacttcgatccatccgcccgggtgattccggtgccggctgtcggcgatgatatcgtcgccgaatccgaggctccgagcgtggccgaagcaagggcgatcatccgcgcagaactggccgaccagtcgcacgccgccagctcccgatactccggcccggcaccgctgatctgcgccggcaccgccgacccgttctacgatcgagcccgcgccaacgcgctcaccccgcacgtgcacgaatacccggatgccaaccattcgatcgaggtgcccggccactggcgtcgctcgctcgactatctgaaggaagtcaccgcgtccgtagcccagtacgccgccacgttgtaatgccttgcgacacgcccgaattctgcaatgtcgctgaccatccgtaatctaatcatccgtaaaccacagaccgttggttgaagtgcgcgcgagtgcatttccgaagtttggttcgccaagccagcgcaggttgagagatataagcccgtcaagggccggcgaaggtcgcttcgcgagattatattgctctgcctgtgcgcagggcttttttgttgcccggccgaaagttccgaactccaagtcaacggccgacttaggaaggaacgccatgaagaggcccgaaaaggaagcggtagtcgctcagcttacggaagaattccgtaacgctgacgccgtctacctgaccgagtaccgcgggcttaccgttccgcagatttccgatctgcgtgaaaagctaggccgcgatacttcctacaccgtggcaaagaacacgctggcacgcatcgccgccaaggaagcgggcatcgagggtctcgacgagattctctccggcccgaccgccatcaccttcgtgaagggcgacttcatcgaggctgcgaaggtcatccgtgacttcgccaaggacaacaaggctcttgtcatcaagggtgccgccgctgacggcactgtctacgatgccgagggcgccaagaagctggcagacctcaagtcccgcccgcagctgcttgccgaattcgccggcgacatcaaggcatcgatggccaaggccgcgtacctgttcaacgccctgcctaccaaggctgtgcgtacgatcgacgccctgcgcgaaaagcaggagaaggctgcctgatttacgccctcacggcatgaatcagtcgcttcgataatttaaacaataaggtttattaggcagcggatctaccacttcgtccgccgccaagattgaaaggaagccataatggctaagtacaccaacgatgagctgctggaagccttcggcgagatgaccctggtcgagctctccgagttcgtgaaggccttcgaggagaagttcgacgtcgaggctgccgctccggttgccgctgttgccgctgttgctggcgctgctgctccggctgaggaagagaaggatgagttcgacgttatcctctccgccgtcggcgacaagaagatccaggtcatcaaggctgtccgcgccatcacctccctcggcctggccgaggccaaggctctcgtcgacggcgctccgaaggccgtcctcgagaaggccaagaaggaagatgccgagaaggccaaggctcagctggaagaggctggtgcctccgtcgagctcaagtgatttgtgcggcataagccgcaatcacagcttttcgaggaaccccgcacctgtgtttcaggctgcggggtttccgcatactgagtagactagttgacgagggcgaggcggagaacgcgatccggcgtggaatcacaaagctggcaatgagcgaaagttgtcaattctgtgcccagtaatccgccaaaagccggtaaaagatgacacaatggcacgtagtgtggtcaaatagtgtgtccaggaaggcggtcacggtgagcgagtggacggtgaagatcaacggtgtcgaccggatcagcgtcaagccgggggagtgcgtggaaatcggccgtaagccgttacgcccccttgccgatgatggcaacacccgccttgacgtcgccgatcagaccaaatcgatgtccaaacggcacgccatgttcacggtaaaaagcaatggtacggcttcggtccgcgatcttggatcgaccaatggatcgtatgtggtgcgggaaaatggtgatttgttgcgcttgccggccaatgtcgagttcctgttgccgacgtctcccatgcgcatgcagttcggtgatgtgcctgcggacttcattcgtatcgacgatccagtggcaaagccactcgaccttaaggtgcctgatttgtttggctatgcggttcacgaagcaccgcaggagccggacgcggcggatatgtctgtcgacgatattcttgatttgcgggccggcgagccgaccgccatcttcagcgcggataatgttcgacgcaaggtcgacgagcttgaacttggctcgctgaatatcacgcagccagtgacgaaaaacgatgagccggccataccccgtgacctgttcgcggatgcgttggcccagcatgccgagcaggagaccgaacgcaaaaaccagcaggccatggactccgtggtactgccgaagcagcagaccgaacctgagtcgacgactgtaacgcccgcatccaagcacagcaggatctccggtattgtcccggtagatgccatcgcccatgccgttgttaagcacgctcccagcacaagcgagccggcagtggcgtcggcggcggttgttgaatccgatgtggtggctggcgcaagcaagtcagccgaaaacgttcagtccgctccgaataccgacgattctcagccggtggacgctgttgcacagcattctgaaggcactcagtccgaagccgcccagtctgaaaacactcagtctgagaccgcccagccgacaaccacccagcctgaaaccgctcaaccggcaaccgacgcacccgaggaccagcagctggcgaccgaaaccgaaaccgcccagcagtcggtctccgaagcgtatgaagcgtctgatatctactccacgggcgtacacactccggtcttcgagcccggctcggtgttcgagcgtgtagccaagggcgagctgaaagcacaggagccggcagtcgaagtcgatggcctgacctctgacgaggcaaaaaccacgcaagatttcaacgttcagttcgaagtcgcccgtcatcccgaattactggcgttcctcgccatgaatccgtacctgtacgacgacatgtattcttggctcgccgcccgtggcgaggccgatattgacgaagccctgtctcacaacaagggctatcaggaataccgcgaagcggttggaaagtgagtcgagagatgacccagagccagactcagaaccagaatctcacggaaggtctgaatcgcatccgtcgctggcgtgaccaataccgcagcatgcagccgccatcgccgctcgaggatgtgaatcaactggccgcgaagctggagatgacccatgcccatccctccggcatcgcccagctgttcgcttccggccatgttcggttggattcgttgttccgtgacacgggtgtgcttaaggccgccgaacgccatatcgggcgcgtactggatgaccaggccgccaagcgcaggatttccggcgtggcggagttgtcgctcgtggtcggtgtggccacgtggaggggcaacgcgctgccggtgctgttgtacccggtgagcgtcacgatcgaggatgatggcttgtcgaccaccattcgattcaccggtcgcgtgaccctgaacgccgcgttcgtcaatgcattgcgtgagcagggggtgttcctggatgaggattccctgtttgacggtgccagctatgacagtggcactcccgaaacttccgcgatgttcgcccgtatttcgtccgaagcatcggagcgtatctccggcttcgccatcgagcgccagattgtgctcggatgcttcatggacccctcgtcgcagatgatcagcgaaagccgacagttcatcgaccagctggagaatggccccaccggcaatgtgctgttggacgcgcttgccggcgacaaatccgcccgcaccgcgctcaaagatgccaatattccgcaatacagtcctttcgacgtagacccgcatgctgagtacgaagtcggcgatgtggacaatacggtgcgatatgccgcgtcacttgctgccaatggccatagcatcgtggtcgacggcaccttcccgaagggcaccgcggagcaggctgtggccatcgcatcgcgctgcctgatgaatggtcgttccgtgctgtacgtgcccggcgtggccgagcagaagcgtctgttcatccagacggcctccgccaatgagatgaaggcgcaggtactggatgtatccgatgaacacgccaacgccgcgcttgataagcagctgattgccgcagtcggattccagcccggagtcgccacccagcgattcgaccagctggccgacgaactcgtgggcgtgcgctcgcgcttgacccgctatctgggcgacctgcacgggggcaacgataagtggaatgtgtccgcatacgagaccattcagaacctggcccgtatctccgtgctcccgacacaccccgccacccacgttcgacttgacgagtcaagtgccctgagcatcgccaacgatattgacacatggatcagcaagatggaacgtgccggcgagctcggcgaatacaccatcggcccggaagacaccgcatggtacaaggcgtccatcaccactgaagaacaagcggtaaccgcttaccagcgcgtggacgatttgctgcgtcgcttcctgcccgccacccgtgagcaggtggcacgcaccgtgcagacctgcggattcccggttcctcccaccactcgcgagtgggagcgtcaggttacggttttgaagaatctgcgacgagtgcttgacgtgttccagccagagattttcgagcgagacatcagctccatgatcgaggccaccaagccgaagagccagcgcaaggccgagggcacgtcgatgggattctgggagcgccgccgccacgtcaaggaagccaaggatctgctgcgcgtcggcgcgcaggtcgaggacttgcacgaagcgttgaaggtagtcgccaagcaaggggagcagtggcatcagttcgtgcctcacggcggttggccggtgctgcccagcaagctcgacgagatcatctccacccaagaggcgctggtcagcaatatgaccgcgctggataccgtgctttccaccacacccgctggtggcaatctggaaaccgccgatttcgagaaggtggaagcacgcctgaaagcactgctggatgatcgcaaggcactggacaccttgccggagcgttgcctgctggagcaggaattcgcttctgccggtctgaacgagttggtcgccgatctcaacgctcgccgggtgggcgtggagcaggtgcgtggcgaagtgcagctggcatggtggaccaccgtgttcgaggacattgtgcgttcttccgccatcatctccaaccaggatggtgctgcgctgcagaccgcatccgaccgcttcgcacaggtcgatgtggagcacgtgcgctccatcggaccgatggtgtcgcaggaatccatgcgccgcctgtgcgacatgctgttctcccgcactcaggaagccaaccagatgcacaccgtgctggcagggcgcgccagtgtgtcgctgagcaggattcgccgtgatcatccggagattctggccgcggccaagccgattctggtggcctcgccgggtacgctcgccgcacttaccgagccgggtgtgctggctgatgtggcgattctcgatgcgtgcgcgcacattcccgctatcgagttgctgtccatcatcggccgcgtgcagcaggtggtggtgatcgcccactgcgcgacggtaaccagcgaaagcgtcaagcagctgatcgacacgttgcctcatatcgaggtggatgctgccccgtctcgccgtgcgccgcgcctgtccgcattccttgaatccgagggatatggtcctgttcgctatgatgtggccaccgagccggctgccggtgaggtgcggttccaccgtgtggaagcgagcggtgtgccggttatgtcttctggcctggtggaatccagccagccggagattgatgaagtggtgcgtctgattacacaacgtgccgccggttttgctgtggttccttccagctatcgacttgtggtcgtgatgttgaccgacgcattccgcacacgcttgggtgccgaattgaagtcgttggcaggcaaatccaaggcgatgggccgattcctgcgccatgtgcggctggtttccttgcgtgacgtggccggaggtcgtgccactgacgtgattctgtcgatgtgctatgcgaaaaccacgcacggacgtctgcttcagcagttcggtccgctcgaaagcacaggcggtcgcggactgttgctggatgccctggcattggcggaccacagtttggatattgtgtcggcctttggttccgaagatttggatgaagaacgactgcaccagtccggtcctcggttcctgaagaccatgttgacgtgggccgaacagcttgacgaccgtccggtgcttccgttgcgtggtgcggcaggcggcaacgtgctgttcgacgatatcgccgacaggttgcgcgcgcgaggactgaacgctgctgttgattatggattcgacaagggcgtgaagattccgctcgtggtgggattgaaggacaagccgtttgccttggccgtgcagaccgatgacgcgaactttatgtccgtgcaatccacgcgcaggcgtcatcgtttgtcggcacaggatctcatttccttgggctggaatgtgatgaccgtctggagtgtcgccgccttcgtgaaccccgataaggaagtcgaccgtatcgtcagccgtatcggcgagatctaccgcgaggttgaataatcatggcggaatactcggctacacggcgcacaccgcgcaagcacaagcgcgtggtgatgaaaggcactgagcagtttgacgctgacggcgtcaaactcgagcccggagacatgcagaccgaccaacaacggcaatccgacgacgacaaacgcatcctcggcgaactgcctccacactgggctgttttcaacgagcgcgagtaggagttggggcgcactctgtgcgctctgatgttgtgttttccgcagccgtacggctgcggaaaacacaacatcggccgaaggccgattccgcttcctaccgcacaacggccataatcgctccggcctgttgcagctccataaccttggccgcggcctccggcggcattgcgaacgacaccagccggtcgttgcttcccaatgcgccagtcgtatccggtttgtcgacattcatcaccgtggcgttctcggccagcgtgcaatcggcaccttcgcaaccgacggcggaaaccagtctcacctgatcgccggccaatacatcgtcgacgctactggccaagcggacttcaatcaccgtagtgccggtcggtgctacgggcgcatctctggccatatgcgtggaaatgggatcggctgcttcgatatcgatttgcgccaccttgcccaccacatcctcaatattgcacgcccaagatgggcctatcgcagataccggcatatcagccaactgaacgtcggcggccagaataatgtcaccccgtcgaatcgagcgagcggccaccaccatcggctcggtctccaccacggccaatacggcttcaagcccaaacaacactgcgagtcccacgcacaacgcagcagtgagtcggcgcaaggcatccgccatgcgccgtcgccgcaatgaaccgcgcgcaggcggcttaataaacgaaaaggtcaccatgcaaccatggtgacctgaagtttttcgtaagcgcaagctgaatcgacctatgtggttctagcttgccaagttatccacaacgcttcaaacccgtgcaacagacagtgcccgtagtgccaatatccgcggcataccgccgtcgacaccgtcgtttacagaggaaaaacggggagccgaccttacttgccggatttgtcggtgcggtagaatccgtgacccttgaactcaatcggcacggcggaatacaccttgcgcacctgctcctgcgagcacttggggcacacggtaatcgggtcgtcattgaacgactgctgttcggtgaagtcatagccgcagttcttgcaacggtaatgataggtaggcaacggattcctccaacaaagtcatatttctcgcgcatggcgtgcaacaccatgccgtgcaaccgttcatatcctagtcgccgccctgacacattggcgttacggtcttactagccagcctgcttttgccactctggttccatcggccagtgtgcgtggctggttggtcagtctggcttgcgccgagtatcttggccggccggtcaactcagccggcccgattcgccaagccgccggtatccccccggcgtcagcactccgtcggccggcacatcatgtggttcggccggcaaatcggtgtccaacacctcccacggccagcacaccgcaatcagggggcacgcgggcttgcgtcgagccaaggcccggtcataccagccggctccacgccccagacgattgccttgcgggtccactgccaaagccggggcgatgaccagatcggccttctccaacgcttcgggcggtagaactgcgccagttggctcatcgggtctgtgatggacggtgctgggagagctgcagctaccggcattgttcgcgccacccactgcatccatcgagcgcaaggattccaatgaatccagcacactccagccaatttccaacccagatcccaatcgtggcaccaacacgtggcagccatgagccaacagccatcgcaacagtggccgggtttcgatttccgaacccatcgacacatatgccgccactgtggaaccatcctgaatcatgtgtgccgggaaccgtcgcaccagcaattcaccggccgctccacgttcttccgctggaatgcgcttgcgccgagacagtatatggtggcgcagcgtcgctttatccatcttttctgttttctccgtgccgctgtggtcgctgccgatattcatgccattgtccgcttcgctcataccgcacaatctagtgtttccaccgtaaaacgaaagtggccgaggcgaaggcgcaagcccttcatatggctacaataaaggccgtgtcagttttccagtcgattaaagaggcgttcaagctggaccaccagatccgtccgccgcgcctcacccatcccggtttcccgataatcctgcgccccctgaccatggacgatgaggacggctggaacgaagtgcgctggcgcaacaacgactggctggcgccttgggaatccggcgacccgatgcatggcggctccatcaccttcaatcaatgggtgcagcgacagcgccgtaatgagcagcatggcgtcggcgtgattttcgccatcgaataccagatgcgtatcgtcggccagatttcgttgggagccatcgcgtatggtgccatgcgcaccggtgtggtcggatattgggttgaccaacggtacgccggccacggatttgcgccgatggcactggccatgcttgccgattgggcactcggagacccattcgggcccgcgttgcatcggctggaaatcgccattcttccggataacgcgcgctctttggctgtagtgcgtaaggtcggagcccatcatgagggactgcgcgagcggtatatgtatgtcaatggccagtggcgcgaccacgtaacatttgcgctgttggctgaagatatggggcaagggttctctgccagactcgccgccaccggttccagataagcgtcgaccggaagaattccgctccgacacgcccggacggaaagccccagttcgtcggtacgtctcctatccttgactctatgggttatgagtcactgagcactgtcgtcgtgctggtgattgtggcgattattatcgttgtatggctgcccgtacgtacggccaacggcatgaaacgtgtggacgagcaccggcaggatcgttattcgccttccctgcatatcgttgatgcagagaacggcagacgattcggagacatcaagccgcataaggcgaaaggggcagcaatgccagcatcaacaccgtcagcgaggctgacacctgagcacatcgcccatgtgcgggaactgcgccgcgcggccatccgccgccggcagattctcgccgtatgcctgcttgccataaccgtgttggtgtttgccgcatcgttccccctgcatttcagcccgctgcttgctcttattccgttcgtgctgttactgctggtgctggtgctgggagccaatgcctcacgccaggcccggcaatgggagcgcaaggtggtccgctacgagcggactcatagcggtacgggctggtccaagaaaccgtctgccgagtccaaggacagcaagcgtgtgaacaaggccgaaccggttgcggccgtaactgcgcctgccaaggagctttccgagcatgttgaggatgctgccaccgaggtcatggaacagcggcagattcgccgcgcgttacgcgatgccgagattgagcaggccaaggccaaggcgttgcgtcagtccgccgccgcatatcaggccgcggcggagcacgccaaacagtctgagaagtctgatactgcacagtccgccgccgataagcctgccgccgaaccgtctgctatggtcgatgaatccgctgaccgtaagtccgctgccgaaaccagtgaatcttccgccgcgcccgatgcctccgctcgcacggataagtcgactaagtcggataagtccgtcgcccctcgagttgaaccatcgcttacggtgcgtgacgagcgtgatgagcgcgacgatgccgctgccgacgctacgtcggaactggccagcgtacgccctgcccgagcactggatgtcttcgatatggccacctcgcaggatctcatctccttcactttgggcggggaacataacgccgacaacgctccggaaagcttggagatcaagtcgacccgtcaggtgtccaaggcggaacctgtcgaacccgcagtggcggaaaagttgattgacgaggcccgagccgtcaaggccgcggacgatgccaaggccgccgatgcgggcaaggctgtcagtgccggaaacgctgtagacactgagtcggagcagcgcgatgatgccgatacgaacgccgctacggacgccgatgacgaggctgcaaacgccgcccagcgagccgcattccacgaatccgaggagcgtgccgacgtcgaagcgccagcggcgaccaccgattcgttgggcgcaggcctggactccattcttgcccgccgcggcaactgagcgttgcgattcgccgattttctctcacagcgttagcactcgagttggcagagtgctaataatcgcgctacgatgtgtcctagcgcaaagggacaacgcaagtgatcgtcagcctcttgaggcgttctggcgcggcattatcgaactacaagtagatacgaggtgacccacagtgtcgattaagctcacaccgttggaagacaagatcatcgtcaagcaggccgaggcccagacccagaccgcttccggtctgtatattccggacaacgccaaggagaagccgcagcagggtgaagtcctggccgttggcccgggccgtcgtgacgacaagggcgagcgcatcccgatggatgtcaaggtcggcgacaaggtgttgtactccaagtacggcggcaccgaagtccactacgagggtgaggactacctcatcgtcggcgcgcgcgacattctcgccatcctcggctgattagtcgcctagcgaacttcaacaaccccgactgttcccacgaacagtcggggttttctcttgtcaggcggaaaggggctcccctcagagaggggagccgaaaaccgctcccgccaaacgcccagccatgcctgctatgcataaaggtgcatgcgcgcagcgtagttgagttcggcgttgcaccgcatctacactgggtaacggattggggtccctatggaagaggctcagtcggcgacttggccgagcggcttaagacattttgcacaagacggcagtaggtcgacggtatgttgtttttttccgtgtcgcaggttcgtggtgtcgtcgctgtgccaatggttgtctctctaccgacgctgagtgccgtggcatgaggccagcgtcggcagtgggccacgaaatggcgatgtgccgatgctgagccgcgttggcgtcgttatagggccagtttttggaccattgccgacggcaaatcggcgttttgtgtcggcgacggtccaaaaactggcggtctgccgacgataagtgccgtcatcgtcggcagaccgccaggtattgtccctgtgccgacgtaaaaagccctgccatcgtcgtcaccgagccatcttgtgactcactgacggcggcagcagggcggaagaggccgaaatcatgcgcgcggtgcggtctcacacctcgaatccggcctccaccagcgcgtgatcgatgtcgcgaatcaaatcgtccgtatcctccagacccacggccagacggaagaagccgcggtggaactcaggcgggtacaggtactggcgctcgtcatcctcaccgaggaacacgatcagcgattagtcatggccgagcgagacggcagacgtaatcacattgagcttggaaacgaatcggttgtgcccgtcgtggtcggtgtcgaggccgaacgacagcacgccgccgaacccggagtccgggcgggccagctggctggccgccacctcgtggtgcaggtgcgattccagaccggggtacgccacgaaacgcaccacatccagcgattcgagatgcttggcaatcgccaaggccgaggcgtcgtaggacagcgcgtaggtgttcgccagcgtgatggggcgacggatcgcgccggtttcggcgtcgaccccgttgccgaggtgaatggccagcgtgccgaatccgagcggctggtcgtcgaatgattgtccgtgatgtacaagatcagaagccatgcgcccagcatgccggcatgcgctgtgccgccgcaagcaggcgacgccactcgaaaaccgcgccattgcaaggttctggaacaccatataagaaaaatgattggtagaagtgcggggtgcagccttggtcggggctgtttgcagggccgaagcggaccctgaaaccacgctgtgagacacgccgataaaaccgcagaattccgcggtaaaacaaggttcgcgtagaggtcgatttgcgtacttggaaaatatgtggttatatagccaagttgcctgttgaggtcaaacaccgcggcgggaaacagactggcggatttcccaagcggtcaaagggagctgactgtaaatcagccgcttcgtgcttcagtggttcgaatccactatccgccacgccccgatagctcagtggtagagcacttccttggtaaggaagaggtcgtgagtccaattctcactcggggctctctggcggggtagctcagctggctagagcgtacgactcataatcgtaaggtcaagagttcgagcctcttcctcgctacaaatcgcgcccgctaaccggtgggcgcgcactatacctaagaacacagaggtgaatgataatggctaagagcgccgacatccgtccgggcatcacgctggcctgcaccgagtgcaaggagcgtaactacattacgactaagaaccgtcgtaatacgcccgaccgtcttgagctcaagaagttctgcccgcgctgcggcaagcagaccgtgcaccgcgagactcgttgatcgcaagcatcacagctttacagaacccggcccattcggccgggtttttgcgtattgactccagagccgagtggtagggtgcggaatcagtatccgcatcgcgtgagaaacggcagaaatcccgcgtctgaacgaacccctcgcgggcgttctgccgtttcagccgatgattgccccgatatcgcacctgcgccactaagataggaagtcatgacaagctttgcagacatcaccaccatgggcgtgggcggccccatcgcccatttcatcgagccgaccacgcgcgtggggctcatcgaagccgtggaggatgccgattccaaaggcctgcccttggtcgttatcggtggcggctccaacctgcttgtttccgataagccttttgacggcgtggtggttcgagacgcccgacgcctcatcactgtgccggacgaggctgcaccggtagagggcgaggatcgcaccgtgcatgtcaatgccgaggccggtgccaattgggatgatttcgtggccttcaccgtagagctcgggctcgagggcgtcgagggactgtccggcattcccggcacagtcggcgcctccgtggtgcagaacatcggtgcctacggacaggaagtcgccacttcggtcgaatcggtggaagtctgggatcgagacaccaaaacaacgcgcgacctcacacccgccgatcttcgattcggctatcgatactccgcactgaaggccagcatgtacgccggtcccggccagccggccgaccgattcttcccgacgccacgttacgtggtgctctccgtcacctttgccctgacccactcggccgaaggcacggtaggttacggacagcttgccaaagcgcttggcgtcgaagtgggcgaccgtatggccaccgccgacatccgcaaagccgtgctcgcagtacgtgccgccaagggcatgcttgaggatcccactcgctacgccttgcccgacatggccaccgccaagcgcgaggccaatatcctgaccgatctggagcgtctggcctccctcaatgaggccgccggcgttcccgttggcgatgacggcctgcctgctcccgactacaatcgccacagctgcggctcgttctttatgaatccgattctgaccgccggccaagcggcggccctgcccgaagatgcgccgaagttcgacgcgactctgcctgacggcactcccggcaccaagacgtccgccgcctggctcatcgaccatgccggctgccataagggatataaggtcgatgcgtacgcgccggccagtctatccacgcagcacacgctggccttgaccaatcgtgggggagcgagcgcagccgatatcgcagctttggcgcgcgcggttcagcaggcggtcaagagcgcgttcggagtggacttggtgcccgaaccggtctgcgtcggcgtgctgtaatcgcgctattgatcgatggagtggggtattaatcccatatattgcgggctctaagtcttattaatagacaagacacgcgggctcttctatactcgattgtcggtattgtgcgcattcggtgcgcaaacaacagagaaaaagaagagcactatgcaactgttccgtacgaaatccgtcgaacagaccattgccgaaacgggtgaagagggccgcaagctcaagcgcaacctgacttggtgggatctgtcaatcatgggcgtggccgtagccgtgggcgccggcatcttctcggtgggcgcgcaggccgccgccttccacgccggcccggccgtgatcatcagcttcctgatcgccggcatcgtgtgcggcgcagccgtgatgtgctacgccgaattcgcttcgatgattccggtggccggctccgcctacaccttcacctacaccacggtcggcgagatcatggcctggatcatcggctgggatctgattctggaaatgctgatggccggctccgtgatttccaaatattggggcgtatacctcaacgatttcatgcgcctgatgggctggaacgccaacaccaacctggcgttcggctccttccatatcgatatcgccccgatcatcatcgtggcgttctttaccacgctgctcgtattcggcaccaagatcggcgcccgcgtggacggtgctatgaccgtgctcaagatcgccatcgtgttctttgtggtgatcgtcggcttcttctacgtcaaggcctccaacttcaccccgttcattccaccgagccagccggcctccaccgtggaaggttcctccgccgtcaccggcgtgatgacccagccgctgtggcagttcgccaccggcatgaccccatccgtgtacggcgttcccggcatcctttcgggcgcggcgctcgtgttcttcgcgttcatcggcttcgacgtggtggccaccgcctccgaggagaccaagaacccgcacaagaacgtgccgctcggcatcggcgtgggcatgctgctcatcatcgtcatgtacatgctcgtggccgtggtgaccaccggcatggtctcctatgccgatctcgccaagcaagacagcccctcgctggccaccgccttcgaactggtgggtgccgactgggccgccaagatcatcagcttcggcatcgtgctgggcctggccaccgtggtcatggtgctgttgctcggcctgacccgtatcgtcttcgccatgagccgcgatggtctgctgccgcgcggcctgtccaagaccggcaagcatggcaccccggccgctctgcagatcgtcgtcggcgcggtggtggcgctcgtggccgccttcttcgacatcggcgtgctctccgacatggtcaacatcggcaccctgtccgccttcacgctggtggccatctccatcccgattatgcgcaagaagcgccccgacctgccgcgcgccttcaagatgcccggcgacccgtggattccgatcctcatcgccgtggccaacttctggttgatgctcaacctgtccgtgctcacctggattcgtttcgtggtgtggctcgtggtcggcgtcgccatctacttcggctacggctactggcatgcgcgcctcggcaagggcgacctgaccgaaacgctgtccgccgaaaccgataaggccgttaacggctgagagcgaggagcgtcccaacgggcgcgtacccttgtatcagtatctgttaaggaggattccatgccatatgtgatcgctcagccttgcgtggatgtcaaggacaaggcttgcgtggacgagtgccccgtcgactgcatttacgagggttcccgctcgctgtacatcaaccccaacgagtgcgtcgattgcggtgcatgcgaaccggtgtgccccaccgaggccatcttctatgaggatgatctgccggacgagtgggcttggtacaaggatgccgctgtcaacttcttcgctgaagtcggcgatttgggcggcgcttccgccaatggcccaatcggcaaagacccggaacaggtcgccgcgctgccgccgcagaaccagtaagctgatttgcggataagcgctgcacacagcgcatagttcggattgaaccctcggtctatcacggccgagggttcgtcgtatcttaggaacataccgtccaagaaaggggttctcatgggcttccacgcatattcgtcgccatacgactggtctcgtatcgccggcttcaaagccaccgccaaaaccgtgccgggtggcatgatcgacctgtccgtaggctcgcccgtggacccggtgccgagcagtgtccagcaggcgctggttgccggcgcagacgcccccaacgcccatggatacccggtcaccgccggcagcgccgaccttaaggccgctatcgatacatggttccgcgaactgcgcggtgtggatctgaagtccatcaacgctgccgccgtacccaccgtgggttccaaggaggccgtggcgctgatggccagcctgctgcaccttggcgaaggcgatgtggtcgtccaaccggctgtctcctacccgacttacgaaatcggtacccaacttgccggcgccaccgtggtcaaagtcgatgatgtgaccgacgtcgattcctgggtgaatattccgaacgtcaaggccatctggatcaactcgccgtgtaatccctccggcgaggtcatctccgctgactggctgaccgacatcgtggctgctgcccgtcgcatcggtgccgtggtgctctccgacgaatgctatgcgttgatggactggcgttcggtgcgccgcaatacagccgcgtcctctgcgcctgccgcgtctgcatctgctgcgtctgtgcctgccgcaccggtggccgaatccaacgagcccgcctccgataccgcattcagtctctccgccacgccatgtgccctgaattcacatgtgtgtgaaggttcggcagctggcatcctggtgctctactcgctgtccaagcagtccaacatggccggctaccgtacggctctgattgccggcgattaccggctggtcaaggaaatggccgaataccgcaagcagatcggccagattatccccggcccggtgcaggccgccatggccgcaggcctgaaggacacagccgctgtgcacgagcaatgggggcgttaccgtcgccgcctatccgcgctggttgacgcactgaaggcatatggttattcggcacaaatgccctccggcgcgctgtacgtatgggtcaaggccaagtccggcgactgctgggccgatatggccgagctcgccaagatcggcatcatccccagccccggcgaattctacggcgctcccgcctacctgcgtttctccgccaccgccaccgacgaggccatccgttccgcctgcgaacgtctgcaatcggcccgcgcctgacgacaccgactaccgccggggcgccgccgtggtattgcggatggccaggaacgtgcgcgcggtctcgaacggctcgcccaggtcaatgccgaacgtcgcggaatcaatcagcgacagcgccttttccgctgccttgcgccccagggcctgcggatcctgatgaatggtggtcagcccgaactcggccgcatagtcgctgtcgtcgaatccgatcagggacatgtcgttcggcacgccgatcccggctttgggcagcttgtacagcaggggcagcgccgtcccgtcgctcaggcagcatagggccgtgggcggctggtccatgacggtgatgcgcgcgatcgcctcgtccacggtgaagtcgttgcggggcagggctatggtcaactgttcgatatcctcatacgccgcacaggccgattcgaatctctgcaggcgcgagtccgcactgtattccatcggcgcctccgagacgtcggtgcagatgtaggcgatacgccggtgccccagggcatgcaggtgattgatggccatgcgcatgctcttggcgttgtctatggacacggtggcgttgaacccctcgttgtgcggcacgttgacgccgatcagcggcacgcccatgccctgcaggttggagatctcctccatggttacgttgaacgaggccacgatcaccgcgtcgacattgcggcgcaggggcagctcgtcgaagaacgacatgcgctgttcggtgtccgcaatgccgtagagggacacgtcgtagccatgggtctgcagcacctcggtcagccccttgtacagattggagtcgaaccaggtggcgatcgcctcgccggtgagcatagcgatacggaacgtgtgtttcgatttcagcgcggtggcggaccgggagatggcgaagtcgagttcgttggccgcttcgatcactttcttgcgcgtggcctcggtgacgatatccggtttggcgaatgttcgtgacaccgtggccacggacaccccggccctgacggctacgtcgtagatcgtggaatgtatcacgcgcgaaccttcctcatgggtgctcgataatggccacaatcataccatgacggaatgtaaccgtttacagaaatcctgtaattatgccgtttgatatcaataaatatgggtgttaacgtatacatcacgacagtcgcggagtagcgaagtcgtgaagtgtaaatgaaaggagaagcagcagatgaagtccgcatcgtcttggaccgagcgctggtcgtcctccgggcatgatcgacgcccgaaccgtatggcggcaaagacccgcagcatatcccgcgccatcgccgccgtctgtgccggcgccgcatgcgtggccgcactcgccggttgtggcacatccaccgccggaaacgtcactctcgaattcttccagtacaaggtagaggcagtcagccagttcaagaagctggtcaagggattcgaggcggaacaccccaacatcaccatcgacatcatcaacaccgccgatgccgccaccgatctgcgcacgcgcttcgtcaagaacaaggtgccggatgtcctcaccgtggacggcggccgttacttcggcgaattcgccgcctcgggaatcttccaggacttcaccgacgacgagatcctcgacaacatcaacccgcagatggtcaagctgctcaaggatctggccaaactgtacgacaccagcgccgaccgcgcgtacggcatcccgttcgccggcaacgccaacggctacgtcgtcaacgtggacctgtggcgtcaggctgggctggacccggacaacctgcccgaaacttggtccgagttcatcgccgcgatgaagcagatccagcaggccggcatcacgccgatcgaaggcagcctcgccgaaccgtggaccactcaggcgccgttcgcctccctggccggcacacttgtgccgatcagcgaatactcgaagctcagcggcggcaccgccacattcgccgacctgtggggtcccgtggcggaaaaggaagtcgagttctaccagtacacgcaggacaatccgggcgttacttaccagcaggccacccaggacttcgccaacggcaaggcggccatcttgcccctgggcacctacgtcgtgccgcaggtgcgcatggtcaacccggacatcaacgtgaagttcgcccagctgcccgccaccgacgatccggacgagcaggtgctcaccgccggcgacgacaccgtgctcaccatttcggccaccaccaagcatcccaaggaatcgcgcatgttcgtggaattcttgatggacgaggaccggctcaaggaatacgccgaatcgcagttctgcttcaccccgttcaaggacacctacgccggcgacgaggctctgcagaacatcctccacttctacaaggagggacgcatcgctgatttcgccgaccactacatcccctcgtccatgaccatggccggcagcctgcaaagcctgctgaccaccggcaacgttgaggcgttcaccaattcaatgcagacgcagtgggatcagatccaagccaggaccgtacagtaaggaggttcaccatgtccgccattgccgaaaaaccacgcaagaagcgtgtctccgctttctcccatcgcaaggtcgatcccgcatactactggatgaccgttccggccatgatcctgttcatggtgttcctgtactggccgttcctgcgcggcgtgatgtactccttcaccaattccaagggctacggcaaatacaaatggatcggcctgaccaactacaaggccatgttccaggatgagcgcattgggcgcgcctacctgttcacgttcttcatcgccatcgtggtgacgattctggtgaacctgctgtccatgttcatcgccgtgctgctcaactccaagatcgcgttccgcaacgggttccgcgccatctacttcatcccctacaccctggccgtgcttgtggtcggctacgtgttcaagtacatcttcatgatgccgatccccgaactcggcaaggcgttgggcatagggtggctgtccgaatcgatgatcacctccgaatcgctggcatgggcgccgatcgtggtgctctccgtatggcagggcgtggcctacaccacactgatctacctcgccggcctgcagaccatcgacaccgacatctacgaggccgccgcccttgacggcgtcaacgcctggcagaagttctggcagatcaccttcccgctgatcggaccgttcttcaccatcaacctcgtcctgacgatgaagggcgccttaggcaccttcgaccaggtggtcgccctgaccggtggcggtccgaactccgctacggaaacggtcacctacctcatctaccagggcggcctgaccggtggcgaatacgcctaccagaccgccaatgcggtgatgttcttcatcgtcctcgcgatcatcgcgttcattcagctcaagttcttcggtagcaaggagaaggtgtgatcatgaccagcgctgttgctgcacaacccaagaaaaacaagttccgcaaggaccataagatcaactggtggctgaccgcggtggtcgcggtgctgagcctgaccattctggtgccgctctacttcaccatcgtcaccgcactgaaaaccccggccgaagccggcacgttcgccctgcccaccagctggcagtggggcaacttcgccgaggcctcgaacatggtgaactatccgcgcgcggccctgaactcggcgatcatcactgtgggcgccatcgtgctcaccctgctgaccaacacgttcgtggcctatgcggtggcccgtaacatggacaagcggttcttccgcttcctgtactacttcttcatcgcagccatgttcgtgccgttctccgtgatcatgctgccgctggccaagcagatgggcgggtggaacctcgacaacaagttcggcctgatcatcctgtatatgatcttcggcctgggcaccaacctgttcatcgccatcggcttcatccgttcgattccggtgtcgctggaagaggcggcccgcattgacggcgcgtccacctggcgcatcttctggaccatcatcttcccgctgatgggcccgatcaacgccaccatcgcgatcctgaccgcgctgtgggcgtggaacgacttcctcctgccgttgatcctgctgtccaattccgcggatcagacgatcccgctggcgcagttcgtgttcagctcgcagttcaccgccaactatccggtggcgtttgccagctacctgatggccatggccccgatcctcatcgtctacatcttcgcccagaagtgggtgatcagcggcgtgatgcgaggcgcgaacaagtaagccgtctcatcccgtcatcagtctgtggaatcctggagggttcttgccgccctccgggattcccgtcacattcgttagaaaggttgcaatcatgactactgcgcagcgtgtcgtgcttcccgattccgttcgaaccaatggcaccacgccgaatccgtggtggtcgaatgctgtggtctatcaggtctatccgcgttcgttccaggattcgaacggggacggtatcggcgatctgaagggtatcacctcgcgtttggattatctggccgatcttggcgtggacgtgctatggctgtcgccggtgtacaggtcgccgcaggacgacaatggctacgatatttccgactatcaggacattgaccccctgttcggcacgctcgaggatatggacgagctgctggccgaggcacacaagcgggggctcaagatcgtgatggatctggtggtcaaccatacttcggacgagcatgcgtggttcgaggcgtccaaagacaagtccgatcctcatgcggattggtactggtggcgtccggcccgcccgggaaccaccccgggtgagccgggggccgagccgaaccggtggggttcctatttcggcggttcggcgtgggagtattgcccggaacgcggcaagtactatctgcatcagttctcgaagaagcagccggatttgaattgggagaatcctgcggtgcgtcgtgcggtgtacgacatgatgaactggtggctcgaccggggcgtggacggcttccgcatggacgtcatcaccctcatttccaagcgtatcgattcggccggccgtctgcccggcgaatacggttccgaacttgaggacctgcccgtgggggaggagggctactccaacccgaacccgttctgtgcggacggccctcgtcaggatgaattcctggccgaaatgcgtcgcgaggtgttcgccgggcgcgagggcttcctgaccgtgggcgaggcccccggcatcaccgcccagcgcaacgagcacatcaccaatcccgccaacggcgaactggacatgctcttcctgttcgaacacgtggacttcgactgcgaagacaacgtcaaatggaagccgctgccgctcgacctgccccagctcaagcgtattttcgccaagcagcagtcggccgtcaagaatgccggctgggcgagcctgttcaccggcaaccatgatcagccgcgcgtggtctcccgttggggagacgactccaccgagggcagccgcgtacgttccgccaaggcgttgggtctgatgctgcacatgcatcgcggcaccccctacgtctatcagggcgaggagctgggcatgaccgacgtccacttcacccggctggaccagtaccgcgatctggaatccctcaatgcctaccatcagcgggtcgaggaagccaaagtgcagtccgcggaatcgatgatggccggcatcgccgcccgcggccgtgacaacgcgcgtacgccaatgcagtgggatggttccgcctatgcggggttcaccgcgccggacgccgccgtggagccgtggatttcggtgaaccggaatcatacccagatcaatgcggcgggcgaattcgacgatccagactccgtgtacacgttctacaagcggctgatcgccattcgccacgagaatgcgttggtggccgccggcgactggcaactgatcgatgcggacgaccagtacgtctacgcattcactcgcacgctcggcggcgagaagctgctggtggcggtcaacctgtccggacgaacggtcgatctgccgcgcgacgccgccgaactggtgcagcacggggtgaccgaaccggatatcgtgatttccacctacgacgcctcgcacgccgtggtctccctcgccaaccgtgagcttggcccctgggagggcgcggccgtccgcgtgtgagctagcgtatgttgttccagacttttttcgtccttgtctggggaaacgtacgcttacttcagctcggtgtatgttgttccggactgttttcgttcttgtctgaggtgccgtacgtttgcttcgtctcggcgtacgttgttccagatgatggggaaattggtctggggaaacgtacgccaagaggctggtgcctgcttggtgcctgcccggtgtttgttaatgtccaacgtggaaagcccgcgcggctggcgggaagccacgccgcagggccgtcacgccccaaactgggcggccttgctgccaaatttgcggcgcacagcgtccagtgcggcctcggcatcatgcaaacgcgcctgtgaggtctggccgcgggcattgtcggcctcttcgagcatgtcatccagtgaaggctgcacggccgtagccgccgccttactgagcgaagacgtgctcatgccggccaagcgaatagttttgggcaggggagtggcagactccgccgaggccggtagccccagcatgactttcagctgccgcacgcattccgggtacagcacgccggccgtatcggtcggccgctccatcgtaaaagaccgggtctgatagctcaggtcggcgaaccgcaacttcaccgtcagcgtgcgcgccaccagccccttgcgccgcagtgtgctggctacttcgtcgcaggccgaacgcagtagcccacacaccacgcgcatatcgcgtgtatcctcggccagggtttcctcggacccaatggatttctcctcgcgcaccgtggtaatttcgcgggaatccaacccgtgcgaggccgcccataatccacgtgccgcagccggggagccagtggcacgagtcaatgcagcctcatccagctgagccaattcagccaccgaatgcacgccccaagcattaagccgcttctccaaagacggcccgatgcccggaatgccacgcaatggcatcatctgcacgaactcagccgagcaggccgccggaatcagcagcatgccgtccggcttggcattggtcgaggccattttggccaccagtttgttacaggcgatacccactgaacacgtcacgtggaagcgctcggccacctgagcgcgaatccacgcgccgatcgcgctcggccgcccccactccagcagtgcggcggacacatccatatagccctcgtccaccgaaacctgctcgaaccggtcggtgacggtcaaaaacacctcatgcatgattcggtgcgacatcatgcggtaatacgccatatccactggcagaaaaatgccgttcggacacaactgatgggcgcgcgcggccggcatcgccgaattgatgccgtatctccgggcttcgtagctcgcggcggacaccaccgcgcgcggcccggtgccgatgatcaccggcttgcctttgaacccggggttgcgcgccacctccaatgaggcatagaaggcatccatgtcgatatgcagcacggtgcatccggtctcgtcgtgaccccaatcgcgtttggcggcctcaagtctcggtgcggtgctcatgccaccattgtaggaatgccgaacgaggtcatgctcactatgtggcgcgcatggcgcggcgctcattgtcgtaatgccgaatatcgccggaattccaagggtttgcgcactgtgcggctgtttcgcatggtgggtgcgattccacggaatcgtccacattgcgtcactgtccgtaacgccttccaagtcgctgcgcgctgtcccgactctccgagtagcgtaaacctcgtgaagaaggcagtggtcggtatcctcaaccgtgttcccgtggtgcttatcgtgattggtgaggcactggtgatttatttggctacggccgtcgccaaacttgcgttcacccagctcgacccgctgtattcggtgtggtaccgcgtgggattcatggcggtgctgttgctgctgtggtgcaggccctggagcaaggctaagcgagcgcagctgtttcaccgcgatgcccgcggctgggggctggtcgtactgctcggctgctcgctggtgctgatgaataccctgttttatgtggccatcagcaatatggatatgggcattgccgtgtctatcgaatttttgggaccgctttcggtggcggtgattaccggcaaaagctggcgtgagcgggtcggtatcggcatcgcggcggtcggtgtggtgctgttggccggcatatcattggccaatccgtccggcaagggcacgtttttgtatggtctgattgcgattttgatcggcgggtcgatgtggggcatgtacatcatcaccggccggcgcgtggcggctggcggcaattcgctggataatctgtgcatcgccgtgaccatcggctggctggtccagtccctgttccttggcgtgccggctgtggctcatgtggttcaccccaaggccgatgccacgtgggcgcttgagcccggcggctcgctgaagctgctggctctgctgtttgtgatttccctgatggcctcgttcattccctatgtggtggagcagatcacgctgcgacgcaccacatccggcgcattttcggtaatgcaatccatcaatcccgccatggcggtggccgtgggactggcgtttggcgagattcccggcgttggtgaaatcatcggtgtggcgttggtgatttgcgcggttatcgttacgttctccggcgatgccgcgcccgcggacggtcaataatgtgtcgttcggcacgtcgtatccgcaggacgtggtacagtgatttgctgttgcgcattattgcgtaacgtggagtcatgcctgagtggccgataggggcaccctgctaaggtgttagtcgtgtaaacggctcgagggttcgaatccctctgactccgccgattaaggttccgggtgaaagcttggaatcttttttgttttccggaaactcctgatgatgggcctgttcgcacttcgcggagtcagagggattcgaaccccgggaatacggttctggtgggttgtccggatatctgttttgcgacgcattcctgggaatgtgtttctagtgggttgcttgggggtctgttttgcgaaactttcctgggaatgtgtcgctagaaataaccgaaataaccgaaataaccgaggacggtcggtctccgcttgtggtaagcggagtcggaggtacgccattgtccgtccgcctccaaaccgccattttagcgggtgaacgagtgcggcacctcggggaaaggctaacaaacgaaagaagaatgtccactaagtgagacttttgcgtggtgttcgtgaatggtgattgaagattaaccggtttatgtcgcttgtccaatcgcttgcccatcgccttcctccccgcagtgtttgactgagatgggcggtatcctagagagagaagaagagttccgaagggtgggcaaagatgagccatatcgctgggcaggggcaacatcgctccaactcgacacgaaccaaccgtgcggcgctgattatcgtgttcgtgatcacgctcgccgttacgctgggcatcggcgcatggttcgcaacccatcgcacggacggcaatggccccgcacgcgccggagtgtcggacgtcgcgttgaataaagcgaagaacacgcccaaaccggtgaccgaacatcacggcaattcaccggattgcccggatacggactgcatcgccatgctggtcaacggcgatttgttgttccatgagggattgtggagccatttccaaggcccgaaccccaacgccacggatggcaccgccttcaacttcgacccgctgttcgcgccgatgaagcagtacattcaggcttcggacatcgccgtgtgcgaattcgaaaccccgatcgcccagcgcggcggcccatatgccgcgtacccgatcttcaacattccgccggaagtggcggatgccgcccgcaacgtgggatacaacgcctgcacacacgccaccaaccattcctgggatcagggggcggatggcatcgcccgtctgtgggacacgcttgaggccgatggcatcgcccagaccggctcgtacaaaaccgaagccgactccaccaaaccgttagtcatcgattccccgaccggcggcggcaagctgggtctggtcaccggcacggtctccctcaacggcatgaccgccgacgaggactggcaggtggatcgtctgcgcgaagacggcgacccgaatcacggcagcgacatccagcgcgcggtagacaaggccaacaaggcccgcgagcaaggtgccgatgtggtggccatcgccatgcactcggtgcaggaataccttgattacgccgattcctggcagatttcggaagcccatgagcttgccgacactggtgccttcgacgttatctacggtgccggctgccattgtgcgcagcccatcgagaactataacggcacgtggattgtctacggtctgggcaacaccgtcaccgagtcggcgaacacgccggaaaccttggtcaacaaccagggtgtgaccgcacgcatccagttcgccggcaagaagggcgtcaaggggtcgtggcgcgtcaaccgcatcgactgggtgcccaccgccaacgtgcatcaaggcaactaccaatggtgcccgatatccagcgaccatcccataggcacatgttgggacgaagcctacgacgctcagatacgccaacgcatctgggatgtcatctattcgatgggcgcggaccagaacgtcgtcaaggaatggaacatcacgcaggagcaggcggcaaagcaatagttgctcggcttggtctcaaggaggggaagccgcaaggtgacgcttttcccgtcggcctcctaatgtggagcccatgaccgagatttacgaaacccaaagcgaacgcaccgatctgcccctcgtcgtgatgccgtccgtgctcgacgcgatgatcgagcccatcaaggcccagttccccgcgctccacgacgttgcccgcgtgcgtatgttcgaggaattcacgtccgacgaggcgaccatagccgagcgtctgaaggatgccgacgccctgctggtgggtggctaccacatttcggatgatctgctgcacgccatcagcgagcaggggcacgtcaagtgcatcgtgttctgcggtaccggcgtcgccagctacatcaatctcgataaggcgcgcgagctgaagatccgcgtctgcaacgccgaacattatggcgatcacgccgtggccgagcacaccttcgccctcctgttcgagctcatccgccgcgttggccaactcgataaggatgtcaaggccggcaactgggcgtgggccggcggcgatggactgcaactcgccggccgtcgcatgggcatcatcggactgggcggcatcggcgccaccgtggccggcatcgcccgcgccttcggcatggaggtcgccgcatggaattcgcatgtgccgcccgagcatttcgaacgctccggcgccactccggtcgacgatctcaacgagctcatcgaaaccagcgacgtcatctccgtccatctgccgctcaacaacgccacgcgcggcatcgtcaccgccgagaaccttgcgcatgtgaagcccggcaccctgttcatcaacaccgcccgctccgaagtcatcgaatccggtgcgctgcttgcccgactgcaaaagggcgatgttcccgccgcactcgacgtgttcgaccacgagccgctgaccgccgacgacgccatctgccatgtgcccggcatcgtcctgaccccgcacgtcggctggcgtaccgacggcgcgttcaaggagctcacccgccagatgatcgcctgcctgaccgcctacttcgccggcgaggactataacgtcgtcgtctccgaacactgatagtcctgtctagcctcgcgctcaatcgaacacccagtcagccgaccaccggaacacgcttatgcagacgattctcaacacgtccgacgatcccgcccacgattcgctcgtcgaaaaaaagtccgaattcatcggcgacgctgcccatgtcgatacgctcgacgaggcgctcgcgttcgtggccgcgatccgcgagcagcatccgaaagcccgacacgtggcgtatgccgccgtgtgcggaggcgcggatgggcgactgtccgaacgcatgagcgatgacggcgagccgtccggtaccgccggcaagccgattctcgacgtactcaagcagtccggcaccaccgattgcgtggttgccgtcaccagatatttcggtggtattctgctgggctccggtggtctggtccgcgcgtactcatccgccgcatcattggcgatgaaagccgcccgcgccgcccgcatcatgaccgccaagcgataccgggtccgtctcgaatacccgcagctggcacgattccagcagattctggcgcagctcggtggcagtcaggaggatgaatcgtatgcggtgaacgtcgagttgaccgcggtggtgccgcaggatgattgcgcgcgattcgaggagtgtgtgcgggaagcgttcaatgccgcggtggtgccggatccgattgacgtggtcaacattccggttccgctcgcgtgacgcctgtatgactaagctgggcatcatgaccgacgagaacaccaccagccagcggacccagcccaccgaggccgcaaccgagactgcaaccgacacgggcgcccagcagcgggaccaaggcgcgcaggacgcagccgagtccgccgctccggtggatttcgaaccgctgaccgctacatacgagcgtctgcgtcattccaccgacccggccgaactgtccgaattcgcccgtcggccgttgcctgaccgtgccgatcaggcggcgttctcccgcgccaccgcacttttggaggctgtggccggcaacccgcacaccccggtggccgatcgcgtgttcctcgccgacaccatgccgttcccgaacgtattggtcaaactctccgaagaccccgaaccgtccgtgcgtcaagccgtggccgccaacggggatgacaagaattggctggtcggccgcctgaccaaggacccggtgcctgcggtccgggatacggcgttgaaaaacaagcgcaccagctggaagatgcggcttgagggcgcgcaggaccccactgcggatgcggagacattggatttcttgggcgtacttggcaccgaatccgaagagggagcaccggcggtgctttcctcgatggtccgccgtgccgtggcgctgaaccccaatacgtccgaagcgatgcttgccaaattggccaacgacccctcggccgaggtgcggcacgccgtggaaagccgccgctaagcacactattgctgtgttttgccgtgcaaatttggccggcaatcaccctctatccaccattgtgagcgctcacatctcactatgtgagggtaaaaagtacataatttggcggaatcacggcattttgcttacggtgtggcgcaatcaaacggcgttagactggggctatgagtgagattaccgagagtgaagagcgtctggcccgtccgttgattcgactggccaagttggtcggtgtcggcacgagttatgtgggcatgagccatgactaccacgagatagacgatgacgtcctgatcgaggtgctggcagcgctgggcatcgacgcctccagcgagaacgcccaactcatcgccatccgacgcattctgaacgagcgttactcccgattggtggcacccaccgtgctgcatatcgccggtagcgaggaccgggtgctggtgaacaccggcattctggacgtgccttcggcgagcatcacgctggagaacggcgagccatatcagggcaccgttgaagttggtcctggagatggatcccaggcctacgacttggatggcacgttcatttcgaatgcgactgtggtcattcccgccgatctgccgattggctaccatacgctgcacgtcaaggtcgccgaccgtgtgcaagacgccactttgatcagtgcacctgatcgcgtcgatctgcttgacccgatgaagggcggcagtctgtggggctggatggcccagctgtactcgattcgctcctccaactcctggggcgtgggcgattacgaggatctgaagaccatgctggtggacgccaagcagaagaccggtgccgacttcgtgctcatcaatccggtacatgccgccgagccggtgtccccgctcaccccgtcgccgtatctgccggtaagccgtcgcctgatcaacttcacgtacatccgccccgaggcgatcgccgaatatgccacgctcagcgcgggcgacaagaacgccgtcgacggactgcatgccgacaccgaaccgctgaacggtgattcccagctcatcgaccgtgacgccatgtggcgcagcaagatgcacgccctgtggattatcttcaaggccggccgtaccgccgaacgccaaagcgcgttcgaccaattcaaggcggactgcggttccgacttggaggcgtatgccacgtggtgcctgtgctacgacaagtggggagcacccaacggcgaggagagcaactgggagcgcaagttcaaccgcaactccccggaaatcgccaatctgcgcaagcagtacccggacaccttggacttctaccgctggctggaatggattgccgccgagcagctgtcctccgcccagcaggcagccaaggacgccggcatgcatatcggcatcatgtccgatatggccgtcggcgtgcacccctccggcgctgacgtgtggtggaatcccgagcgcttcgccaagggagccacggtcggtgcaccgccggacatgttcaaccagcaaggccagaactggagccagccgccgctgagcccgatcaatctggaggccaccggctacgagacctaccgcaatatggtgcatggcatgttcgcccgtgccggtgcggtgcgcatcgaccacattctcggcctgttccgcctgtggtggattcccgagaaccggtcggctatggatggcgcttatgtgtactacgactcagacatcatgctgggcgttctggccatcgaggcctctcgcgccggcggcgtggtcgtaggtgaggacctcggcgtggtgccggaccatgtggccgattccctgtcgagccacggtattctcggttgcgccgttgaatggttcgagcagtgcgacggcgtgttccgcgccccctcccagtggcgtccgtacgcattggcctccgtgaatacgcacgatttgccgccgaccgccggttacctggaatacgagcacgtcaagattcgtgagcgtctgggcttgctgaccggcccggctgaggaattcgaagcctccgcaaaggccgagcaggatgcgatgctggtcatgctggtcgagcagggctatcttgatgccgacttcgccgaacatcgtgaggatcacgaggcggatatcatcgacgcgctgtaccgcgcactgaagggttcgccgtgcaagctgctcgccgcctcgatcaccgacgcggtgggggagaagcgcgcgcagaaccagccgggcaccaacaacgaatacccgaactggcgcatcccgctggccgacgccaagggcaacgtggtaccgctcgaaaccctcttcgacacccccggcgtccaacgcttcgcccaaatcttcaattcctgacccactttacctccctctgacgagccgagtcgttaagcggacagtccagtggactgtccgtagacgaggcctgaacgaagcgatagctgagagaaggcagggaattgcctcaccgtaggcgagtcggttagccgaagtgggtgggagagaaaccataaataggggaagagaagccataaacccaatggagtgtccccagttgccctatgtcaagtccggcgatatactagtggattgttgtgtttccctaaggggtccttcaaagcgctatcccactcgccatcgaggactttcagggagcccacggataatgaggttcgatgcctcttggatgcggccctgaccaagccacgccaagcagctgagacccggaacacaatatagaaaaggtaatccagtgaaaactttcactccgaagccagctgatctgactcatgactggtatgtcatcgacgccaccgacgtggtgctcggccgtctcgccacccaggctgcaatcctgctgcgcggcaagaacaagccgacctacgctccgcacgccgattccggcaaccacgtgatcatcatcaatgccgacaagattgctctgactggcaacaagatgggcaaggaactctactcgcactccggtcgtcccggtggtctgcgtcgtgactcctacgccgagctgctcgagaagaaccccgagcgcatcatcaagaacgctgtcaagggcatgctgccgaagaaccgtctggccaaggtgcagctcgaccgtctgcgtgtcttccgcggcgccgagcacccgcacaccccgcagaagccccaggtcttcgagatcgcccaggtctcgcagcaggccaagtgaaacctgagaggagataagaatcatggctgaaaacaccaacgactcccaggttgtcgagaccgaagaggagctcaccaactacaccaccgagaccaacgctggcgctggcaccggcacctccgcgatcgagccgggctacggcaccggtcgccgcaaggaggctgtcgcccgtgtccgtctggttccgggtgacggcaagtggaccatcaacggccgcaccctggaggagtacttcccctccaagctgctgcagcgtgaggtcaactctccgattgttctgctcaagctcgaaggcaagttcgacgctatcgtcctcgttgacggcggcggcaccaccggccaggccggcgctatccgcctcggcgttgcccgcgctctgaacgccatcgatcgtgatgccaaccgcgccgccctgaagaaggctggcttcctgacccgcgacgctcgcgtcgtggagcgcaagaaggctggtctgcacaaggcacgtcgcgccccgcagttctccaagcgttaatttcgcttgtcctgtaccgagcatgcaaaggctctccgtggaattccgcggagagcctttgtgtttgtgtcgtgctgttttgagtgtgactcacacctgtttcatcagcgtgatgctcagcgccggcatggtccagacattgtcgtcgacgggagtgtccggcgtatcatccacaggggcatcaggcatatcagctgatacctcatcccgaggcgcggacgaggtgccgtttgcggcgtgatccgttgctggcatcgcgaattcgatggtatccgcttcatcctcagtcgaggattccgtgcgctgcatggccacttcttcgaccagcgtgcgtaccgtctcgctggcgtccggtacatgctgcgtccaaacggtggtgtcatcgttcaaatcgcattcctcgacctgaatgccatgcccggctcggcggccgttgatttcggccgagcaccatttaggcgtccagtgagtgtctggcggcaggcggaatgtgcggtcgtcagcggtgccgttgaccacaatgcacacgtccacctcactgttggacagcaatcgcatggtgaagctacgtacgcccagatcgaaccagtcacgctccatcggcgtggtgccgtcgggcaggaaccactgcacgcggcttgagggcttgagtaggccgagttgggtcagtcgggtgaagaagtcctcgtggtgatacaggtccagtgatttacgtagcgccaccagtcgagacacggttttcaggcgacgcatttcgcgtgtcttgttggtggaatacatccaatcccacttcagccacgtgatgtcgttgtcttggcagtaggcgttgttgttgccgtcctgtgtgttgcggaattcgtcgccggcgagcatcatcggcgtacccagcgagagcagcagcatgccgatcatgttcatggccgcctgttcgcgtgccgtgatgacgtctggatcatcggtgacgccttcgacgccgaaattggcggaatggttcaccgacgagccatcattattgttctcgccgttggcttcattgtgcttggagcggtatctggtgaggtccgtcagcgtgaaaccgtcgtggcaggacacgaaattgatggaggccggagcgccgcgcccgggttcggtggcgaacagatcggccgagccgcagagtcgcgtggccatctcctgcaaactgatacgaccgaaatcggagccgccgtccacatcctcaagccagaaggtgcgggccgtgtcgcggaagcggtcattccattcggcgaacggcacggagaattggccggtgcgccagccgaggttgcctagatcccacggctccataatgagcttcaggttgcccagcagcagatcggaacgcagggcgtagaggaacgggtgatgatgggtgaattcgccttccaggcgggccagcgtgacgccaaggtcgaaacggaaaccgtctatgccgatacgcttggcccagtatcgtaatgagtcgatggcaaaggtgaccacatgcgtgttggtgaagtccagcgtattgccgcaaccggtggtgtcttcgagtcgaccggtattggatttttgatggcgatagtaggccaggtcgtcgaggccgcgccagcagaccgtcgggccttcgacgccgccttcgcatgtgtggttgtagaccacgtccatgatgacttcgaagccggcctcgtgcagcgcgcgcaccatgtctatgacttcttggcgcacggcggccgcgcccttctcttgggctgctttggtggcataggagggttcgggggcgaagtagctgagggtggagtagccccagtagttcttgcggccgtgttcttgcaggaagagctcgtcctgcttggccataatcggcagcagttcgatggaggtgatgcccaatccctgcagataggcgagcgttgtggggtgggcgagtccggcgtaggtgccacgcaacgcttcgggcagccacggcgcgttggcggtgaagcctttgacatgcatctcgtagatgacggttttgcgccacggcacatgcgggtgctgcgggtcgccctcatgcttatggatatcgcgatcgtcgatggccacggacaccggcacatggccgagcgagtctacggtgctcatggcaccgtatgccgagccggttaccttgcgatccacgacatcgcattcataggagaaggcggcgggggtgagctccatggagccgtcgatgcccttgccatacgggtcaagcaggaatttgtatggattgaagcgcacgccgtgtttcgggtcccatgcgccgtccacgcggtagccataacgcatgccgtcccatgctttgggcaggtgcacgtaccacaggccgtagttcggtccggtcatgcggaacagggtctcgcgcagatacaaatgttcgataatgcgcgtgcacaccggaaactcatggatctgctggatgaacgaggcgttcgggtcttcgaacaggcggatggcgtcttggaagaaggcgccgggctcgtcaatgggctccagcacacacagccaaacctgatcggcggtttcggaacgaacaacgacgtcagccccaccgtcgtcagtgaagtacagccctgggcgagtggcgtaacgatgcagcggtgggtttttcatacctccattgtagacgtgttgtcacttctggtggaagcccttgatttcctgccgcgttccgcagcaccacagatatcgtcgagataattctcggcgaatcgcaatgcggcaccgatgatgttctggtcttcggcgcagtagctcttgcgcagattgaaatggccggtgccgaacggactgcgtgcgatgacgcgcgccttcagatcctcgatgtcactgtcttcaagatgctgggctgcttcaccgccgacaatcacgtcgcccgcgatgatggatcgcgcgttgacgatggcctgcgccacgtaatccagccattcgtccatgcgctcgcgatgatgccgttcaccctgctcaagcacgctgaagaagccgggaatactttcgtaatcctcgggcaaggtctccggcgagcagtaggtgtccatgcaaccgcgctggccgcagtagcattcgcggccgcccggcaccagcgtcatgtgttcgatggcgccattgcacatattcggaccctgatacagcttgccgcccacgatcaccgcgccgcccgggcgtcgctccagatagacgcacaccgcatcggtgagcgtggagtcgaaccatagctcgaccatggcggaggcatcggaatcgtggatcatcatgcacgggtaatggaccgactggctgatggtttcgagcgtaagccccgtgttgcccataatggtgccgaaggtgatggtggtggcgtcgggggagaggatgccttggatggcgaacgagacgccgagcactttgccgtgcttcttttcgacgtcggaggcgaagttgttgatgatgccgccgatacgctggtagtaaacgttggtgttgcggtaaggcagggcatcgttgcgtttttcgatgacgttgccgtacaggttaatcgcgcacaggcgcagttcgttggaccgcatcactacgccgatggcagtgcgatgatcgggattgaactcataattttgcgccttgcgcccgccggtggaatcctgcagttcgcctttgcggatgagtccgtcatcttctagggcgcgcagattttgggtgatggtgggcaggctgaggccgagttcgcgttccagttcctgcttggtgacatggctatggccatacagatactgggtcatggcactgcggttgtgcgctttcactgcggtcgatggcattgccctcatatttacccctttgtgcgatgagatatatgtaagtatactttatgaaagtggctttcatgtgcctcgacgcggagattatgaggcaacaatcgtatatttgtaggcgattttgggcacttttttaaaccaattttctagaaatgtggggaaaatgagtacttttggaaacttgatttaagaaagttgtcggattgcgttgtttgcaagcatgtgattttcggtaaaaagtgaacaaaaagtaccaaatcgccgaataaagtgaggatttgttcgatatttcgcacaactcttaacaaaaactgttcaatatcgcacgtgaaacgccgtcgattttgtgcgtatgcatcgcgccggaccgttcggtatattgtgactcaagtcacatatgcaatgtgacaacgcatcaccggtcattttcggttactgaggcggtatcccgctggtgcaactgaggtgacgaggcgatggcccagaactttgccataataccccaagaagatcgaggaggaccccaagtggcagaagcaaagaagaaagtcgaagctgccaatccgaccccagaagagaagcaggccgcagctgaggccgaagttgacgcgctggttgcccgcgccaagaaggctctcgacgaattcgagaacctcgaccagaagcaagttgatcgtatcgtcgccaaggcctccatcgccgctctgaacaagcacctcgttctcgccaagatggccgtcgacgagaccggccgtggtctcgtggaagacaaggccaccaagaacatcttcgcctgtgagcacgtcaccaactacctggccggccagaagaccgtcggcatcatccgcgaagacgacgtgatgggcatcgatgaggtcgccgagcccgtcggcgtggtcgccggtgtcaccccggttaccaacccgacctccaccgccatcttcaagtccctcatcgccctgaagacacgctgcccgatcgtcttcggcttccaccccggcgcgcagaagtgctccgtcgaggccgccaagatcgtgcgcgacgccgccatcgaggccggtgctcccgagaactgtatccagtggatcgagcacccgtccatccaggccaccggcgcgctgatgcagcacccgggcgtggccacgatcctcgccaccggtggtccgggcatggtcaaggccgcttactcctccggcaagcccgccctcggcgtgggtgccggcaacgccccggcctatgttgattccgatgtggacatcgtccgtgccgccaacgatctggtgctctccaagcacttcgattacggcatgatctgcgccaccgagcaggccatcatcgcccacaaggacgtctacgaccagctcatcaaggagctcaaggtccgtaaggcctacttcgtcaacgccgaagagaaggccaagctggagcagtacatgttcggctgcaccgccggttccggcgtcaagcccgtgctgaactccgtggtgccgggcaagtccccgcagttcatcgccaaggctgctggcttcgagattccggccgacgccaccattctggccgccgagtgcaaggaagtctccgacgacgagccgctgacccacgagaagctcgctccggtgcaggccgtgctcaaggccgacaacaaggagcaggccttcgagatgtgcgagaagatgctcaagctgggtgccggccacaccgccgccatccacaccaacaaccaggagctcgtgcgtgagtacggcgtccgtatgcacgcctgccgcatcatctggaaccagccttcctcccttggcggcatcggcgacatctacaatgccatcgccccgtcgctgaccctgggctgcggctcctacggcggcaactcggtgtccggcaacgtgcaggccgtgaatctcgtcaacatcaagcgcattgctcggaggaacaacaacatgcagtggttcaagatcccggccaagacctacttcgagccgaacgccatcaagtacctgcgcgacatgtacggcatcgagaaggccgtcatcgtgtgcgataaggtcatggagcagctcggcattgtcgacaaggtcatcgaccagctgcgcgcccgctccaaccgtgtgaccttccgcatcatcgactacgtcgagccggagccctccgtcgagaccgtcgaaaagggcgcggagatgatgcgcgaggagttcgagccggacacgatcatcgcggttggcggcggctccccgatggatgcctccaagatcatgtggctgctctacgagcacccggaaatcgccttctccgacgtgcgcgagaagttcttcgatatccgtaagcgcgccttcaagatcccgccgctgggcaagaaggccaagctcgtgtgcatcccgacctcctccggcaccggttccgaggtcaccccgttcgccgtgatcaccgatcacaagaccggctacaagtacccgatcaccgactacgcgctgaccccgtccgtggccatcgtggacccggtgctggctcgcacccagccgcgcaagctggcctccgacgccggcttcgacgccctgacccactcgatggaagcatacgtgtccgtgtacgcgaacgacttcaccgacggcatggccctgcacgcggccaagctcatctgggacaacctggctgagtccgtcaacggcgagcccggcctggccaagaccgacgctcaggagaagatgcacaacgccgccaccatggccggcatggcattcggctccgcgttcctcggcatgtgccacggcatggcccacaccatcggtgccctgtgccacatcgcccacggccgtaccaactccatcctgctgccgtacgtgattcgctacaacggccagattcctgaggagcccacctcttggccgaagtacaacaagtacatcgccccggagcgctaccaggacatcgcccgcaacctcggcatcgacaccggcaagaccccggccgaagccgtggagaacctggcgaaggctgtcgaggactaccgcgataacaagctcggtatgaacaagagcttccaggattgcggcgtggacgaggattacttctggtccgtgctcgatcagatcggcatgcgcgcctacgaggaccagtgcaccccggccaacccgcgcatcccgctgatcaacgacatgaaggacatcgccgtcggtgcttactacgg

SEQ ID NO: 3870 - DNA, 12687 bp, Unknown
  R22_24m  MAG No. k141_2119
caatctcagttgcagcaaacccgttcgtgaggcggctggcgttcatgtcgctacgtgggtctgactggggggagccagtcagtctcgcgtggcggcgagtccaagttggggtctgatagacactcatgctgttacctccaagtcagaaggcttgttagaagcgctgggtgagaagaagtcgggcagaatgtccatcggtgttaagctcagacattccgcataggttgcaacctgtccgattcctatggttgactgccccttcagttgacgggtcagtgttacgtagggagtaccggactggttggaaagccacctcacagacctatctgcggccttgagtgcttccctcagctttcgagcagtttgcttggtgatgctttcttgattaaccatacggttaattatggcactgcttggataatccgtcaagctagttttttatctattcggttaattttctctctattatgtgatattctttatctatgactgaatatggagaccgtttcgcagcagcagttgccgaagagctgcgggcgcaaaaagcaagagtcggcaaaaccaacgatgaaatcggagaggaagtgggcgtcagccctgttaccgtcctccgttaccttaaaggccagcgtcagattccggttgatgtactaggagatctatgcaaggctttaggcgccgatgccggagtaatcatgcagacagcgcatcttaaggcttctttgtctcctgtggcttccgctgcgtcccagcttgaaaaggtcatcggcagaaagatagaagtagagaaggccgcttatcgggatgataacaagcgtgcggagtccggtcgtagtgaagacgtggactgacctcaccagtgaggcccagcgcatgggagtccttataggggataaggagttcgacgggacgcagtgcggggaatacgatcccgatacccgcaccgcgttcattgaccccaccatgagtgtggaacaacgggtatgcacgttgcagcatgagcttatccacgccaggcatttcgatgacggactcagactattgagccgtgataaggaggagtgtctgacccgcaaggagaccgcgttggcgttgattaaccccgtggactacatgcacgccgaagacctgtacgggggagaaccctatgcgatggcgcaggaacttcgtataaccgtcagcgtcctacaggactatagacattggctgcacgacaacctagccatatcgagttaggattaagacaccagttcaatggagagaaaggaataattttgagcgagcctgaacagaattggcctgaatcggaaccggacaagtcaaagccagagatgacgcaggaagaactgcaacgccagctattggagacacagaaaagactcgtggaattgcaggagcagcagataaggaagaaggattctcaaaccgacaatcacgataccggcatcggcaaatccgttgtgagcattcttattgcagcggtgatcatcgccgtggtcggcttcgtcattcatgactacaccaaaacgaaggaagtcaatgaacatgcctccgacaatattagtgatgcgctgaatctaggcagcggctcaccgaccgacatctttctatcgtccttgccgatgaaaccatgacaatcaagcatgggacataaaattcataaactattgacccaatgaagagaaggggaaacaacatgagctcgccggtttaccagcccatgccgccagcaggcatgcaaccatcacagcctgtatctcataggcgtaaaaaaggaatcacgattccggtgccggttttcgtcttgttgattatcggtatcatcgtcgcactgttcgtgggcatgcttttcggtgtcggagccatgagcgaagaagtcaattccgctcaacaatcgtcgtatgcatgggaggataaatacaaagccgcgaaggtccagttgaacggatatgtgagcgctccgagcgtagcgcccgatacgatgggagcctgcggtgtcctcttcgatggtaatcagtccctgattgatgatgtggcagcggtatctgggtacttccgcgatccggctaaccatgatgccgtccaagccttctcgggagcttcattggcggtcaagacaatcaacgaggcattcccaaaggccgatcccgatatgaaagcgagtcttgccgcattgaatgctccgatgttgaagattgtgtatgcgacacagaatcttggttacgctgatgcccaatacgacagccttcaagtgctatctgatctgaatagcgtcatggaatcatgtgttgctgtcggatatacggcgaagcagtagacgaaagacaatggtctcgtcttcctgtattagaggacgggaccattcttgttcgtatgaaagtgccgtgaccctattgtgggccacggcacttgacacataccggacgctcaccgtccaagtatgttccgcttatttcggtcggctatcaacatgtcacgagacacttcgatcatactcggcggcacgccaagtcatgccttccattcgatctgcttcaaatcgagcccgtcgcctatcgtctccatgccgcgcatcaaatcctccaccggcacggtgcggtaatgctcgctcatggctatgctcgaatggccgacgatgcgttggatgatgccggggtcaaccttcatgtggaacaggagcgatacgacggaattgcggcattcatgcccgtaccggttctcgtagtcggggatgcccgccctgcgcatgaggtcgcggaaaccggccctgtcatccaacgcggccaacggcataccctcgcgcgtcctgaatatcaggttgtacgggttcgggatgatattctccgtggcctccagataccggtgcacgacggtgcccaactgggggattatcggcacgaccttgcctctcgcggacttcggcggcgtcaaagcgtaccccttgcacaggtgtatcatgtcgtatccgtccggcaccctccaccggtatcgggggcagctcgaaggccgtttgaagccgcacgggtatcttccgtccctgccgggctccccacacccatgctccttgtcgaggctttccagtttccagttcaccgtgtaggtgcctatccatatctcgccgctgtccggggtttccaacgtcttgtcccgccacaggtcgagatcgtccaatgtggctcccagtatctccccctgcctcatgccggtgagcagacgccaccattggcgtgcccccagaaacaggtcgtcggaggacgcttcgagcatgtcctgcatctgctccacggtgaacgccttgcggtcctgcgtgccgctgcgcctgtccgccgacacggccacgggcccgttgatggtgcgccggtccccggccaatcccgtgtccctgcgtttcggccttgccgcgctggtgaccggactggtgggtatcagccggtcggccaccgccgccttgaatatctggttaaggatgttgtagaagccaagctgccggttgtacgagcatggggtgccgtcgaggttgcgcatgttggctatcatgcgctgcaccgccgaggcggtcacttcgcccagcttctcgttcgcatacttgcataggtgcacgcttatgaggctcgcgtagttgttgatggacttgggtttcaggtcgcgtcgtttcagctcgaaccatcgttccgcgtactcgccgagccgggtggcgcggtctacgcccatgccccattcggttttctccttgagggcttcggctatttttctgtcgcattccttgtaggtcttggcggacacccatcggccgtccaccttggcctgccagttcacgtatgtctttaccgtgccgtccttgagtgttttccgctgctcgtggcggatggggtagaccgctccggttttccttatcctaggcattcagcatccttcattctccaacattctccaacaaacaatccgtggcgaatggtattccaatggtataccaatcgtatcaaatcgttggaattccgccgttctttccgtgagggccgttgatttcattatacgttactggatgtggaaggtgtgctgaatcactcgctgattaggcattgagaccccttgcgaacgccaatgtttgcaaggggtctcatcgtatctcgggtaagatttccggcgtctaggaatgtcattctccaacattctccaacaaatcttcgggttgggctgcggaacggtttcggcgtggcggaatcgacggtgattcgctcgaaaaatcaaaaatcggtttttgtataaatattcatgtaagccttttagtatctatccatgtatgttcacatgtcggtgtgagcaataatcagcgttgactgtgactcactattcccattatggtgtgactatctgttatcatgtgagtgtgaataaaaaaccctatggaggtgaagactccacagggttgaaaaacgaaaccctagcaagagttccactcccaagtttagtcgagggcgtggaggaaagatgacggaacagatgggctaccgcaatgtagatcgcgtatatgctctcgcaagccaaggcaaattctccaagactgatgaaaacggcaagcagacgctagacctactggctttgtcgatgatgacctacatggcctcgaaggtaatcgacaaagaggatgtgaacgccgtcgtatatcaaaaccgtgcctactggtgttattgggagggttgggacaagatgatagagggtatgggcatggtcatcgcctccaaggaacatgatttagacactgccgcagaaacaacaatggcccgcacacggacagcgcgaaaccgactgagccgtggtgcaaagtttttacaagagcagggctgtataaagcagctaaaggctccgattcctctagcggggaagaatgccatctggcttctgttgcttggtaatgagagggagaaccgcgaagctgagcgaatcgcccgattgtatttcaatcttccgcccatgaaagcgtaaatacgcgaaaaccgcccctccgtccagcgttactgctgggggaggggcggtggtatttattcgctgcgactacttgccggccatgcgtaccgggttgtatgcgactccgaatcctgcggcgatcaaacgctcgatattgaccttatcgaagacacagctccagtgccattatccgtcatcagaaaagccgtggattttgattgatgtaagttttggcacgccaaaacttacatcaatcaatgaaaaacgtcaaaaaacgccctatttttagatgtccatgtaagtttcagatgacatcaacgtcatcttcccctcataaagtgtcaggaaaagttgagggtgagtcggtgcttggcacgtcccatgatggggctgagggagacggtcgaggtgtgggctgaggggtgacgggagtgtctggcgctgggcgagtggtgttggttgatggttgctgttggatgggtgcgggttgtgattcggatgtcccggctggcgcggatggtgcttcttctgtttgttgaaggacgcgctgagctgagaacgggttggaaaatggccgctttgccttgcgggagtagggctgagcggcttttttcgttttaaccagttttaacggtttttaacctgtttttacggaaaatgtgggcaaaatgtgggcaaaaatcgagcccgcgaagccctctgccacaacgcgaaatcggccccgtccggccgcaggttgactctattcgagtcgcctgcgatgccgggcggggccgaactatgtgtggtcatgcggcgaggtcgatgcgttgtttgatggcgctgacgccgatgagcgcgccggcgaggatgccgagcgcgttgagcgtggtcacgatggcgtccacgtggggccagccccatgcggggccgatcgtgcccacgaacagggcgagtgcgggcaggacgatgaggccgagccatttgagcacatcgtagacgcggctggggatgagccagtcgggcacgtcatgggtgacgtcggcggtttcgggccagtcgcccgtgtcggggccggggagtgtttcgccggtgtcggccgggtttttgctgtcggtcatgtttgctccgatcaataagggatgatgatggggtgatgccgtcacccggtcaagcgggtggcggcatctgttgagtctcagcggcaggtcaccacgtcgcccacatagtagacgttgatgttgccggagggtacggtgcagcggctgacgctgtagccgtgggacgtggcgaactcccacacggtgtcgccccactggagggtcttggagaccccggtggacggtgcgggggtggcagtagatccgccgccgtaggtgacgacatcgcccacgtagtagcggttgatgtcaccactgggcgtgtgccatgcggacaggggccatgcgttgtaggctacggcgagtccccagatggtctcgccccactgcatggtgtggctgatgcctccagtgttgggagtgggctgggggttgttcggctgtgcgggcgcggccggtgtggccggtggcgtggagccgccggttgggttggcgtacaggtcccactgccatgcctcgccgcggaagatgttgaggtcgatgggactccacgtgttgacgacaccggtgccgctgtactgtcgcatggcctcaccgtacgcgcccagcatccacgggttggcctggtagccggtcggggccatgttcgcgtactgcgcgatccacaaaccgtagttggcgcggatgtcgccggggatggtgccggccacggggccggtgtagagcagcggcttgacgccgcccgagagccgttcgcactccgccatgaagcggcgcacccagtcccagttaccccacgccggattatcgtccatctcccagtcaagggcgacgatgccgtgacgccaatagttgctggtgttgcggtagaagaattgggcttcggcttccgggttgccgcccatggcgtaatggtagaggccgaatttcttgccggatgcctgcgcctggtagatcacgcggttggcgtccgtgttgacgccggacaccaggcagttgttgttgacctgtccggtgccccatgtggtgccgacgacgacgaagtcggcctgcgtgttggcgatgtcgatgccgcactgccagttggacacgtcgataccctgcatgtcggccatcgccgccggggcgcacgccatggagaccgcggcgacgagcgcggccagcgtcacgcccacgcgccggtgcaggcgtccgtgtttatgcttgcttttgtcgaggatcttcacatcctctccttcccgccccgagtcaagggggcaataaaaaagccaccccgaaatgggatggctttgaaaaccagtgtgaaaatcaatgcctgcgcgcaccatgattggacacgatgatgagcgcgaggaggatgagatacgcgaccaacgcgacggggccgctcattgccggtcctccaagtatttttcggcggcgttgactatccagcattgcgcgtcgagtttttcgagtttggcgagctcgtatcggactgcctccgaatggtcgtgcgactggtcgccgtagatcaggctgatgatcgtgttcttgatcgtgtcgcggcacaactcgtccatacggtcatcgaatttcgcagtacgttcgcccagcattctggttttggcgaaatgctgcgagagcggcgaatcgtagggcaggcgttccggttgcacgtgcgcgtacaggccggtcgccaacgcgtccaaagcgcccggccagactttaagcccgagcgtgatgagcgcgcacgcgccacccacaccgccgaaaccggctagaaaattttgcagcacattacatctccttaaagaaaagccccgcacgcggcggggctgtggtttgtttaatacgggtggtcagaggcggcgaacacggacggtaggccagcattctgcagcaggctaatagggggcggtgtccccggtgaagcatccgattccgactgcttgcaggacattgaactccgctggcgcgacgatgcagtattcggtcgccgtgcaggacttgcccttgtccacccacacatcgctgtccttcagctgcgtactgtcacaggcaaacgatccgtccgacaggagattaaagtgcctcttggagcaatatccgcttgtccggagcaggtaagtcatgccttccagcttcgtgtctctgaaagcatgaaaagtcccgaagtcgccgccggggccgccgacgtttgtgtacgtcacatggccttttccatccggctcggccaacaggttccatgtcgagactttctgggcagcgtgcgcgtccggatgctggttcctgatcctcacgcggccacccccaaaatgtttagtagggtgcggtgtcgacggcgaagatacaagcgccaacctcctgcaaaatcggccactcgtccaacccgacgaagcacatgccgactggcgtggcctctaacgcgagcagcgcctggatgctgacgatattccgcttctcctcggatacgtccacgacccgcagaccatcggacgacgagtaaagcaagtccgagttctccacgcgcatggactcccatacgcttgcaggcgtcagccttatcatcagacagtctgacattttttgcggaatcaagctcgcagctcgaggaaagctgtatttccagtgcccgccgtcctgtgtgacggcaacctggcccttggaactccatgttggcatcgtccgctcgcaattcggatcggcgtaacggttcctgatcctcatcggcggccacccgcctcaagctcagtacggcgcgttctgcgcggtgaagaagcccggaagcccccccccgacggcggcgtcgtaagtgtcggcacgttcgatgagcacattcgataccgccacgtcacggattccgtatggatttacctcgaatcgaaacccatgggaggggaccgtgaatctgcacaagacatccgatatcccctgctttaatttttggaaagacaacatattattaacgctggccttatcagttgtctgaatgagcatcaagcccgcgacgttatcatcgctggcgtccactctcatcgacaagacgagcggaacgttgaatggaaccgcaacgttgaagccatatccgcctctggttcccgtgatgtgcaacgcattatcacggaccgtcccattcgcgtcaccccaacgggaggtgtcggtaagcggtccggcaaaaacaggattggggaaaagattaatcctctgcacgctcatgctccttattacgaaaatagaccgtctggaacgttccgcgccccgcgccaagccggccgaggaacccgccgaggtacagatacccggagttgatgtccgcctccaccctcaagctcagtacggcgcggtgcctgcggtgaagaagctcggaagcccccccccgaagcgagagcgtgcgtgtcggcgcgttcgacgatgaagtccgtggccttgcagccgcaggcggaaaaattacatttgtcggaagcggtctgaacgtcgaactgcatcacgttgacgccgatgacgccattccagacggtacccaacttcacgtgatgagtctcatcccagaatgggatcaccgcttgtttgcttccgcgcttcgtaatattgcatgaggcgacgtatcgtcccggctgcaaagacattccggtcccgtttttgaagtccttccaattgtccggatcgccggccgatgcatcaagtgtctcagctggttttgcacacagattcgtccgtctcatcccaattcctttcccgtcaaaagcttccaaccgtcccattccttgcgccatacctcgcggatgcggtcgatgaggaagcacatcacgttcgcatcattgccgacagcgcccgtatagtatttcaacccgttatggagtttttcggtgcggcaccacaggctgccgaccggagccgtcgaaggctggtcaggctgcacgagaatctgcttggcacccaacgccttgccgccttcggcaatcgacacgtgacaggcgttgaacgcatcctgtttgagcacggtgaggaaattcgtggtgtcggaaacgaagctcaccgtgccggcattgatgttcgccacggtggtgtccgccgtggaaagcgtcagattcgcgtcttcgatgtgaccgtcggcgaagaccttctgggcggccaccttgacctccgggtggtcggcatagagtgcctgagctgtgaaatcgaccggtttgagccacacgtccacgagtgtttcggcggctggcggccatacctgcacgccgttgtacagcgcgttcatcggcacaggcacgccattattagtcatatacgggaggccgaccctcgtgccgttgagcagtacagacatttgtcaggcctcctgagaggaggcggaatcggtggaatcggtcggcatggtatccgtcctatcctcgccagacacgtcggacgccttgtccttcacgctcttcaccgcctcgtcgatcgccgtcaaagcatcattcgcatgtgattccacgaccgccttcgattcggtgatgctgtcggccaccgccgtcacctgcgcgtttgcggcctgagcggcgtcggacgcggccctggcggcattcgcggcctgagcggacacggcgctctgagcctccaccacggcacgcgcatcggtcaaatcctccaggatctgagaggcgacagtcttggccatgccctccggataaaacaccatctgacctggattcgccgccgacatggcctgcgcctcggacagggaagaagcaagcagatacgtcagcgccgtaccggaattgggtgccggggccagagtactcgcgtccacatcgaccagatcggcgaacgccacgggcgtgctcgaattcggtacctgcacgcatcggacgaaacgccagacatccggcgattcgcccaccgtcacctcgtaggcgaacgtgttgtcagtcggcgtaacatcaacggtggcagtgccggtttccgacagtcgcacgtcgaaagaatcacgcacgacgatacgcttgccgaccttgaaccggccggtcggcaccacatgcaccagttcgccggccaaaaccgcgacgccatcggcgcttggatggccgaaatcgaaattaatctgagtcaacataacctcctaaaaaacagggatatggaacaatgagaaaacccacacacacgcccacccaacggcaacacgacaatgtgtgggattatccaacaagaatcgggaaggaaccaatgcttttcgacacattcgcaaccaccgtttggaaaccctcatgcgcgaaactccgcgaatgcaccaaagtaggctacgaaagcgccctgaactgccatatcctcccgcaatggagcggaagggacatggactcgatcagcgtggcggacatcgaatcatggttggactccttcgacaggccgggagcggcacgcaaagcctacgcggtgctgcgggcgatgctgaggctcgcgttcaaacgcggtttgaccgacaatgacgtgaccagacgcgagatacgcctgccacgcctacggcactacgagccgcaagtgctgtccgcgtcggaagtgcgcagactgttgaaaggcttctacgggcatccgctcgaagcatggctattggtgtccgtatgcgcgggactgcgccgctgcgagtcggtcggcttggaatgggccgacttggatttacgtcgcggcacggtcacggtgaaaaggtcggtgcaatgggtggcaggccatgagaccgtcaccgaaccgaagaccgatctgagccgacgaaccgtcgcattgccacggttcgcggtcaaacgcttggcggaactacgccacggcacaaagaccggccgactggtcggcagcctgaacgcgaaccaagtggcgaaccactaccgcagttggtgcaagcgcatgaaactgccctgcgtgcctccacgcaacctacgccacacgttcggcacgttggcgatcaaggccggaaccgacatcagcgtggtcgcacgacaactcggacactccgacatccaaaccaccgcacggtattacctcaagcccgatctgagcgtcctcaaggacatgcagaaagcatggcagaaactcatacttacctgctgaatagctttccgtaacccttccatttggcagaggcaacgacaacagtaatggcggaatatacccaatcggtaaggtatctaacccaaatgcgatcaagtccttgaatggcagagccacactgtcgtccggaacgacagtggcgattccattcatccacccgtcatacctgcaacgttcggtccaagtatcgattgcacctgatgggacagtcaatctgctcgttggtcctgaagttgctgtcacaggtggaatcgtggaaatccatttttagtagctttccgtaacccagcaatggaaaccgccgtatacgaacaacagcctcactctgtgtcgagtcggacgcatcgtcacgatcaacggcaacgtcaagttcaccgccagcggaacacagaactacacgacggcgagtgagaccatcccggatgcgttccgtccgcttgccgatcagagcatcatatcgttcccgtcctgcggtttcagcctgcttgccatgcgtgatgggaaggtgcagatgctgggcgacccgagatccgcttactccacggcgcacggctgttggacggcactgcaatagctttccgta

SEQ ID NO: 3871 - DNA, 10567 bp, Unknown
  R22_24m  MAG No. k141_2195
gtgcgcggcatgggcaaggccgaacgccgcaagatcgccatggaacagctggagctcgtggggcttgccgatcaggccaagaagtacacgcagcagatgtccggcggccagcagcagcgcgtggccctggcccgggcgctgaccatcaagccgcgcgtgctgctgctcgacgagccgttgtccgcgctcgacgccaaagtgcgcgtccagctgcgtgaccagattcgccgcatccaactcaccaccggcaccacaaccgtcttcgtgacccacgatcaggaagaggcgctggccgtggccgaccgcatcggcgtgatgaacaagggcaagatcgagcagatcgccgccccgcaggacctgtaccagcgccctgccaccgagtacgtggccacgttcattggactcaccaaccgcctgctcggcgcatccaatggcgacgaggccgtggtcttcggccagcgcgtgccgctgctcgccggctccgccaagggcgattccgtggccgtgctcgtgcgcccggagaacctgatgctggccttggctggcagcagcgattcgcacgtcggcgaacgcgcccgcgtggaggtcattcacttccttggctctttggttcgtgtggacacggtcatcacctccggcgaataccagcgctggaacaaaggtgaacagctcaaggccaccgtgcagctgcccgccagcgagctgccggccggtctggcggtgggcgatgacgtgattgtcgccccgcgtccggtcgccgcgctcgcctgctgaatggcgttgcgatgatcgtgcggttctgttctgttttttgtgactgtacgatcgtcgaatggcttatcggcaatgatgtgtgtgggacggcggcgatttttgggcgattatcgcgtgccgtcccacgccggtgtgggatggcatgaacgtcaaacgatgtacattcgtgccgtcccacagattgtattgaggaatcgttgcaatgacgccatttcttcgtgcggcgtcatcagtcatatgtggagtggtgtgggccgccgcgaaaaaatcgggtaaaatcgcgtgccgtcccacaacaatcccgcagagtagaggactctctcggcatggggattgattgacgtagatcattccttgcccattgatgattttccccattcccaatgcaatcgaaacgccgtgccgtattcttgaagagtattgcacgtgtgatcggtccgtttgcggccagtgactatgggggataagtatgagcgaaccaatgccgtcggcgcagcagccgcaacaaaccccacgcgattggtggttcacggcccatcgccggttttcgacaatcggctcggcgctcgccattatgatggtgttctggatcgggctgaatattctggccactgaagcactacgaacgctgcttggcgccgatgtgcccgcttgggctgtgctgctcgcctcctccgggccgctgtatgtggtggccatgccgctgagtatgttggccttcactcgcgtaccggttattcgcacccggcagtaccccatgaaggcgggggagttcattcggattttcgtcatgtgcattccggtaatgctcttgggcaatatgattggcaatatattgtctgccggagccactgatggtcaggccaccaatcgcatcaacgacgtgattcttggcagcgactggcgggtgaacgcattgttcataggcctgttggcaccggtttgcgaagaatggatttttcgcaaggagattatctcccgcctgcgccggtacggagaaaagaccgcaatcatgttctccgcattggcattcgcgctattccatatgaacgtgttccagttcttctacgcctttggcctaggactgatgttcggatatgtatacacacgcacctcccgcctgcggtattcagtggctatgcacatgctgatcaacctgaacggggcagtgctcgccccattggtgatacaacagatcgatccccgcatcctcgacggcacaatcagcgaggccgaaatcatgcgtatggttgaaaccggcaacatgggcggcatgggcatcatgatgttgtacggcacagtgatgttgggcctctgcattgccggtatcgtgctgcttatcaccaagcgcaagagctgggagttctatcttgcgccagaggagttgcctgcggggcttaaaatacgcaccgcctatgccaatcccggcgttatctcgtacctactgttgactgtgattcttaccggttggatgctgttcgcatgactgtcatagccggacccagagaggtgagccgggagatatcacagattgtctgacgagccgctatcttcaacaaggtatttggtgcccgaaccggcgatggctcgcgccgccatatctttgatggtggaaggtagcacaccctcgcgcgcgaacacaagcacttggccggtcatgccgtaaggggagaagccggtgaacttgaccagcggtggctggccctccagtgccacgtcggcggtggctttggttacgcggtcgagaatatcctgactgatagcggacgggtcgccagaggccttggccgtgaactcgagcgtggccatgccttcgctggccggcgtgagcttggtcaaggcggccgtgttgagcaccgaattgggaatgaccatcatgtccccggaacgggtgcgcaccacggtctgacgccaggtgatgtcgtgcacggtacctgtgacgccttgaatggtcaccagatcgccgggttggattacgcggcccagcatcaggccgaagccgccgatgatgttggcgatcgtatccttcagacccagcgagatcgccacgcctccgacgccgagggcggtgaccagggtggtcggattgatgccgaacaccggttgcagcaccatcgccgtaccggtgacccagatggtcacgcgcgtgagattcacgaaaatcgaggcgctgggaatctgcgaactatccagaaccctgcgcagcacgcggctgatcacgcggtcggccgcgaacacgacggccagcacgacggccagccagatgagtttgccggcgttcacctgaaaccagcgtgcgatgtcttgtgcatattcggtcatatgccctactgtatcgaccatttctggtgaagtcgtaaacatgcgggcccacgtcgggttttggccgttgcggtggtgccgatggtgcgataccggtggcgtgccgtcggcaccaccggcaccaccgcggcaccgcggtgcagcatcgtcgtggtgatgacgtcgccgtgacgcctagtcccgatgctcgcggcaggtttggccgaggccacgggccagtcgaatcggatcgagaatctcgtccagctgctcggcgggcaggtcggtgcgttcgccggccacctcacgcacggtgcgaccggtgcgcacggcttcggcggcgatgtcggccgcatgctcatagccgatgtagtggttgagtgcggcggcgatcgacggcgaggactgggcatacgagcgtcccagaccgacgtggatctcgatgccctccacgcaattgacgcggaacgtctccatggcgcgcgtcagcaacgccatgccggtcagcagctcatgcaccatcaccgggtcgaaggcgttcagctgcaactggccctcggccacagcccagttcacagtcacgtccatgccgaagatcgtgaagcagcactggttgacgcattcggggatcaccgggttcactttggccggcatgatcgatgatccggcctggcgagccggcacgttgagatcgttgaacccgcagcgcggcccggaattgagcagtcgcaaatcgtcggcggccttcttcaggtgcacggcaaggctcttgatggcggccgacgtggccacgtacgcgcccatatccgtcatggcggccaccggatcgggcgcggcggtgaccggcaagccggtgatctgcgccagatgcttgatggcggacttgcggaatcgcagatccgcgcaaatgccggtgccgatggcggtggcaccgaggttgagctgggccagcagcggcaccacgcgatcgaatgcagccaaatcagacttcaacagcgtggcaaacgcatggaattcctgaccataggtcattggtacggcgtcctgcagctgcgtgcggccaatcgtcacgtcattgatatgtttgtcggccagatcgtggaaggccttggcgagtttcttggtggactcggcgagcggcccgatcgcgtcgataagcgcgagtttgcaggcggccgggtaggtgtcgttcgtggactgcgactcgttgacgtcgtcgttcggatggatgtatgtgtaatcgccgcgctggtggccggcgatttccagcgcacggttggcgatcacctcgttcatgttcatgttcgacgaggtgccggcaccgccctgcatcacatcgaccgggaactgatcggccagtttgccggcctcgatttccaggcaggcggcgcgaatggcctcggccttggccgggtcgatcaggcctaattcctcattggcgatggcgcaggcgcgcttgaccgtggcataggcgcgaatcagctcgggatgttggctatcggtgatgccggagaccgggaagttgccgatagcgcgctgggtgtgaatgccccagtagacgttcgccggcacctccatctggccgatgcagtcatgttccagacgggttttgttcgatgtttcgctcatgcttccatcttcctgtgtgagggctggaaacgccagcatgagaggctgattgcgccttgtgagaaacctcacgcgggggttcattcgacggaaacaatccagactcactggttttcggtcaagcggtgtacccggggaatcctgcggggccgttcgacggtgagatgggggatggcgcggcatgcgtggcggcggccggcatgccgggggcggccgaatcctgcgcattgtgcacgaagatgcgattccagtaattaagcatgtccttttggctcatggccaggtatatgcccatggccagcacggccacatcttctttaagcaggtctttgatttcgatggcgtcgctcaattcgggccaacgttgcagcacggcgagcatgccgcccacggtgaactcgaccatgagatcggttttcaggtcaaggttcttggggtcgcgttgcaatgtgctgagcatttgcagacggcagaagtcgcgcagcgattcggtcagttcaagcgtgctgtgcgggccggccaacagggccaggcggtcgaggcgctgccgctgctccgggtcggagagcgtggcggtgacgcggtctcgccattgttcctcgggattgccatttgggtcgggggtgcggttgattggaatcgattcgacctgatgcaggatggctgaatcggccaattcgggcaggctggagaagtgataatagaacgaattacggttcacgccagcctcacgcaccacatcggtgacggtgatcttgcggtagtcgcggtcggcgagcaattcccagaaagcgttctctaggcgttctttggcgggcagcacctcggaatcatggcgtggacgtggcatctcttcctcctgatgcaccagcgtgatatggtcacgctgtctaataacttattgggcagtataactattatttgtggacatgtctatgagctaatcggcgatttcagttgcgtcctccgctgagggcgaagctgcggtgtcagtgtcggtgtcggtatcggcgctggccggggccgcgctatctgttcctgtcgcagttcctgctggggtttcggctgttcctttggcggtcgcagaactcggcgcggaagccggggcgggcgtcggcctgcgtttggccgtggacgccttgaacagtatcgccagggcctcaaccaaatgacgccggtctgcgggggtcagccctacatacgcgccaagcatcgccggaatcgaagcggggaagttgctcatcacctcgctgaagctggtggcgccgttggcgtgcagcacggtgaacagcgcgtccaccgcacgctcgcgctgttcgggcgtaagcgtggcgatccaatggttcagctcctcgttaaacaactgcgagctggaactcaaatccggctcggtgatgaactggtcgccatccaatagccaggtgaaggcggaatgctgcataatgccatccgaatcggaagagaccacgcggcaaggctccggggtctcgaaaatcatgcccacaatcgacgaacttggcacgattttcgtcaccttcggctggatggtgcggtaggcggggctggtcacaatctccggcgggaaaccggggccgtccagtgaatagacatgctgaatgcgcttgcgcaccttggggtcggcgttcatggccgcgtaaatcgccagattgcctcccttggaatggccgaccagaataatcggaccctcccacagtcgcgccaccgtatccagataggcgctggctgaacgttgcgccggcaccggatactggaaagccatattgaaatcttccttccatccgatgagcgaatcatcggtaccgcggaaggaaataaccaacgtgcctttgtaggtcggcttccggcgcttgtggccgtcgggcagttggaaggtggcggcggcgaattgggtttgctcgccctgattgatgtgctcgaccaccgcgcccaggcgaacgttggcgtagcgggggttctcgcctgcggcctggaacaggtcgtgggtcaggtccggattgaccactgaaaccatttgggcttcgtgcggcttgtcgtcggcatgcgttttcggcgaacgatgcagctcgcggttggcctcgtcaaggcttaccgattcaagctcgggatgccagatacccttcagccagatcagtggatgcttgggctcgaaagcgcgaatgcgtgcggcgaacgagcctgactgcgtctcatccagcatcaacgtcggacagatactggccacatcctcatagatgagcgtggagatgatcaaggcgtcgatttcgttgaacggcaagtcggcgaaggagcgcgtttcggtgtgcgcgtaatcgataatgccggtcatacgcacctcctgcttccgttgatattgcatatccccttgggccatgtggtcttgcgattgcgtgcggccgtgcggctgcgcgcagcaattaaccatatacattccattgtagggattgtacggttttggccggcgcgatcgagcaagactgcaccgacggcgaacaattcgtgggaggattcccgtcagcttgtcgaaaattgtcgggtagcgggggttgcgatgccagccagccgaccaccctccggcgttacgtgccacttcccgccggcgggaggggtaaccactcaatccttttgacgaggcggaccgctggggccgtcaaaggttcggcagatcgaagcgggccagatccacgccttcgtggtcgagcagttcggccttgatgtcgagtcggccgccgtagccgccaaatgcgcggcccgagccgactacgcggtgacagggcacgatgatagtaaccggattgcgcttcactgcgcctccgaccgcctgcgcggccatgcggccgccaccgcgtcgttcggccaattcggcggcgagttcgccgtaacttaccgtcatgccatagggaatttcggccaccagattccacacttcatgttggaatggcgtgccggcgggatgcaacggcggcacctgatccgagccggggcgttcgccgtcgaaataggcggtcagccattcgcgggtcatacggaacacatcgggttcacgatcgggttcgcggttcgagtcgagaacggcttggtggtcggtggcccaccaccagtcttcaagacagagctcggtcaggccctcgccgtccgaggccatcatcatccggccgatgggcgtttcgactgtggcccgcatcagttgtcgttgcgtcataccgccattatcgcgcgttgagggatgaagcccataccgtgcctgatttcatgaaggacgggtcgtgctgtacggtcagtattgcgtgctgggcagcgatatctgacatagtgggggttcttgggccggcatgagtgttctttccgacatcccaaccgtctaactccgtttcgaggggctgatttgggctgttccggaggtctatctccgtttcgaggggctcctcatccgggaaaccacaagtataaacggctccgggctaacgtcattacgccgtttttggcccgtgtctactcagccaccagccccttgaaacgggagtagacctccggagaaggccaaatcagccccttgaaacgcagcgacccctctgattggagtcaatcagaggggttcggcacattgctgatgcagctggtccgccgtccgccttgaggcggaacgtaaccaagattcaggcgggattactccgcaacgagcgccaggaaggcggcggccacggcggctgtcgggttcgggaattcctcgtcctggttgaagaacggcacgtcggcgtagttcaggaacttcacttcggcacggtcgccgatcagggccttggcctctttggccagctgatcggttatcgtcatgcgttcctgatttccacggccatggccgtgccagatgtgcccatcgcttggttctacccgctgtttatgctggccatgcccatcgcctggctgctgtatacggccaccgcgagttatgtgcacgacggcacccgataatcgttggaaaaccggtgggacacgcgggggcttggctttttcctgagattggcgtatctttgtcacctgttgcccgtgaaggtaacacatgcggacatagcttagttggtaaagcgcaaccttgccaaggttgagaccgcgggttcgagtcccgttgtccgctctcggatggctggttcaggatgattgattcagcctgaggatgacccgggcggttggcgcagtggtagcgcacttccctgacacggaaggggtcacaagttcgaatcttgtatcgcccactcgatgaatcgccggcagaatgttgccggttttttcatcacaagctcgggcgattggcgcagcggctagcgcacttcgttcacaccgaaggggtcgtaggttcgattcctacatcgcccacccgatatcacgctcgtcagtctatgatggcgggcattttctatatctgccgtgccacggttccttatatggcgtctggcctcgggtggcatttggctgtgagcggtttccgattatgagtggcgtccggccgtcgtgcaatcccgctgcgcgcggtgccgtttgggctgtaatacgggtgctttgaaccggccataacttcttcatatgtcccggggcttgtgtcgtgtgccgcggcgcgcttccatagtggatatggcggtgcggaaggggagccgccatacttacttacacaaggacgtcttggtccgccagggcaacgcgcatggaaaggggtttgcgatggtgtgcaccacgctgaatttcgcggagaaatacctgctgaaaaccgaagtcaggtccgttgccggtatgtccggcggtacttccgatgctggtactgatttcgatgtcgatttcggtggcgagggcgacctcggaagcgatcatgccaccggtttcaatcgctcgctatcggccgacgattattgggctgcagccggatatgccgatgagtcattgtattgatggacgtgatgacgcggtaagggcgcgtcgataagtgcggctggtgtcgcggctgatgccgcatctggtgctcgttcggtggtcgcggctgatgttccgtacggagcctgcaatggttttgcatcggtggtgcgtcaaaatccggaccgtcgccgacgctgtggacgtttggcggcgttgaaaggacagataatggattgtcaacgccgctgagaacgattggcgacggtggtgggacagcggatgccccaccaccgtcgccaagagtggtacttgtgtcggtggcgtccaaaacatggcccggcaccgacatcagatactctgaacgtcggcggattcccgttctgtgtcccagcgccgacgtttgattcctgcttatgcgagctggcgtcggtaaaaaggcagaacttggttcaccggcgatgtctcagcacgtttgcgcgcgtcggatccttctggagcagcaggaagacgagcgccacaacgagcaggacggcgatggagagcacgccgaacgaggcgttgccggtcagggacgtggtggtggctaccaggaaggtgccgatgattgaggccgttttgataaaactatcataagaatagctagaatcgttgaaatacaaggcttttgctgtgttattctggctgtgttacacattcatgttacacagatggcggttggtatggcacggaaaagcatcaaaatcctgaacggcagagcgagcgcgttgccgcctaccgagaaattcccgagatggcgcgtgatatggaccgacccggttaccggcaagcgtcggcagaccagtggcggagacagcctcgacagcgccaaggccaaggccgccgagatactgggcgactacgttccggattcggagtccggcgtgcgccctccgactttcga

SEQ ID NO: 3872 - DNA, 15580 bp, Unknown
  R22_24m  MAG No. k141_2851
accggaatctcgccaagcacttcgcccggcgcgtggatggacagcagctgcacgcggtcatcggaagaagtgcgaatcagcttgacgcgcccctgctccagtagatacatgcgctgatcggtatcgccttcggagaagatatagtcgcccttatcgaaggtcgcacgcttcaaatgcggcagcagctcctcggcttcggctggcgatacctgcttgaacaatgccgtatgcagcaggatgttctcctcgtcaacaaaagcgtttggcgtttccaagctcatcgcaccatccttattgtcctacgaccgtcgtcggccatccgtcatattgtaacgcgccccacaggtttcgtcagaagcatgccatcattcgtcacttcatgtgtggcgcgatccgatagccgtacgacatgctgacgaatgtgttccgcgaaaaacggcactgtcgcggttaccgcgctcgcccatgacaaaaccacgcacggccaccggcaaaatcgtatacggccatcggtgaaatcacgccgcaaaccagtcaataaggtgttcgacgatgtgttcgcggctgagacccgtctggcttttcatcgggtccacacgtttgactgctgatttcaccgctttgtctgacatcttctcgcgactggtgttgagcacacggctcatcttggccgcatcgatgtcatatgccatggtcacatggtgcagcaccgcgccgcctgagcctacggggaagcgccgttgcgccgctcccccgatcttgccgtactgcgaggcgatatcattgaggcccgcgaaccgcacatccaagccaagttcgcgcagcgcttcgaccagccaccagtcacagagccggtaggattcttcgatgcttacgccctgaacgaaatcgagcggtgcatacagagaataggtaatggtgttgcccggttcgataaacatcgcgccaccacccgtgcaacggcgcaccacgtcgaaaccgagctgctcggcaatgtccagattcacctcgtcctgggccgattggaaacggccgatgaccacagccgggcccgcccactcccagaaccgtatggtcggctgtcgtgttcctgctgcgacttcacgcgcccaggtctcgtcaatggccatttgctcgtccggagtacgcggatggtcgtggatcacggtgagttgaggtctgagggcgttccagcgctcccggtattcagagcttttgtcgggctgcttggtttgtgtattgatggatgccggggtgttcggcgcatcggggctgaccacccccacccgctgcgcgggagcccccaccagcgggggcaagttgctgcttacggctcggctatatgcggttttgatggcaacttcatctgtgccgataatttggcaactagggtgagcgtccaatacggaccgcaatgaatcatcactaattagagcctgttccaagtcacgcaacaaagcatgagattcggcatccgaaactgattcaataaagaaatcaccgctgatatggcatgactgtgcggtgccgtcatcatcgacggatacggtcacggcgactagtttgccgccaacggttttgcattccccatgtcgcatttgcatgcaactcagtataaacttggctcccctctggaggggagccaagtgggacatcacatgcgggccagaatgtccttgccgacctggtcggtggagcgcacggtggagccgagctcctcgatgtccgcttcgacggcggcgtgaatcttcttggccgcatcatcaaagccgagatgctcgagcagcatggcggcggagaggatggcggcggtcgggttggccttgttctgaccggcgatgtccggagcggaaccgtgaatcggctcgaacatggacgggaactcgtcggaggcgttgatgcagccggaggcggagtagcccacgccgcccaccacggagccggcctcatcggtcagaatgtcgccgaagaggttgtcggtgagaatcacatcgaaacggctcgggtcggagaccaggaagatggtggccgcatcgatgtgctggtagtcgtgggtgacctcagggtattcctcgccgaccttgtcgacgatgcgttgccacatatcaccggcgttgacgagcacgttcttcttgtgcaccagggtgacgtgcttcttgcgcttcatagcgagcttgaaggcgtaacgcaccacacgctccacaccgtatgcggtgttgatggacacctcggtggccacctcctgcggggtgttgcggcgcaccgcgccgccggcaccgcagtacagaccttcggtgccttcacgcaccaccacgaagtcgatgtcgccggggttggcgagcggcgaggtgacgcccttgtacagcttggaggggcgcaggttcacgtactggtcgaggtcgaagcgcagcttcagcagcaggccgcgttccagaatgccggccttgatgcgtggatcgcccacggcgccgagcagaatcgcgtcgttggccttgatgcgctcctcttcgtcctcgggcaggatcgcaccatcgcgcagataacgctcggcacccaagtcgaagttctcatactcgaagtcagctacgccttcagcggccttttccaaagccttctgagcccacggagtgacttccttgccaataccgtcgccgggaataacggcgattttatatgtctttgccatagttcaaggagcctactcgcgcgaccacctgccggcccgaacccgctcagctagtggacacaaccaacatgcgtatcgtgtcgagacattcattaggtcattttagtgttcattaggtcggtgtgggttcatttcagggactgaaatggcggcatttcagtctcacatagaagaggacaccgacctaatgaacgacgaaatgacctaatgagcgagccccatcacatccatgcaccaagcgttctcataggaaacctcttcccattgtttgtaacgcccggatagaccgccgtgaccggcctcgacctcaatcttggccaccgcgtccacgccggcggactgcagacgggccagccatttgagcggctcgacgtacagcacgcgggtgtcgttcatcgaggtggtaatgaagattctcgggaattgcgcggcggcgagcgcgccggcggcagccccatcagcactgccgtcaccggcagcctcgtcgtcgccgccctcgagtacggccaccggcacattctcgtatggcgtgtacgacttcatgtactgatacacctcagggtcatgcaacgggtctccccattcgtcccattcggtgacggtcaacggcaagtccgggtcaagaatggaggtcaacgcgtccacgaacggcacatccgcctcaacaccggcgtagcattcgggcgccatattggcaatcgcgcccattagcaggccgccagcggatccgccgttggccacggtgcgccaagcatcagccaaatgcgccttctgcagcgcgcgtgtggcgtccacgaagtcctcaaaggaatgcttcttgttcagtctgcgcccctgttcataccaggcgcgtcccatttcgccgccaccgcgaatgtgcggcacggcgtacagcacaccgcgatccaacatgctcagacgagagaccgagaaccccggatcggaggaaatctcgtatgcaccatatccggtaatgaacatcggcgaatcctgcgccgggcaatcgcggtgccagacgagggaaacaggaatgcgttcgccgtcgcgcgcggtaatccacacacggcgttccatgtaatcgcgtggattgaagtcgcccaacacggtggctcgcttcagcagcgcatcttcgccggtggcgggatcgatttcgtgcagctcgcccgggcgggtatagctggcgaacgagtagcgcatgcgcggcgcctcatacgaggggttgccgccgacgccgatggtgtacaagcgccgggtctcaccgggcaggtggtcgtcgctggcaccatcggaagatgacgtgtgatccgtgggggcctcatcttcggtccacaagatttcgccatgatcgccggtgaagttttcgcgatcggcggcgaccatgtcccagtcgtcctccagggcaggcggcagcaattccgtaaaccgccacggccgtccggccaggaagtcggcggcggccgcgctcttggtcatgtatgccacgtgcggctggccgtcggcacggtagctcagggacacaaagttgcgatgcaacgcgataccttcgatgcccagaccgtgggcaccctgcaatatcgccggattggcggcgttgaagtatgcctcggtaatcggcttatccggctcaccatgttcacagccgtacggcgacccggcggcgatgcacacgccttcgccgagtcggtacggcggctcatggccacgcatgtcaatgacgtcgatttcgaaattcggattggcggcgttgtggtagaccacggcgagtggcacatccgcaccgttctcccccgcgccttcaaaacaggcaaagctcacatcatattcaatatcgttctgacgtggaatgaaggcttggaattcgccttcaggcgtggccaccggcagcatcaacacttcggtggtggttttggaaccggtgccgatcacgatattgcgctcatcaaaactgatgccgacgcccacccagaaccgttcatcggtttctcggtacacgcacacatccgattcgaccgccgtgccaacacgatgccgccacacggcgagcggccgccaggaatcgtccaattccacccagaacacccattggccgtccggcgtgaagcatgcgctgccaatgccggtgaactgttcgggcagttcgctgaccggctccccggtctccagcccggcaaggtcgcggatgcggaaatcatatcgttcgtctcccgcaacatccacgccgtacagcatccaacggccgtccttgctcagatccaagccgccgagccggaagaagtcatgcccctcggattccttgttcgcatcaaaaacgacctgttcaccgggcatggagccgggcgcgccttgcggatccacgaccggcgggtcccagtcatcggcatcgcgcacggggatgcggcattgcacgccatactgtttgccctgctgcgtgcgggtgaagtaccagtaatcgttgatgcgcgtgggaacagacatatcggtctcttccacatgcgatttcagctcttcaaacaacgtatgccggaaatccgccagatgcgccatgcgacgctcgcagtactggttttcggcagctacgtagctgcgcacatcatcggagtctttgtctcgcatccactcgtaatcgtcgtcgaaaacgtcaccgtggaattcgcggcgcttcggctcgcgcttggcgtaaggcggcatcgcggccgcggcgtttgtgctctcgtcagtcataccacgcgattataggcgaggcaccacaccgggacgcattcggcgttcatcacgccgcgcttatcgcaacaccgtcttcagatacggcagcatggtcttcagaatgttcgagccggtggtgccggtgaatactggtacatcggttaccggagtcggctgggtcgaggtgagtcccgtcaccgacgccaatccggttgattcgcgcgggctcaactcacgaatgacgatcgccagtacacgtccgggatatctgcgggcgatggtggcgtacgtggtcgggtccttctgcccgtcatcgcccaccagaatgaacttcatgtccgggaagtcggccataagttgttcggcaaactcaagtttgtgctgggggccggtgggcacgaaggtcttgggcctcgggtcgaggtcgcgcagcagcagcgggccttcgggaaaaccatggtcagtgatgaagttgcgaatcgaactctccacattccagggcgatgtcgaaagatagaagaacggtgcgccggggaacaagtcggcgatgcgggtgaacagcacgctcatgcccggcacggaggctttcttcttggggtcgaggaacagcaggttgtacgcggccttccatggcaccggggcctgtgtgatcatgatggtgtcgtccacatcggagatgatgccgactttggcactggcggggatggtgtacaggttggcgctcacgggtttgcggttggccacgctgtaggagacgcgatggatgccgggcaccagacgatgctcggccacgaggtcgaggtatccggcggaatcggagatggcgtattcgctgccgagatcgcgcgtgcggtccaccttgtcatagacctcggagacgccgatctgcacggtgttgagcggcgtgtcatcaatgctggcctgcacgtgggtgcgcggcgcggatacggcaagcatgccgcggatgccgcggatcagttcgccggattgcgcgtgcttgggggcgtataccgtgcggcagatcagacgcgagtaatcgccggtgccataacccacatagggttccactcgcggataccagccccattggcgcaccacctgagtggagatgtgtgaccatacgccgaacacgcgggtgatggcacgacgtatgaatcgggtgatcggcggcttgacctcgatgcgctcacgcttggagggggtgtcgaacgtcgtggcagccttgcgtgcgggaatcggcacggtgggcatgtcatcggaatgttcagcattgctggcattgctggcattgtcggcgccattggcggatgccttgacgtcagagactggcgcggtggcggacagcgctgcattgcgagcagcagcatcccaaggcagtcgcttgcctgccgcctcaaaatcctcgcgtgggcttctcatagacaccaatataggccatacgcctcattttcttggcttccctccataagaggcacgatgcatataggtttgatgccacatactggctcccctcagggaggggagccatgggtggaactaccgcacgaccttcgcgtattcgtcggcgctcagcagctccggctcatcgtcgtcaagctcgaccttcagcagccagccttcgccgtacggatcgccgttgaccacggacgggtcgtccgccacgtcacggttcacatacttgaccgtacccgccacggggctgatcaacggctggacggccttggaggattcaagctccacgatctcgtcgccggcctccacacgggcgccaggctcaggcaaatccacgaacacaagttcgccaagctggtcggcggcgtattcggttatgccgatgattgcggggtcgaccgaacggtccacccaagcatgctcctcggagtattcgagatggtcgggaatgtcgaggttcagcggctgttcgttttcgttgtcatcactcatagtcataagcctaacctatcttcgcggtccgtcacagctcgcgaccgagccattcctcaatcatgtagcgggcgatggtggcgcggcccggcgccgccatacggccggcgatgagctcggccgtgtattcgtcgcgtgtgacccatcgcgcggtcatggtctcctcgccgtccacatgcacgtcggtggtgatcgcatgtgccttgaacgccatcatcagcgaagccgggaacggccacggctgcgagcccaggtaccgtacctcgccgagcttgatgccggtctcttccatggcctcgcggcggcaggcgtgttcaaggttctcccccgcctccacaaatccggcggacaccgaatacagcctcgaatccttccatgccgcgttgtgttgcagcagcagacgatcgtgcccgtccacgatggcggtgatgaccgccggctccacgcgtgggaacagcacacggttgccgtccgcctcgttggtgcatcgctgcgcccatccggcgagcgccggccggaccgccgcgccacaggtggggcagaaccgctggcggctgtgccagatgcttaaggtgatggcactggtggcttgcccagcctcgcgcgcgttggcgtgaggggcgaatccgcgcaggtccacccagtcgaaccgggtcacggcctgttgcagcagcgtgggcttcggggccaagggctgtacgggcgcgccgaccgaatcatcgaaggcatcgtccgcaccttgccctgccgaatccggtacaccgagcggcccggagattttggctgcggctacgccgccattgcccttggcgtttcccggctgccgtattccggcggcagcacctccgctgatgccgttcttgcccagcgcgccgtccacggtgccggaatcctgggtgccgagcacgccgccggcagcaccggaaacaccagcaatcccgtcaacaccgggaacaccggcttccggcacgcgcgtgatatccacggcgaccacggattcgccgcgcgccccggcataggagccgaggaacatggcgaccgcttcggggtagcgtgccagttcgacggacacataggcgcccggcaacgtggcgagccgcattttcacgttctcatagtccacgagctcgccttggccgcgcggtacggcgacaagtccgccgcgcgtaagcacgactttggtggtcggctcggccaacagctcgtcgatcagaccgggttcaccgcgccggtccacctgatagtcgatgtcaccttgcgcgagcggcaggaacggcagcgcatgggtcagcgccaggggcgaaaaatgaatgtcagtgcccatcgaggtctcctatgcgttcttctgcgcgttctgcacgcgcctgacgagcgagagcagtgctcgcgccacggtatccggatgttcgacggcactgaaatggccgcagtccggaatgtcgatgaattcggcgccggcgattcgctcggcgagcggacgcatcacactcggattgctggaggggtccagttcgccggacaccaccaggctcggtgcgctgatcgtttccggcaccgcccccagttcgggccggccataggtcatgcgctgacgccaggccagaccagccgggttctgttcgttgatccagccggtcatggtcgcgatgaattcagaagtcttcttgacggtggaatcgccatcggccggttgcgcgaagtgcatgaccggttcgaccgagttcgtctgttcggcggcgtccgccatcttcagtcggttctctccgcccacgccgtcggacgcggccatcgtgtcacacaaggccagtccggccaccgtttcggggtacaggcgctggatgtccatcgccacgtagccgcccatcgacagtccgacccagatcgcctgctcgtagccggcggccttgatcaggtccacgtaggctccggccaggcgatccagcgcctcgctgtacgcgccgttcgccatgcgggggccagaatcggcatcgctcggcaccggggatgcgccggagccggccatatccggcgcccaaatcgggaagtccggcacatcgttcaggtcggcggagtcggcgagcgccttcgcgcacacgtcccacatgcggtggtccaccgggtaggcgttcatcagcaccaccggcacgccttcgccatcgcgatagatatgattggccaattcgattgccatgaattactccttcacattcacgtcccaccagcgggaagcaaaacaactgtcagattccggcccaggccaacgcctgccgcacgatgcgaccatgaccgttgaccatctgcgccacgaacgtgttcattacgtcgctcttgggatccacccattccacgtccagcgtctcgtcctgtggcttgcagtcgccggcgatgggcaccacgtagcacagtgcgatggcgtgctggcgcggatcgtagtattcgctcagtcccggcgtggggaagaattcggccacggtgaatggctggagtccgaccggcagcagcggcagggcgatgtcgcccaggtccttggccacattgcgggcgatggcctcgcgcagcgtctcgtggtacagcacacggccggtgatcagcgtgcgttcgatcgacccgtcatcggatacgcgcagcagcgagcccacctgggagatgcggcccatctcatcggtgcgcacgggcacgatctccacgtatgcgatgggcatctgatgacgcgcccggttgatgtcggccggtcccagccagcccggcgggttgccgtggccggaaccgcccccgtggatgaagtcctcgggcgtgatgttgtcgaattcgccgcggccacggccggcatcataatcgccctcgtcgggcacttcatcattcatgactggcatgcatcccattattgcgcgtcacagcgcgccgcgcgtcaccttccagcgaaatcttgggaaacgtttggccggcggcggaaaatacgacacaaatgttgggtggtgctgggaagctggtagccagcagggagccgacggccacgaaccgcacggctccaagcgccaagacgtattgcatgaataaggcaatcgcccggcggccacgcacgagggccgtacggcgacgccaaggaaaacacagaagaagggaacatcatggcaaccaccgctatcacctctgccgatttcgagaagaccatcaccgacaacgagatcgtgttcgtcgacttctgggccacatggtgcggcccgtgccgcgcgttcggcccgattttcgaggcggcctccaacgagccggagaacgcgaacatcgccttcgtcaaggtggatatcgacgccaaccaggatctggcccaggccgccggcatccaggcggtgcccacgctgatgatcgccaagcagggcgaggtcatcttccagcaggccggcgcgctgcaggccgccgatctcgacgatctgatcgcccaggccaaggcactcgacctcgccgccgccaaggccgcccagtccggtgccgaccagcaggcctgagcctgattttccttcatccactgcgccgcctatcatggtaggcagtgtgaaatccaatcaaggagcgcaatgacgagacatgccaagccgacccgtatgctcaggccgttgaacaagcgccagtggatgaagatcgcggctgtggtggccgcggcaggtctgctcggcgcggcgggattggtgtcgcgcagtttctaccatgctgatgatgtgaagccgatttccaccatcacttcgttctcggctaccgattcggccgcatcccgttctgccactcgtggcgcaatcaacagcgccgacaagaacaccacgttcattacggtgaagattaatggcgattcgcgcgtagtacttggcgaaaaagccaacatgaccaccgtcaaggacgtgctggagacgggtgatatcacgcttgacccggatgatgccgtatcgccctcgctgaaatccaaggtcaccgaggccaccgtggtcaccattaatcgcgcggatgccgatgtggagaccaacgataccgagatcgccttcaatgaagtgcgcaaggagaccagcagcctgcccaagggtcaggaaaaggtcgagaccgagggccagaagggcattatggagaccacctcgctggtcaagcgagccggcgacaaggtcgtctcttccaacgtattcgcctcatgggtcaagaaggccccggtggataaggtgatcctggtgggcactggttccaccgagtcgccgtcgacgtcgtcatcatcgtcggccgatctcggcaccactgttccggctggagaagttcagtcctgggcgcatcagtatctgttagacaacgggtatagcgaagcggacttcaccgctgcgaactacatcatcaatcacgagtccggttggagccccaccgccaccaaccccacgtctggtgcttatggcttgggtcaggccttccccggtagcaagatggcttccgccggcgcggactggcagaccaactacaagacccagttcaagtggttcatcagctactgcgagcagcgctacggcggcatcgtcgcagcgtacaactactggatcgcccataacaattactgattgcgattattctcggtctacgcaaagagcctccgccggttggtctaaccaccacacaaggggttaccccctaactttataattgcgtatgcaattcaatatcgctcgcataattcacggagacggccatgacctttaatcggtatatttgctttcgtgccatccttgaatccataggtgccattgcctgcatgctgatggctcttattggcaataacctgctcggagtaatcgtggcagcgatcgcggcgctgttgtggatcggcggcgaagtatggggcatgactgtattccgacggcagaacccgcgacgcgacgagctttccgatatgcatcaaagcgcggccatgcaattcgcgctggtcagtttggtgggcattctggtaattgtcggtttcatctacaccacactgaatttgattgaccgctcgatagttcacattattccgccaatgctactgcccgcattggccatgtgcgccttggccatttccgatattcgatatctatggttggaacacgataccggcaccgggggcgacgatgaagactagtctgaaacttcaccgactccaacgcggtatgaagcaatccgacctcgccgatctggtcaacgtgcgacgtgagaccataggaaggctggaacaggggcaatactgcccatcattgcgtctggccatggatttggcgcgggtgttcggcaccaccgtagaggacctgttcagttttgacgacgagtacgaatcagaatccgagtagcccgtcggcgtgtcgcagaaaaaaatttccctgttgtttaccatgcacgtatcgccaatcaccgcaatcgttggaatagcaacgttttcagaacgtcaggagaccccgccgcaacggtaatgcggcgacaatatgttcgaacgttgtcacatgatgtgaccacgttgtcacaccccccttatccgttaacataattaccccttatataccggcaaaggggggtgtatggttgggggctgtaattgaaaaaaagaccgattttctattgataagaaccgattttttattggtagtaaccggttccattgtggaggttcgaagttatgaagaagaagattatggccgtgctggccgttatcgccgcagttctgggctttggttttgcagctaacaccgctatggctgatgattacggtgcaacggttacttacagcggcaccaccgctaccgtgacgttccctgcaggcacattccaaccgaatgaatccgtcaccgtgtactacgatgatgccatcgtcgccgacgtccagcagatcgctgaagtatccaagacgttcactgccaaggcagatggttccttgactttgctgtacacgttcaaggccagccaggctggcaagaccatcgcggtcaaggctgttggcgctgtatccggtaccaagaccgccaccattcaggttccggcaaccggaaccggtgaccagtccggtaccacgactgctaccaccgccaacaccggtgcggccatcgcaccgtacggtgtggccgttgtgctgcttgccgccgcgggcatcgccctgttcgccgtccgcaagagcaccactcgtcgctgacgtgactgacataataaacggtagacgctgaagcatagttcgcgaataccactgaaccgggagtcgatgattcccggttttttcatgttattgctacggtacataacgcacgcatattcgcgaagaatgctcactggaatatatgagggaatgctcacaacacttgagaagggacgttgttatgcaaatcatgtatgtatgcaccggcaatcaatgccgttccgtgatggccgaatactacacccgagccaagcttgccgaccgaggaattggcttgcagagcggcaatatcaccgtgcgcagcgcgggtactctgcactatcccccgcatcccgctgatccgatggttatcgatttgctgaagaacgacggcatcgacgcgaattcccattcttccacccctctcaccaccgatatcagccggcaagccgacctgattctgtgttttgagcgtgagcaaatttccgatttgcttgagcagaatccactggctattcgcaaagtatttctgttcaatgacttcgtgaacgcttgcaaacatatgcatgctgagggtccgattgctggcgataccgccgcagacaagctcatcgaaatcatggattgcgtacctatgctgcggccgtttttgcctacggcactcgaaaccgaagaccctcatcgtcaatcacgcgaggtgtttgaacgcgtgtatgcggagatcaagcacggcgtcgatattatgctcggcgctgtggcctgaatgcaatatcggcgaatagagcaagcaaaaaggccgtcagttattgcgatgttgaaattgcatattgctatattcaatacggctgatattgcgggttcttgtttccgcttttcttggtattggttaaatcagtgctattcgaggagcgcaatacgtaggtcaaatgttcttcaattatgcaatcatgcatgcatatggtttgtataatgcgaaattagctggttacaattagtggcgtaaataaaaacacgttaccaatgcaataaggagagcaattatggcttcattgcttcagggattcgaagaggttcagctggtcaagccggtgggcaagaccgttctgaccgtcaccgattccgccattcgtttcaacaaagccaccgctgaagtgctcggattcccggcgtacgtcaaggtgctgattaacgacaagaccaggcagatcgccgtgaccccgaccaccgccaaggccgacaacgccattaagttcagcaagcccgaaggcaagcaggctgcttcggtaagcgtcaaggaagccacgctcattgaagcagtgaaggcatacttcactctgcccgaggctccggaaggcgaaatcgcctaccagtccgtcaacggtaccgcctaccccgaaagcaagaccgtgatcttcgacgtggccaacgccaccgctggcaccatgaagcgccgcggccgcaaaaaggccgcctgattcttctgccttgaaatggtgccctgattgaagacgaggggccggaacccgtaaaagattccggctgttcctgaactgcgccccgattgttggacgtggtttattaagggtacctgattaggctgtgagggacatgttccggaattcctccggggtgtgtccctccagtcgtatctggcggcgtttggtgttccagtggatgatgtacgcgtccagttcgttcttgaactgttcgtatgaggcgaactcgcgtccggcgtagaactcgtccttgaggtggccgaacacctgctcggtcgcggcgttgtcgatgcagttgcccttcctgctcatggactggcggatgttcagtcccgcgagccggtcgcgccaccaccggtgccggtactgccagcccatgtcactgttaaaccgatgtcggtttaacagtgaccgcggctgccactaccggtggccggaatggatccgcatctgcacggacaacaacctgacgcgttcgatgagcgcgaaaggctgttctccggacaacgcggccgcggaggggttcttcggccgtctcaagcaggagttcttccacaagcgcagcttcgcgggcgtctcgatggacgggttcatcaa

SEQ ID NO: 3873 - DNA, 13039 bp, Unknown
  R22_24m  MAG No. k141_2944
ccggacgggtcggccttcagaatcgcatccaatcgtccctgacccacaatcacgtgcatctgctggccaagaccggtatcggagaggagttcctgaatgtcgagcagacggcattgcgagccgttgatcgcgtattcggagcctccgttgcggaagatggtgcgggatatggtgacttccgtgtaatcgatatcgagcgtgtgatcggaattatcgatggtcaggctcacctgtgcacggcccaatggcgggcgggaggacgtgcctgcgaaaatcacgtcctccatcgaagtgccgcgaaggtttttggcaccttgctcacccatcacccaggtcagggcgtcgacgatgttcgacttgcccgaaccgttggggccgacgaccgccgtgatgccgggctcgaagcgcagcgtggtggcggaggcgaaggatttgaatccgcggagggtgagttccttgagatacatggcgtgagactgttttccgtatgtcgggcgtccgggtatccgatgtgccttggatgcgggttaccggacgtcggcggaatcgtcggtgcctgtgtcggcactggccgtgccggtgccggcgttaccggcgtcactggcctgttccttgccgaggccgaggacgtcgaacacgtcgaagtcgtccgggctcaccgaatcctcgaggttgtcggcggcctcatcctcggccttgtctgccggccgatccgaatcgtccgggtcgaccgccggctgatggacggccatggcctgcctcatcgtggggctggcatgctcctcaagcatcaggcgtgcgtcgccggcggtgacgaagctgccgcagataagcacgccgtggccgtagcccacgcccagctcgtcctcggcatcgaccatgttgacggcagtctgaatcgcgtcgggcaggttcgcttccttgatcacacggtcacggccgaacacgtccacggcaatcttctcgagctcatcggccggcatcacacgctcgcgccacgagttctcggtgaccaccacggagctcaggatcggctccagaacacccagatattcctcgacctgcttgtcgcgcatcatggcgaccacgccgaccagttgcttgaagtcgtagctttcctctatggccttgcgtagggcttcggcggcattcacgttgtgtccgccatccagaatgatggtcggtgaggtgcggatctgttcgatgcgtccgggaatcttgaccgagctcaacgcctcgcccaccaagtcgccgtccagcgggccattgaccggaatcaccacttcggcggcgacgagcgcggcaagtgcgttatgggcctgatgctcgccgaacttggcaatcggcacgccctcgtaagtgccgttgggcgtggtcagggtggcgacctggccgccgactgcggccatgcggtcggacacggtcatttcgtagccgtcgcgcacgagcatggcgtggttgcgttcggcggcttcggtgagaatcggcatgacggcttcctcatgcggctgaggcccgatgatggcggtgcagttcggcttgatgatgccggccttctcggtggcgatctgttcgacggtgtcgcccagccactgcatgtggtccatgtccaccggaccgatgatggccgcatccgcgttgagcacgttggtggcgtcccacaggcctcccatgccgacctcgacgatggccacgtccacgggcgtgtcggcgaacttccagatggccatggcggtgagcacctcgaagaagctcatcttcggcttgccttgctcctccatcttggcgtccaccagggccacgagatccttggtctggtcccagatgtcgatgaaatcgtcgtcggacagctgctggccgtcgatggcgatacgctcgttgatcttctccagatgcggcgacgtgtacaggccggtgcgcatgccgtaggcgcggcagatggcctcggccatgcgtgcggtggagcctttgccgttggtaccggtgatatgaatcacgcggaacgactgctccgggtggcccaggatgtcgagcatcaggttcatccggtcgagatccagattggtggtgttatgctccggcgggcggctcatgatgtccagttcgacgtcccgcatgctctcgttgttccgattcggatgctcgaatgacatatcctcttctgacctctgctcgtgttgctgttgaaccgttcggagtgcgtatgccacttacgtgttcgtgccattctcgtcatgtctacgcatgcccgcatatattccgcttccgcatgcgcaggaagctcccctcgcacaggtttgccctgcatggttcgggattcttgccttcacgcgtggagccgcactccctcaattccctctatcctagccgccggggtggtttatcgtgcgcgcacagtgaaaccgtctcatatgtcgccgccgcgcgggcggccttttcctgcagcgcgcacagtgaagccatctcatatagttgcaatgcggctcttgccgtcggcatcccattcttagtcggctgcaatccaaaacttgtatgtccggcgacgctgatgctattcagcgtcggtacagtgccagcttctggcggtacaccgacgctatgatgctcttgcgagtcggtagctggccaaaacctggattaatcccgactccatcgcctctcagtgtcgtctcctcgccaaggcatgccattctgccgtcgctgagaaatttcaacatcgtcaatcgaccatgtcttgccccggaaacgactctcacaaacgtccgctacatcatcttttgaactcgcagaggctcattcactgttatgactgctctcaccgtcggcagccgtccaagccctggatctatgccgccaataaattgcagcaaatcgtcggccacgatacaaccattggactcacgccgacgctagattccacactcagacagaagccagccaatatctgaaccagcaccgacggcgtacaaagcataagcaccgttaaccgtcaattcgccgccctctaccagctacatccgtcttcgccgatgatatcttgttcgaatccccaaagcacgttgttcgaatgacattactgatggtggataagttttgtatgttatccactattccgaattagcggcctaataccttgaaattatcgggaatatctcactccaagacagccaagctccgaggctagaaccacaatggctgaaattcatacttacgctgcttcgttccggctacgctcgacgtcatgaagacacacaaagcagtggcctcgctcatatcagccgcgcagaatgagctgagatgcgtctattcaagaaatgaagcggaacagaccgctctacgccgccgtgcccagagtggcgagttgttgaaagtgtatgacggcattcccagtctttatgcaaataccgcatactgggatggtttgacgccgccggagcgaacgttgcatatggcccgcgctcttgcgcaagagcatcctcagtgggtttttggcggcttggtggcagtaagcgcctatggattcgaacatcaatggcatttgcatgatggctgcataaccatcgtgacttccgatcatggatctcgtcaatgccatcagcgcttacgacatgtctatatgcccgatatgaacaatccgaagacacattacgaggcctccggcctatccctgatatcaccggctagaaccttggtcgaggccgctatagaccttgattttcggtttgcgttgccgatctttgactcggcccttgccaagggaataaccaaggaagagatagccgccgactgcgttcaatggagaatcgattatgcccgagtattccgcctgctgcgctatgcaaacgaaaggagcgagaatggtggagaatccctcgcgcgaggcaccatcatcgaggatcgcttcctcacgccgcgtattcaggtaacggtgaccgacccgcagacgaataccgagcaccgcgttgatttcgtatggaagctcgatgacgggcgcgtgatagtggccgaatacgacggcacacaaaaatacgtggacccagccatgaccgataaccgcagcattcaggaggtggtggccaaggaacgagcacgcgacgagggactgaaacgagccggtgccaccgaaatcgtccatttcacatacgccgacgtcatcgaacgcactccgctgcgggtaaaactgctcaaagccagagtgccccagatggaggcatccgcagagcagcgggtcccgtgatgcgatgaaccttcatcgcatgggttcacatggattcagcccgcaaaatatgccaatatcaatcggcaagctccagcccatgcccctccttccctaccgagaacaataaacgggtccgcattccagcccgatgcactcgccatatgggcatgtccggaagaccgtccaaattccgtacttggttttaccgtcagccgtcaatcgtggcacatcgcataaagccgactagtatgaggtgggaatcgatgattcgacaacaactacatacaggagagtggcaatgggtgaagtgatcaccgccaaggacaaggaatatgaggccgaggagcgcgctacggcgccgggcgcgaaccagtcgatgagcgaccgtgtgaacaaccgctcgctgcgcccgcagtcggctgcattcaaggagtttatgaagtccggctgggccgacgatgatccggagatcaagcctctcgaatcctccaagttcacgccagcccgccttgaggcgctgggcaaagccttcccgggcgagcgtctggtcattccggccggccagccgaaggtgcgcaacaatgattgcgattacatgttccgcccggacaccacgttcgcctactacaccggtctgggttccgattacgaggccggcgccgtgctggtcctgaacccggtcgaccccgactcccccgaagccgccgccggcaagacgcacactccggaactgttcgtggcacctcgcgccgacaactccaccgaggacttcttcatgtccgcccactacggcgaatactgggttggcccgcgtgctggcctcaaggagatgcaggcgatgaccggcatcgagacccacgacatcgcccagctggccgacgccctgtccaaggacgtgggtgccgaggccggcgccgtgcgtgtgcgcgtggtcagcgagaccgatcccgaaatcacctcgatggtcgagtccatccgcgaggccaacggtttcgccgatccggacaagaactccgcatccgacgacaagctgcacgagttcgccgccgaggcacgcatggtcaaagacggctacgaaatcaacgagatgcgcaaggccgtggacgccaccaagcacggcttcgaccgtctgctctccgcactgccggccgcgctcgacaagccgcgttccgagcgtatcctcgaaggcgcgttcaacgccgtgtcccgtgagctgggcaacgccatcggttacgactccatcgtggcctccggcccccacgccccgattctgcactggatgcgcaataccggtgtggtgaagaccggcgacatgctgctggtggatgccggcgttgaggtcgattccctgtacacggccgacatcacccgcaccttcccgaccaacggcaagttcaccgacttccagaagcgtctgtaccaggccgtgctggactcgcagcaggccggtttcgaagccgccaagccgggtgccacctattccgacatccaccacgcctgcatgcgtgtgatcgccgagcgtctgcacgattggggtctgctgccggtgagcgtcgaggagtcactgtccccgcaaggccagcagcaccgccgttggctcgcctgcggcgtggcccaccacctaggtcttgatgtgcatgattgcgcgcaggcccgctatgagtcctatcagggcgcgaagatcacgcccggcatgatcttcaccatcgagcccggtctgtacttccgcgaggatgatctgctgattccgccggaataccgcggcatcggcatccgtatcgaggacgacgtgctcatgaccgagaacggccccgaatggatttccgccggcatcccgaagcagatcgacgacgtcgaagcgtggatgcggagccgtaaagcaatcagtccggtggactgattgtaggcgacgccgaacgctgacaagcgcgaggaaaatgaaatcatgcgcgaagcgcaccatattaagcaggctgcccaagccaagtaacccttaagctccctcatcagagggagctccttttttctactaaggaggcaatgtgcctactccggaatttgtgttggaattgcgtaagaagatcggccatgatctgctatggctcaatggcgtgaccggttgtgtactgaacgaacatggtcaactgctgttgggccgtcgttcggacacgggcgaatgggcgatggtctacggcatcaacgagccgggcgaacagccggcggacacggtggtgcgcgaaatcaaggaggagacgggcatcgatgccatcgtcaccgatttggtggccgtcacctcgtcaaacaaggtgctgacctacgccaatggcgacaacaccatgtacatggatcattcgttcctgtgcgccctgaagcccggcggcaatgccgagccgttcgtgggcgacgaggaaagcctcagcgtcggctggttcgatctggatgacctgcccactcccctggcggccagcacgagcgagcggctggagctgttccatacttacatcgagaacaaaaagcacggcgacgcccacgccctgttccagttcgatgggcagcagtactagcggatataaagttagctccctctgacgagggagctccaatgctatgcgattacgcctcttgggctaggagctcgtggaggtgggcgcggtgctgctgctgttcgcgcgggtcgggcacgggcagggaggccagcagcttcttggtgtacgggttctccgggtgctgcataatctggtcggcatcgccgtgctccacgatctggcccttatgcatcaccatgatgcggtcggcgagcatatcgaccaccgccaaatcatgggtgatgaacaggcacgcgaagccgatttccgcctgcagtcgcttgaacagctccaacaccttggcctgcaccgacacgtccaatgcagaagtcggctcatcggcgatcagcagcgacggcttcaacgccaaaccacgcgccaaagacgccctctggcgctggccgccggacagctcatgcgggaaacggttcatgtaggcgcgcggcagctggaccatctccagcaggtcgcccacatagttcttggcctcggccacggaaccgtacttgtggtgcacgagcagcggctcggccacattctccgcgatggtcatcagcgggttgaacgaggagcccggatcctggaacacgaaaccaatgtccgcgcgcttgggcttgaagtcacgctccttgacgccgttcatctcgatgccaagcacgttcagggagccgccggacaccttctgcaggccggcgatggcacggccggtggtggacttgccggaaccggactcgcccaccaggcccagcacttcggagcggtggatggtgaagttcgcgccgtccacggccttgaagtcgggctgcatgagatggcccgggtacgtgatggtcaggttcttggcctcaacggcgatcggctgttcgcgccaatcggccttgcgctcgatcggcttgccctcgcggtcgcgcacgaccagcttctgaccgatgcgcggcacggcacccagcagtcgcttggtgtagtcgtccttcggatggtagaagatctgctccacgtcgccctgctcgaccacgtggccgcggtacatgacgaccacctggtcggcgatgtccgcgatcacgcccatgttgtgggtgatgatgagcacggaggcgtcgaactcgtcacgggcgaggcgcagcaggtcgagaatttcggcctgcacggtcacgtcgagggcggtggtgggctcgtcggccagaatcaggccggggttcagcaccaacgccatggcgatgacgatgcgctgcttctggccgccggagaactggtgcgggtagtagtccacgcgggtttcggcatccgggatgccgaccttcttcaggatgtcgatggccttggcgcgcagttccttcttgtccttcatgccgtgggcgcgcaggccctcttcaatctgccagccgatggtgtacaccgggttcagcaccgaattgggctcctggaacaccatcgcggcctcggaaccacgcacttcgcgcagctgttcgccgctcagggagagcacgtccagcgaatcggagccatcacgcttggacaggtagacggcaccggaggtggtggccgtctccggcagcagcttgatgatggagcgcgcggtcacggacttgccggaaccggattcgccgaccacgccgaccacggtcttgcgcggaatggtgaagttcacgtcctcgacggccttgatggaaccggcgtcggtcatgaaggagacggacaggtccttgatatcggcgagattcttgttgtcttcgctcatctctcactccttgccttccggcttgccttcgccggtccattcggaggcgacgatggtcgggtcatggtcggtgacggtggccggcgggtcgacgttcgcgtcgagttcggcgatcacctcgttgcgtgcggacggcttctcgtttgggtcgacggacgtgtcttcgatcgatccgaccacttcgccggcggacttgcgggcgcgcagacgcgggtcggccagatcgttgagcgattcgcccacgagcgtgatgccgagcacgataagcacgatggcgatgcccgggaacacggcggtccaccagatgccggcggtcacgtcggaaaccgaacggttcaggtcgtagccccattcggcggcggcggtcggctcgatgccgaagccgaggaagcccaggccggcgagggtcaggatggcttcggacgagttcagcgtcaggatcaccggcagcgtgcgggtggagttcttgaacaggtgcttggtcatgatgcgccaggtggaggcgccgaccacgcgcgcggactcgacatacgcggattccttgatgcggatcacttcggcgcgaattgtgcggaaatactgcgggatgtacaccacggtgatggagatgccggaggccaggatgccgctccacaggccggactggccgtgggagatcatgatggccatcagaatggcgagcagcagcgaggggaaggagtagacggcgtcggcgatcatcaccaggatgcggtccacccagccaccgtagtagccggacaccagaccaagcagcacgccggcgaagatggagagcagcacggccacgacgatggcgatgacggcggtgcgggcaccccacaccacacgggagaacacatcgaatccggcggcggtggtgccccagatgtgttcggcggagggcgcggcctgcgccgggaaggacgtgccgtcggcggccttgatctgggcgtggccgtagggggcgatcagcggggcgaagagggccacgagcaggaagaacgcggtgatcgcgagaccggtgatcagcatgcccttctgccagccgaccgccacgcgcagttccttgatgattggaatcttggtccagaacggcgtcttggtgctgacgttgagcttggtgaggcggtcgtcaccggggacggtgatcttgtcggaggatgcggtggtcatctcagtacctcactctcgggtcgataagcgcggcgatgacgtcgacgaggaagttgacgacggccacgatgatggcgataaggatcacgatgccctgcacggccacgaagtcacgggccttcaggtactgggacagcatgaagcccaggcccttccattcgaaggtggtttcggtcaggaccgcaccggcgagcatcagggcgatctgcatgcccatgacggtgatgatcgggatcagggccggccgccaggcgtgcttgttgagcaggcgcttttcggagacgccgcgcgagcgggcggcctcgacgtagccggaattgtaggtggagatgacgttggtgcgcaccagacggatgaacacgccggcggtcagcaggcctagggcgacggccggcagcacggcgtggcgcagcacgtcgacgagcacgttcatgtcgccgagctggatggcgtcgatgatgtagaagccggtcggcgataccagacgggtgaactgcatttcggagttcaggtcggagcggccggaggctggcaggatgttgagccagacggcgaagatgagcttcagcacgaggccgaggaagaacaccggggtggcgtagcacaggatggcgaagatgcggatgccggcgtcggcggcacggtcgcgtttgcgggcggcgagtcggcccaggccgatgccgacgatcagcgccacgatcagggcgaggaaggccagttcgaatgtggcggcaccgtagtgcgtaaggatgctgatcaccggctggttatcggtcagcgtcgtgccgaggtcgccgtgcagcaggccgccaagatagtcgacgtattgcacgatcagcgggcggtcatagccggccgcgtggatgcgctgctggagttcggcgggtgtcaggcggccgcccagggcggcggaaatcgggtcgccggtggcgcgcatcacgaagaacacgatggtgaccagaatgaaaacggtggggataatgaggaggaacctcgtcagcacgaagcggaagaaactacctgacagtcggttcttcttcgtcttggctttcgccggagtggtgctggaggtcgctgtggcgctgtctgacacgcgatgctccttggtgttggtaatcggtatataaagcaataaaggctcccctctccgaggggagctggcggcgaagccgactgaggggagtcatacgagttgggctcccctcagtctgccgtcgccagacagctcccccctcaaagaggggagctcatgctggatcagcccttggtgacggaggcgtagcggaagcggaaggaagcgtcgagggtgacacccttcacggaggtgccggtgacggcgacctgggcaccctgcagcagcgggatggtggagaggtcttcggtctcgagtttctggacctgcttgaggatgtcctcacgggcggaggcatccttctcgccggcctgcttgacgatcaggtcgttgacttccttgttggagtagccgttgttcacgaagttgccgtcgcggaagaacggggacaggtagttgtccgggtcggagtagtccgggaaccagccgagctggtagaccgggtacacaccgtcggaatcgtcggtgaccacgcggtccttggagtactgggtccattcggtggactgcaggtcgaccttgaacaggccgccttcctcaagctgggacttcaaggccgcgtactcgtcggcggaggcggagccatagtggtcgctgttgtactggagcttgaggtcgaccggggtggtgacgccggcatcggcgaggaccttcttggccttctcggtgctcggcttgccgttgccgtcgccgtaggcggacttcagcgtgtcatcgtgaccggccaggccgtccgggatgaaggagtacatcggggtgtaggtgcccttgtagaccttggtggagagctcttcgcggtcgatgaggttggcgacggcctggcgcacggccttggccttgttagcgtcggcgtcgggctgggattcaccgtagggctgaatcttgaagttgaaggcgatgaagcgctcctcaccgcccgggcccttgacgaccttgaccttggagtccttggagaggtcctcgatgtcggtcgggctcagggagcggtaggccacgtcgacctggccctgctggacggccatcttcaggttggaggcgtcggcgaagtacttgacctgcacggcggagttcttggccggggtcaggcccttgtaggagtcgttcttagcgtaggcggcggactcgttgatcttgaaggcggtcagcgtgtacgggccggcgaaggccttcttggagacgatggtgtcggcgtcggtgagcttgtcggcgtcgaaggtatcctcatcgacgatcgggccggcgggactggacatgacctgcttcaaagtcacgtcgaaaggcacggaatccttgaacaccacggtggtgtcgtccttagcggtcacggattcgacgttggcgagcagggagctcgggccgttcgggtcgttgatcttcttgatgcggtcgtaggagaacttgacgtcggaagcggtcaggtcgttgccgttggcaaacttcaggccgtccttgagcttgacggtgaattcggtgccgtcatcgttccaggtaccgtcatcggcggcgatgtccgggctcagctcggaggtgttgtagtcctgggcatacaggaacgggaacacctggatctgcacggcgtaggagccgttgtcgtaggagccggcggggtccaggctggtgatcttatcggtggtgccgatggtgatggcgttgccggaatcggcgcctgcggtggtgtcatccttcacaccgccgcaggcggtcagggatgcgatggcggccacggagacggcggcggccagaatcttcttggaattcaacaggaatcctctctcataacttgtttccacgccatcactgcgggcgtggattaccgcctgactatggtgaggatgtgttactcctgcgtttccacagccatcgacttatgtttcgcttgtggcgaccatggccggttttatgcggtatcgagcagtattacggattcttgtattacgacgtgaataacgttcaaatggtgagatgaacatgctatcatgtcaccatttgaacatgcttgtagacgaatgctttccattcgtcaaccggtcggcctactgctacttgagcttgcggcccgcgcaccacacctgttcgaccgtccaatcggtcggatcggcaaggttgaaatcggcggcgaagccgggggcgatgaggccgataggcaccccggtgaccgggttcggccggtcgaagccgaacgccttggccgg

SEQ ID NO: 3874 - DNA, 6913 bp, Unknown
  R22_24m  MAG No. k141_3176
caccatggtcggctacgagatcacccgccgttacggcgaggaaggtctgccggacgacaccatcgacatgaccctgcacggttccggaggccagtccatcggcgcgttcatcccgcgcggcgagaccatgcgcatctacggcgaagtcaacgactacgccggcaagggcctgtccggcggtcgcatgatcgtgcgcccggaagacaacgtcaccttcgacaagcacagtaacgtcatcgccggcaatgtcaccggtttcggcgccacgtccggccagatgttcgtggccggtcgcgccggcgaacgtttcggcgttcgtaacggcggtgccacgttcgtcgtcgaaggcgtgggcgaccacggttgcgagtacatgaccggcggcactgttgtggtgctcggccccaccggacgcaatttcggtgcaggcttctccggtggtaacacttatgtgcttgacctcgatatgaagaaggtcaacccgagtgccatcaagtccggtgcactgctcttcaagtcgcttgatgccgaaacctccaagctggtgtacgcactggtcaagcagcatgtcgaagagaccggttcccagttcgccgcggccctgctggaggactggaacgaaaccgtcaagcggttcacgcacgtagtgccgaagcagttcgtggccatgacgaaggccatggaagaagccaaggccaacaatgtagatttcaatgcgcccggcgcctgggaaaaggtgtacgagcaggttatggaaggagcgcgctgacatgggcgacccgagaggattcctgaaggtccgtacccgccgagagttggctgaacgccccgttgaggagcgtatcaaggactggttcgacgttcacgccgaaaccggcctgcaaccgtggacccaaacgcaggcggcccgctgcatggattgtggcaccccgttctgcatgaccggatgcccgctgggtaacctgattcccgagtggaacgacttggtccgtcagggcaagtgggaagacgcctacaaccgtctgtccatgaccaacaacttccccgaagtcaccggccgcatctgcccggccctgtgcgagcaggcctgcgtgctcggcatccaccagccgccgaccatgatcaagcttgacgagcagaccatcattgaccaggcatgggatttggactacgtcaagccgctgccgccgcagcgtctgaccgaccagacggtcgccgtcgtcggctccggccctgccggcctcgccgccgcacagcagctcacccgcgccggccacaccgtcgtcgtctacgagaaggacgacgccatcggtggtctgatgcgttacggcatcccgaacttcaagcttgagaagggtctgcttgaccgccgtgtcaagcagatggaggccgaaggcacccgcttccgcaccaacgtggaaatcggcaaggacatcacgtgggatgacctgcgtgaccgttacgacgccgtcgtagtggccatcggctcccgcgtgccgcgcgatatgaagattccgggccgcgagctcgacggcatccacttcgccctcgacttcctgcccgacgccacgcgccgtatcttcggcgtcaagccggtgcacgacatcaccgccaaggacaagcacgtcatcgtcatcggcggtggcgacaccggttccgactgcctcggcacctcgatccgtcagggtgcgaaggacgtcaccgtgctacagatcatgccgaaagagccgtcaagccgtccggacaacagcccgtggccgaccttcgcccgcacctaccagaagacctcctccatggaagagggcggcgagtacatctactccaccgactccgtgaacttcgagggcaccgaagaggagaaggccaaggtcaccatcgacaactcgaccaccgccgaaggcttcgtggccgatgagcgtggtcatgtcaccggcttgaaggtcgtctccgtggctcccggcgaaaatggtccgttcactcgccagcctggcaccgagcgcgtgctgcccgccgatctggtcctcatctccgtgggcttcctgcatccggacaccgagaccatcctcgaccagctgcccgtcgaactcgacaagcgtggcaacatcgctcgcaatgacaagttcgccacctcccaggatggcgtgttcgtgtgcggcgatgccggccgtggccagagcctcgtggtctgggccatcgccgaaggccgctcctgcgccgcagccgtggacgagtacctctccaaggaaaagagcgagctgccggccccgatcaaggccagccagcgtccgatgatgctgcctcgctgaatactttccaaacagaaacatgaaaatcccttcttcatgaggggatttttgcgtttctgggattaattactgccttgagtcttcagtaatgtttatatttcgagaatattgcatacatggttaacatgaagctcctatggtgtctttcgtcgccaaaaagatgacgccaaaatatttgggagagattcatgaacacacgtcatgtcacttcactggtcgcggccggtgcggcaatcgtcatgctgctcagcggctgcggatcgaccggtacctccaattccagcaatgcttcagattccaatatcatttccgtgtacggcagtgagccggcacacccactattccccggcaacaccactgaggccggtggcggcaaggttgtagaccagctgttcgcaggtctggtgacctacgatgcgaagggcggcatccacaacgaggtagcagacagcatcacctccagcgacaacgccacgcattacgtcatcaagctcaagagcggatggaagttcaccgacggcactccggtgaccgcgcactccttcgtaaacgcatggaattacaccgccaacagtgccaacaagcaggccagcgccagcttcttcagcacaatcgaaggctatgatgatctgcaaaagccggacgtggaccccaaggccacgctgagcggcctgaccgttgttgacgacaacaccatcgatgtcaagctcagccagcccgactcggcattcccggtcaaggccggcagccacgcctacatgccgttgcccgaatccgcgttcaaggacccgaagaagttcggtcagcacccagtgagcaacggcccatacaagttcgtgtcctggcagcacaaccacagcatcgaaatggtgaagaaccctgactacaagggcaatcgtgtcgccaagaacgatggcctgaacttcaagatctatacctcgcctgattcggcatacgccgacctacgcggtggcaacctggacttcacgaacacgattcctgacaccgcacttacctccttccaatccgacaagtcgctgaaggcatacaacgagcccggtggcaatacgctcaccttcaccattcctgaatggctggaacacttcggccagaacgaggaaggcaacctgcgtcgtcaggccatttccatgtccatcgaccgcaagaccgtcgccgagaagatcttccacggcaccgccacgcccgccgtcgacttccttgcagccccaatcagcgcctactccaaggaactcaagggaaatgaagtactgaagtacaacccgtccaaggccaaggaactgtgggccaaggccaacgccatctccccgtggagcggtgagttcggcattgcatacaatgctgatggcactgcgaagaactgggttgaggcaatctgcaactacatcaagaacacgctggatatcgatgccaagagcatcccgatgtccacttccgacgaattcctgtccaatgtggattcaggcaagatgacctccgcataccgcagcggttggggccctgattatccatccgcggacaactatctggtacagctgtacgattccagttcggccgacggcaagggcggcaacagcggcaactacaagaaccccgagttcgatgccatgatggacaaggctctttccgccccgtccaccgaggaagccgacaagtattatcagcaaggtgaggagattctgctgcaggaccttccggctatcccgttgtggaaccagaatgccaccgcagccagcacctccgcagtctccggcgtcgcattcgactacggcggcggcccagtgttcaccgcactgaccaagaagcagtaagcagtaagtaataaacagacagcgctagcccccccgctggcgggggctgtcggcaaagccgactgggggtggtctcaaacagcagaccacccctatcttgttatatgagcgagctcccgtaagcgggagcaatcgagaacatacaggagcacattaactatggaattcaccgtatccggcactaccgtgcgattcgatgaacgaacaatgcagttcgcttttacgcgcgacggtgccgaatggaatacctgcgctgatttcaagccgaccctgcaatgcgcgcaaggcaccttcgcgttcgcggatgccacttccatcacccatgagcagcgtgaaaccggcacgggaaccggcattcgcagcatcttcaccggctttgggcacagcgcatactcctttgaaacctatgtatgggtggagcgtgcctcaggcgatgtgctcttcgaatggattccgctcaatgagcaaggcctgaacatcaccaatgtgacgtggcccgcagccatggacttcgattgcgccgatgaccatgacacgacactcatcacccatgagcaaggtgtgatgatccccaacacatggcctaccgccgtgagcaccaaagatatcgccttcgacggtcgcttcgaaacggctggcggttacatgccgtggttcgcgcagctccgcgcagacggacacgggtatatcgccatctgcgaaactccatggaatgccggttacggcatcgaccatcccagcgatggcccgtacacccatatcaatacttggtttgagccaagcctcggcacactgaattatcgccgcgtggtacgctaccagttcctcgaccacgccgatcacacggcggtgtgcaaggcctatcgttcgtacgtcaatgaacgaggtcgcttgcgtacgctcgtcgaaaaggcggcgcgcaatccctccgtgcgtgacctgattggtcgttcatgggtgcacatcggcatcaaaaccaaagtacagcccgactcgtactactacgataaggaccaccccgagaaaaacgattcattggtcacctttgcgcagcgcgaaaagcaaatgcgaacattgcacagcatgggtgcaggccgactgtacatgcacttggatggttgggcacagcccggatacgacaacgcacaccccgactatctgccggcttgtcaggaggcaggcggctgggaaggcatgaagtcgctggtcgacgcctgccatgagcaaggcgatattttcggcacgcatgaccagtaccgcgattactacttcaccgcgcaaacctttgatgccaacaatgcgattcggctggcagacggtacgatgcccgaacacgcacgctgggcgggcggccgccagacctacctgtgcgccgagctcgcaccggactacgtacgccgcaatttcgccgaaatcgccgcgcatggcatcaagctcgactgtgcatacttggatgtcttcacctgcaacgaaggcgacgaatgctcgaaccccgaacaccgcatgacccgccgcgaatgctttgaccgccgcgccgaatgcttcgaatatctgctctcgcacggcatcctctcctcgtccgaagaggtatcggactgggcagtgccaagcctgatattctgccattacgcgccatacgacttccagatgcgctcacccaacgagccgcgccaaggtgtgccggtgccgctgtataacctcgtctaccatgattgcgttatcgagccgtggatgatggagcgtgtggtggacggcgacgattacatgctgtacgccttgctcaatggcggagctccatacctgattcgcgatgccgcatacatcggcgttgacggcgacatggacgacgaacagcgcgctcgcacggaaaacgacatcgaacgctgccatacggtcgctgcattccatgagcgggtcggcatgcaggaactggttcgtcacgagttcgtggatgatgatccgctggtgcagcgttcggtattcgcggacggcactgcggtcacttgcgacttccatacgcaaacctatcgcatcaccgattgaccgcatcactgactgaaaaaacaatgacacacagtgggttccgatggactggtggcaaattgccgccgataagcgggtaatatagccaacagtgtcaccgtcgaaacaggagtagtgaaatgccgaatcgtgcagaacgccgtgcccaagccaaagcaggccgcaggggagtgccgtcgcagtatgaccagacccgtggccgtggccgttcgggaatgattgacgaatatcagctgcagcagaagtcccagcgtctgcaggacggcaccgacggcaccgaatggaagcccagcggcggtacgattgcggaccccgaaaccctgctgaccactaacccgaactacacgaatccgaagatgttcaaggcaccgcattcgctgcgtcagtggttccgtgtgggcagctggacgctgatcgctatcgcgattatcgcgttcttcgtggttatgtggctgccaagccatccgatgtggctggtcatcaccgtttccgcggtgttcattgtgggtgtgctgagcctgttcttcaccgctggcgattccaagcacaatccgaatttggatcagaacggcacggcagtctgatcttttgcccggtaaatccggcttgaaaagcaaaacgcacgacggaagttgtgcgttttcttgtatgcggtgccctaaagtaagaagtgcttgagtttctttctgacgcacgaaggagaggcagtccgatgaaagttgatattctaacccg

SEQ ID NO: 3875 - DNA, 10160 bp, Unknown
  R22_24m  MAG No. k141_3773
tatcttctccgaaggcgataccgatcagcgcatgtatctactggagcaggggcgcgtcaagctgattcgcacttcttccgatgaccgcgtgcagctgctgtccatccacgcgccgggcgaagtgcttggcgagattccggtattcgaccctcatggtggcccgcgcactgcgtccgcggtgtccatgagccatggcacgcgcgtggtctggctggagcatgatgccctgttcgcatggcttgatgagcatccgcgtgtggccatcgacatgttgcaggtcatggccaaccgccagcgcggcaacaacgaacgcatctccgacttggtattcatggatgtgccggcgcgtctggccaagacattgctcaacttgggctcgcgtttcggcgagccggtggaacagggcctcaaagtgccgcatgacctgactcaggaagagctggcccaactggtgggctccagtcgtgagaccgtgaacaaggcgttgatggacttttccaaccgcggatggatcgcacgtgacggtcgatcgatcatcatcttccagccaggcatgctgattcgacgctcgcggcgctgaccgttcggctgacttccagccaatgttacgctagtgcggttcttgtgatgatatgttcacggaagctgactgcgagcccggttggtagggcaccccatttagaatggggcccatgcccaaaaagaagtccctcactctccaacgtgtgcttgttctcctcttggcctatatcatgcttgccgtctgcggtggcgtggcggccagcgtgttgtttgtaccgggtgtggtcggtgccaataaagccgccaaagcggtgattccgtcgctcaaggtagaaaacgtggacttcgacgtgaccggtctgccccagaagtcgacgatgtacgcgcgagacggttccaccgttatcgcgacgttctacaaccaaaaccgtatcgtcgtgccgctgaagaagatttccaaaaccatgcagcaggcagtggtggcgcgcgaggaccgtcgattctggactcacgccggcgtcgacgtgcaaggcgtgatgcgtgcgttcgtgcagacctacctcgtcaaaggctcccagcagggtggttcgtcgctgacccagcagtacgtcaagaacgtgctgctcatgcaggcgatcgaggacgacgacccgatcgcccagtaccatgccaccgaagacaccgtcgcccgtaagattcgcgagatgctgatctccgtgcagatggagaagaagtattccaaggccgagattctgcagggctatctgaacatcgcccagttcggcaacaacctgtatggcgtggaaaccgcagcccagcgctacttcagcgtgtccgccgccgatttgaacgtggtgcagtccgccaccatcgcggctatcaccaagaacccgagccagtacgatccgctggtcgaggagaaccagaaggaaagcgagaaccagcgcaacatcgtgctcaagctgatgctgcaggaggggtacatcacccagaagcagtacaccgaagccgtgaacacgccgctgaaggacacgctgaaggtgcaggccgtgaacgtcggctgccaggacaccggcgactacgcatacttctgtgatttcgtggtgcatcgcatccagaactccgaagaattcggcaagactcgtgcggagcgtaacaagctgctgcaggagggtggcctgaagatcgtcaccacgttggatgtggaagcgaattccacgatgatggagaccgcgcgtaataccattccaccggacgatcccagcggcatggaaatagccatggccgcagtcaaaccgggaaccggcgaggtgctgagctttggcctgaatcgttactatgacgccactccggcagccgcgaacgatccgaccaagtcgggccagaactatgccgtcgatctggtggacggcggcggctccggttggaccattggttcgtcttggaagccgatcaacctgattgcgtggatggaggcgggtcattcgatcaacgacaacctacagaccaccacgacgtaccccacgaccgacttcgcctgcaacaactacaagggcggtgccgattcgtggaacgtgtcgaacgccatgggcgccggcacggtgaacccggaaagcccgttcctcggtctggtgcgatcgcacaacaccacccaggcctccatgggcgccatcctcaaactgtgcaaggtggcggacaccgcgaccaaactgggataccatgacgccgccacgggtgagaccatcgacaaaacccaggtgtatacaccatccatgatgatcggctcggtgaatgtgtccccgctgaccatggcgagcatcttcgccgtatacgcctcgaatggtgtgcaatgcaacccgattgccatcagcaaggtgaccgataaggacggcaacgatctcaaggttccatccgcgaactgccatcaggcggtggataaggacatcatccaaacactcgcttataccctgaaccaaggtacggtgcggccggatggtgccggttggtcattcagattggctgacgggcgtaagtcgtttggtaagaccggtaccagtgaggatcttgcggtgtccggtggatcgttcattcctaatcagattgcggcgttcgctgtggtcggcgatgcacagaacccgtacaccaaccgtatttccaacattgccatcaatggccggtacaacagctattgggatggttcgacaatcgcagctccggccgttaccaacttcttcaatagctacatttccaagaagaaaataccgattgacaacgattacggccagcccgtctcgaagtacaccacgactggcaagtacctgggcattggcggacgaacgttcagcgtgccgcagaccactacgaatggcaacagccaatcgcagacgaccaccaatggtcaatcccagtcgcagtctcagtcgcagaacactgggcaaaacaacacccaaacccagggcaccaattcagagcggtcgaatgatggccagtgattggtgattggcgtttgacatttggtgattgcaggccggctgagtctacgtaacatagtcgactgcgatacccaaattacgtagtttgcgggcgttacctgtttcaggtgacgcccgttttacaatacttaatgacaacgccagcgcgttcatcgaatattcgccatgaacgcgcattggaaaggggaacgatgagcgacgacgatctgacgcatgagaattttgattttcgtggattcgacgtgccggatctcaaagcggtgacgctggcttcgtcttcggacggcgaacagtccaagcagccgaagaccaagcacgaggatgcatcgaggaaccgtaggcacggtaagaagaagtcaaaatccgacgcacggtccaagaagcgggccggcgcgggcaagacgagcgaatcgttcgatgattatgaggattatgaggattatgagggaagggaagctgtgagcaaggcagataagaaagccagcaaggaccgtccgggactgtttgcgccaatgacgctgcgcgaagtgaccgtgcgtaatcgtatttggttgccgccgatgtgcacgtattcgtcgttcgcctgcgatggtaggcccacgccgttccactaccagcattacgtgtctcgtgcgttcggcggattcggcatggtgatcgtcgaatccaccgccgtggctcctgaagggcgtatcacgccgtgcgatctgggcctgtgggaagacgggcagattgatgcttggcgctggatcgtggacggtattcgcgaggcgggtgcggtgcctgccatccagctcaaccatgcggggcgtaaggcttcgaccggttgcttcgccgttggttacgacggtcagagtgtgccggaggaggcgggcggctggcccaccatggcaccgtctgaaatcgcgttcggcgggctgcgtacgccgcgcgcgctgtccgtggatgagattcatggtctggtcggtgcgttcgccgcggcggcgggccgtgcggtggccgccggcttccaggctattcagattcatgctgcgcatggctatctgatttctcagttccttgacccgctgagcaatgagcgtgatgacgaatatggtggcgatttgaccggtcgctctcgtttcctggtcgaggttgtggatgccgtgcgcggggccgtccccgagggcgtgccggttctggtgcgcatttcggccacggattgggccgctggcggttgggatttggatcagaccattgcactatccaaggtgctgaaggagcatggcgtcgatgtgatggacgtgtccactggcggcatcatgtcgggagtgtcgattccggtcaagccgaactatcaggtgccgttcgccgagcaggtcaagtccaaggccgatattccggtgaccgcggtgggtcttatcaccaagccgaagcaggcggccaagattttggcccgtggcgaagccgatgccgtggaaattggccgcgccgcattgcgcgatccgtactggccgttgcgtgcggccaacaagctgggcataccgtccacagaggtcccctacgccccgcaatacgtggccggtgcgtactgaatcctcatggggcggtgactttcccatggggcggtaaaaccctcatggggcggtaacccaaaacggcggtattctgcggaatgtgaaatttggctaaccgccccatgggtaatagggcaatatgtgagttcactccacgtccacgccgacggcgtcggagacgtgctcgaatccgtcgcggcgcagcagctgggccagaccgcgcttcaacacggtgatctgctgcgggcctcggtacatcagcgagctgatgaacatgactaggctggagccggaacgaatcttcgcataggcttgctcgggggtaaagacgccaccgatgccggcgatggcgaaccggtcgccatactccttatacaccttgcgaatcagctcggtgctggcgttggtgcacgggccgccggacaggccgccctcccaatcgcgcggaatctcgaggccggtgcggtccttctgcagattggcgatggacagcccctgcacattgtgctcggccagcacatcgagcagctccttgtactcgccccacggcttgttcaacggcatcttgaccagcgtgggctgcgggcggtcgatcttgtcgagcgccgtaaacagacagtcgagcgcttccggagtcgcggtgaacggttcgccgacgtgcgtgttcgggcaggagacgttgacctccaccatcgcggtgcggccggcggcgcggcgcatcgaaatgcagtaatcctcaatgccttcgtccaaatcgccgcactggtcgtcgttggtgcgggcgatcgacacagacagctgcatctggcgggcctgagtccaagccttctcggcgcgctcgatgaccttgtccgaaccgatgttggcgaggccgacgtgcaccatcatcgaatcgtattcaggcagacggtggaaccacggcttggcgttgcccgggcagggacgcgaggtggtggagcctacggtttcaaaaccgaagccggcatggtccagcaccacgggcatgtcgcagttcttgtcgaggccggcggacaggccgaacgggttggtgaaatcgacgcccatcacattcgtttccagaatggggtcggtgtagtcgagcatcagctgctcggcgagcagcagcggcgggacgttcttgacgacgtggcagaactcgatcatctgatcgtgtgcctcatcggggcggtggttgaacacgaagttcggtttgatgatgtgcttgtagccgaaggtgaacagatcggtggtggctttgttgacggcgtcgtgccagaagctttcagaaacgtaagtcataccgcctattgtctcacgcttgggctggtgcggctaggcgattcctgcctaggcgaattggggaaggggctaccgcgtgtcgaggcgcacgcaggcgtcggctcggcagaagatacatgaatcgggatgcaccaggtatcaggcgtgactcgccgctgagcaacgcgctcgggagagtcgtcggtcgtgagtcatcgcgctagtggtcgctgcgagaatatcggttcgcacaatgtgcgattttgcgcggttttgtggaaatgaacacctgaattgcccggaattttcgagagattgtccccaaaacgctcaagccggtttggtttgtgagcttttgtgtgcgataatgttcacatgatttcgtcacaacgtcagcacctcatcttgagcaggttgcgcacgcgcggggcagtgcgcattacggcgctatcgaaggaactgggtgtgtcagcgatgaccatccgccgcgatatcgccgaacttgccgacaagggactgctgaagcgcgtccatggcggcgcggtgactaccagtaccttgctcagcgaacccctgttctctgtcaagtcccagatggatctcggcctgaaggacgccatcgcccaggaagccatcaaatatgtggctcccggcgatgtgatcgccatcggcggcggcaccacggcctatgtcttcgcccagcatctgctcgaatcgcagcagtccagcggcatcaccatcctcaccaattcgattcccgtggccgaactggtccaggccctcgaatccaaggacgtggaggtgatcgtcaccggcggcgtgatcacccgatcgaactcgcttgtcggtccgatcgcggacaaggtcgtcgcctcgctgcgtgtcaacaccgtattcctcggcacccactcggtgtcgattccccgtggcttcctgatgccgaattcgctggaagccgcaaccgatatggcgatgatggacatcgccgatcgtaccatagttttgaccgatcacaccaagtggagctgcacatcgctgtcgctgtttgcgcgcttcgaccaggtggacacggtcattactgacgacgggctcgatcccgactccgccgccaaaaccaaggatttggtaaaggaactcgtgctggcccaccagagcgagatcattgaggaaagtgagtaaacccatggctgatttcgccaactacacccccggggagtatgcgaaggagcacatccgcatcacgccgacgacgcttgccgacggtcgtgacttcttctacctggacgacgaccccgagttcgtctccggtgccaagacccgcgagctcaaggacccgcgcccgctggactaccgtttcgccccgcacctggacgccgacggcaacgaagtgccgtacgccgccccgcagatgcgccgcgacccgctgaccggcgactggatcccgatggccaccgcccgtatgaaccgcccgatcaccgccggccccggcgccaccgccaagggcaacccgctggccgcccgcaagcccggtgacccgtaccaggacggcgaagtgccggacaccgactacaacgtcgtcgtgttcgagaaccgcttcccctccatggtgcgcgtgcccggcgtctccgaggacgtgacctacgttgacggcaacccgctgtgggagaagaagctcgccgccggccgctgcgaggtcatctgcttcgacccgaacgaggatggcctgccggccgatctgccggtctcccgcctgcgcaccgtggttgaggcatgggccttccgtaccgccgaaatctccaagatggaaggcatcgagcagatcttcccgttcgagaaccacggccaggaaatcggcgtctccctcgctcacccgcacggccaggtctactgctacccgttcatcgccccgaagatggagaaggaactccagcacaccgaggcctaccacgagaagaccggcggcaacctgcttaaggacatcatgaacgccgagctcgaagccggcgaacgcatcgtgatgcgcaaccacagctgggtcgcctacgtgccggccgccgcccgttggcccctcgaggtccacgtggctccggtgcgcgacgtgctcaccctcgaccagctcaacgacgaagaacgttgggaccttgcctccatgtactcgcacctcctgaagcgcggcaacgccttcttcgacaagggcgacggcaagggcatggacctgccgtacatcgctgcctggcaccaggccccgatccacgacgcccgccgcgagaactaccgcctgaacctgcagttcttctccttccgccgcgccgccaacaagatcaagtacctcgccggctccgaatccggcatggccgcctggatctccgacaccacgccggaactcatcgccaagcgcttccacgagctcggctccatcgacatcgccgactgatagaaagaaaacatcaatgactgctgttgaattcattgagccgctgacccatgaggaaggcgtctcgcaagccaccaagctgttcgtcgatacctacggcgctgcgcccgagggcgtgtgggctgctccgggccgtgtgaacctgatcggtgagcacaccgattacaacgccggcctgtgcctgccgatcgctctgccgcaccgcactttcatcgccctgaagccgcgcgaagacaccaaggttcgcgtcgtctccggcgtggctcccgacaaggtcgccgaagctgatctcgatggcctcaaggcccgtggcgtggacggctggtccgcctacccgaccggtgtggcctgggcgctgcgtcaggctggtttcgacaaggtcaagggctttgacgccgccttcgtctcctgcgtgccgctgggctccggcctgagctcctccgccgccatgacctgctccaccgctctggctctggacgacgtgtacggccttggctacggcgattccgacgccggccgtgtgaccctcatcaacgccgccatcaagtccgagaacgagatggccggcgcctccaccggcggtcttgaccagaacgcttccatgcgttgcaccgccggccatgcgctgctgcttgactgccgcccggagttgaccccgctggagaacgtctcccagcaggagttcgacctcgacaagtacaacctcgagctgcttgtggtcgatacccaggctccgcaccagctcaacgatggccagtacgctcagcgtcgcgccacctgcgaggaagccgccaagattcttggtgtggccaacctgcgtgtgaccgccgacggcatctccaaggccgatgaccagttccaggccctcaaggaaacgcttgacgccctgcctgacgagaccatgaagaagcgcgtgcgccacgtcgtcaccgaaatcgagcgcgtgcgttccttcgtgcgtgccttcgctcagggcgacatcaaggctgcgggccgtctgttcaacgcttcccacgattcgctggccgccgactacgaggtcaccgtccccgagctggacatcgccgtggacgtggcccgcaagaacggcgcctacggtgcgcgtatgaccggcggcggcttcggcggctccatcatcgctctggttgataagggccgttctcaggaagtcgctcagaagatcgccgacgaattcgaaaatcaaggcttccacgcaccgcgcgccctggccgcgtacgcagcgccgagcgcttcgcgcgaggcctaggacaacccggtgggttgtccggcggatgcggtcgaggtcgagccaataggcgaggccgaggtaatgctgggtcggccgtaggtcgtccgtaattgcaggaccgcgtgcgcagcgccgagcgctttgcgcgaggcctgagccattgcaagctccctctgacgagggagcttcgttttatcccgcaccaccaccatgcccgccggcgcgctgttctttaccatcggcgtcaactcgggcgttgtgctggtgttctccttcatgttcaagggcggcaaacgatacatgaatcggtaatgaacataatggcgggtgtcttccctataattgggtagtcacccgctttttgtatacgaccagggagagccatgaacaaggcaatcatcaccgtcgtcggtcaggacaccgtcggcatcatcgcacgcgtttgcacctacctgtcccagcacaacgtcaacgtgctcgacatctcgcagaccatcatcgacggttacttcaacatgatgatgattgtcgactacgccaacgcggacaaggacttcggcgcgatggtcggcaaccttgaggacctcggcgacgacatcggtgtgcgcatccgctgccagcgtgaggaa

SEQ ID NO: 3876 - DNA, 4126 bp, Unknown
  R22_24m  MAG No. k141_3930
ccttcctcacgggcggccgcttccagcgcagcaggctcatccacgtgcgagacgcgaattgtggggcagatacccgccgaatacagcacgtcacggcgaggcttggacttggaagcaagaattagcggaatggacatgacttaagtccttatgctcccgctggcgggagctgtcgaacgaagtgagactgagggtggtctctgccggtatggcggaccactctcagaccgcctgcggcggccagctcccgccagcgggagccttctcctcgacttagcgacgctcgatttcgacgccggcggtgttgatgggcaggtgaagcacacgccagtggccggaagcaagctgctccgatgcgatctggtcgatggcttcgcgggcgttgccgtagtgcagcacgagcacgcaggggccggcaccggagacggcggcggcatagcccttggagcggaagagcgcaatgagctcggtggacggcggcatcagggtaccgcgatacggctggtgcaacttgtcctgcgtggcggtgaacagtagcgcgttggactgggcctgagcggccgcaagctcgtcagcgaacggcgattcacgggttccgccagcgcaagcgcacgtatcggcatcctgagccggggcagcggcgacgccggacttgccctgctgggcggcctgggccagcaccatgggattcatcgcagcgggcagcagacccacgcgagacacgttgtagacggcgtccttgtatggcagttccctaggcagcgcctgacgggccttctcagtggacagctcatagtcgggcacgaacacggcggcggtgatggacgggtccaccgggtagttgacggcgtggaatccgccgtgcagcggttcaccaccaggaacggcgaccgagccgacgccttccgcggtttcgaagtcccaagagacggtcaggccaccgaacacagccggggccacattgtccgggtggccttcgatctgggcggccatatcgaagatggccggacggttgaggtcaccggtctgggcgaaggccgcggcggcggcgatgccggccacgatggcctcggcggaagagcccatgccacgagcctgagggatgttgttggtcgcttccagcgtgaagccgagtcggccgaggccgaacgtggcacaggcacggcggaaggtggagaccacgaggtgggtttcgtcgcgtgggagggtgtcggcaccctcgccgtggatgatcacgtgggcaatgccgtcgttcgggtcgtcgttgagcgtgaaagtgagctcgtcatggtagtcgagcgccagacccacggtatcgaagccggagccgaggttggcggacgtggcgggcacgcgcacgtgaacgctattgcagattgggttcatggttgttccttaaaaaggagctccccttgtcaggggagcttgggtattcagctttcaactcacgggcagccgttcgaccgcctcatcagagggagcctagacggtgtcagtccagcacgcgcaggatggacgggtcaccggtgacgaagtcgagcgcctgcacggccttgacggtgttgcgcagggtttcctcgtcggtcaggtgggtcacgatgcgcaactgctgaatctcgccgtcgtagccggggtcggtcatggtgggcttcagatcctggttcacaccgttgatggagacaccgttcttggcgaactcggcggcgatggcggccagcacgcccggcttgtcgtggatcaggaagcgcacggcgaatgcagccttggaggcggtaatcggagccttcggcagattcttgtacagcgggatggacgggccggtgcagccagcagcaatgtggcgggcttcggtcaccacgtcgcccacgacggcggaggcggtcggagcgccgccggcgccacggccgtagaacatgaggtcgtcggcggcctcggccttgacgaacacggcgttgaaggagccgtgcacggaggccagcgggtggttctcgtcgatcagggccgggtagacgcgggcggagacgccggcctcgccgttctcgaccacggcgagcagcttgatgaccttgtgctcggcggtggcggcggcgatgtcgtcggcggtgatcttggtgatgccttcgacggacacgtcgtcgatggtcacggaggtgtggaagccgagggtggccatgatggcggccttgttggcagcatcgtagccttcgatgtcgccggtcgggtcggcttcggcgtagcccttggcctgggcgtccttgagcacgtcgtcgaactggagacccttggtggtcatctcgtcgagaatgtagttggtggtgccgttgacgatgccgagcatgctggtcaccttgtcgccgaccagggactcgcgcagcgggcgcaggaacggaatcgcaccacctacagcggcctcgaagtagatgtcgacgcccttggcctcggcggcggagtagatctccgggccgtacttggccagcagcgccttgttggcggtgaccacggaagcaccggattcgatggcggcaagcacgaacttgcgggccacggtggtgccgccgatgagctcgatgacgatgtccgagttggtggccacgctcaaagtatcggtggtgacgatggactggtcgatccacgggaacttctcggtttccttcgggtcgaggcaggcgacgccggtcagttcgatcgggcggccgatacgagcggacagttcgtccttctgctcgacaatcaggcgggcggtctgggagccgacggtgccggcaccaagcaggcctacgcgaatcggggtttcgctgttgtgagccaattcagggtccttccaaaaagttttctatatcccacgcctattttacggattatttccgacagcagaccgaaagtactcatcaagctgacggcccttttcgtattatgacggttttggccgcacattacagactgtcaggcgctcacctctgcacgctgattactcgctgacgtcgaggttaagtaggtcgtctacggtctggcggcggagcatgacgtgcgcgccggcctcgctgacagcaaccaccgccgggatcagcgcctggttgtagttgctggccatggtgcggccgtatgcgccggtaaccggcacggcgagaatgtcgccgcgcttcaaatcggcgggcaactgcacctcgtgaaccacaatgtcgccggattcgcagtgcataccgcacacgcgggcgagcatcgtttcagcggaaccagtgcgattcgccagacgcgcggtgtagtcggcaccgtagagtgccggacgaatgttgtcggacatgccgccatccacggacacgtacacgcgctcggcaatcgaattgccggcactgtctttgacatcggacaagtgcacgtgcttgatggcgcccacgcggtacagggttacgccggcgggcgccacgatgtagcggccgggctcgaagctgatggccggggcgggcatgccgagcgcacggttggtgctgttgaccgcatccgccaagcgagtgagttccacgtcaatgtccattgaatcttcgccatcggtgtaggccacggagtagccgccgccgaggtcgatttcgggcaggatgtaggcgtcggtggcccacagggtcttgcgcagcagcatcatgcgcttggccgcgtgaatgaaggcgtccgcatcgtggatgttggagccgatgtgcgagtgggctccgaccagttcgagtacgtcctggtcggcgaggatggtcttgagcacggcgatggacggaccgtccgcaatggcttccatcgcggcggccagcgccttgtcggtgtcggagacttcctcgtggctcaggtcgtacgggtacttgacgtcgtagtgcagctcgcgctctgatttctcggtcttttccgcgccattttccagggaatgcgtcgcagagatacgcgcgttggtagcggcaggcgtcacgtctttgaggtcgttcagcacatcgagcacggcggcgtcggccccggcggccagcagcggcacgccgaacttctggtcctcgtgagcagtggagatgtactcgtggccgccggcgtggacaccgacggtgacgcgcagcatcacacgggcgcgtttgccgagcttgcgggcgatggcggc

SEQ ID NO: 3877 - DNA, 13024 bp, Unknown
  R22_24m  MAG No. k141_4067
ggcctgctcaacagtccaccactcggcagtttcgtaactcatcgcttcgcctcctcatcgacccactgggggcgctgcacagccggcacccccagacccccgcgtctggcacctgcggtgcggctactcctccccatcatgccggtgttttggcccggcatcgaatcgaccaactcaggagccagcccttccgcatcgacgtctatctcactcagcgaatcgaccacgcgcccggtcaagaacaggctcagcatgcgcgggctcacacccgcccaccgggccgcagcagccatcgtcatcgttctcatctccatctatcaccagtccctccaacgaagaaggcgggagtccccacgcagtgaagaccgcccgccatcgcctcaaatcatcagcgctcatcgtctaaaaccggcagcggcagcccgccgctcaagctcgacgcggaatcccgcaccatctgacatccctgctccttgaacgcttcggccttcagatgcgccgccttctcgatgttctggcgcagcttctccgtttccgcttcgtccatcttccgctgacgaacgttgaacgtgtggataagtcccgtcagcacgcggctcaccgtcatgtcgtgcgccgcgcaccacgtcctgaacgccgtcagttcctccaatgggatccgcgcgttcagccttcctatctgcctgtccatccagtttcaccaccgtgtaacgaggcccgaagggcggccagccgccgtcgatggcggccagcatccacatcagggcgatggggcagagcacctgcccgatgatcaaaacagccagaaccgcccacgccatgtcacttctccgccaaggcgtcggccacgatgctccatcccagacggttggcgctggtcacgtaaggcgtgaccgtcacctgaccggccagtttcaggtcgaaggtgcgtccgatcttcgccgctggcttgttcttgaccttcagcgaaaccgcgtccatctcgcgcccgctctcgcggtcgagggccgtcaccctcaccctgaagaccggcttgccgtccaccagcttcagctcggcggaatcgcgggagaccttctgtggctccaacgccgccgggtcgagatcctgcagcatcgcgaactcgaaaaggccgctgacctgctcggcgttcatcctgatcttcatcgttccttaccaaccttccgtccgaggcggccgccttcggtggcctgcaatcctcgcaacgttggcaactagatatcagggcgcttcacggcaaaatcgacggagatcggcaagaaaacgagaaaagtgacgaaggtcacacctttacggttccggaacggtggaaaggtgcgggaaacattgagattccgccgtttgtgaggcttctgcaacaccgcatatggcaaggttacacagacttacacaaaaacgcttatcgttacacaaaatcttacacaaatcgtcgttacacactcgttttgtgtaagaatcaggccctttccggatccttctgaagcaccaaaaacacaagagccagaaccagcagaaccccaatcgagagaacgcctagcgaggggtttccggtgatcgtcgtcacggtcgccaccatgaacgaaccaaggatagatgcacttttgccgaagatatcgtagaagccgtagtactcgttggcgtggtccttggggatgatcttgccgtagtacgagcgggagagcgcctggatgccgccttggaacatgccgaccagaatcgccagaatccagaactccacggccgatttcatgaagaacgcggcgaagagcacgatgcacatgtatgctacgaccgccgccgtgatcatcactttgcagccgagccggccggccagacggccgtagagaatcgcgcaggggaaggccacgaactgcgtgacgagcagtgccaccaccagctgggtggagtcgatgccaagctcggcaccgtaggaggtactcatcgaaatcaccgtgttcacggcgtcgatgtagaagaagaacgcgatcatgaacatccacaacggcttgttcttcacgattttgccgaacgtgcccgccagttcgctgaacgtgccgcgcacggccgagcccagctggtcgcgggtggcacggtagtgcacctggcggtagctggtaagcagcgggatggtgaacgccacccaccagatggcggtgatgatgaacgaggcgcgcgtgcaagccaccgtggaccagtcgaagagcgacgggccgccgaagatcagcgcgatgcagaagatgaacggcacggtggaaccgatgtagccccagccgtagccgtgcgaggagaccttgtccatgcgctcgttcgaggtggtgtcgatgagcatcgaatcatagaacgtcagcgagccgttcaggccgatggtcgccagaatgtagacgaccaggaacggcagccaggtcaggggcagggccattgcgcagcaggtgaccacgccggtgccgaagaagccaaggaagaacttgattttcatgccttgcacgtcggcgatggagccgagcaacggcatgagcagcgctatgaccaaggaggcaatggtttgcgcgtagccccaggcggacacgatgttgccgtccgccggcatcagcgatttggcgtaaatggggatgacggcggtggacagcagcacgaatgccgagttgccgacgtcgtagatgatccacttcttctcgcgggcggtcagtttggcgctttgcggcaccggttcgtggacatttgcgggatcagtcatatgcactcctcgacagtattcaactcaatctatcgtagaagcgcggactagggtagaaaaccgccaaagttgaacggcgggtgaataatgccgggcccctttctaaggggagccagagcaaaaaaatagctcccctcgctgaggggagctggccgcgaagcggactgaagggagccgatcgtggattcccccagatgaggaaatccactcaatcgtccggaaactattcgccgatcagcgcgatggcctcgtcgtaatcggggcattgcggcacgccgttgaggctacgctggatggcgatggatgccgccgcgttggcgatctttaccgattcggccagactatggccctttgccagcatcgcgcacatcacgccggtgtggcaaccgcccgccgaacgggtgtgtacggccttggtcgggtatccctcgatatgaatcgtctcgccacctggctcacgaatccaagcgccgcgggcgccgacacgcaccaccagcggcgcgcgcagtgtagtgcccaagccgtcacacaactggtgcatgaagtcgtcgagtccaccgccgatggtgaccttgctgtcgtcgatcggcgcgccgagtcgctcggccagcgtcatggcctcctgacggttgcaggaccagaccgggcgtgcgagcaccagatcctcgagcatgtggtcattgaccagacgcaacgtattggtgggattgatcaccagcgtgtagtcgcgtgcagccgggtcggtaccggccttgagtaggaatccgtccacgccggtggccgtgtggtccatcagtgtgttgccgctgatgtgcaccacgtctttgggctgcggctccagcgtgttgaacgtgtccgcgtcgccatgagcctcggcgccataggaagcgatgaacgtcttcttcggcgcgccggagctcagcaccacgcggaaaccggaatcctcatcaagacgatcctggccgatatgcgtgatgccgttgtcctggaatgactggcggatgaaatgcgcccacaggccgttgcccagaatgccggcgtgctcggtcggcacgcccatgcggctggccgcctgcagcacgcgatagctgccgccaatggaaggcttcggatgatcggccacggcgaatccgccctgtgccggcacctcgtccacattgagcataatgtccacccagacttgacccagtgaaatcacgctgggctcgtgagtgccgatacctcgcctgagattcaacatgacagcctccttcgtcgtaagttgcacgaggaccccttcgtcccttgccgtctcttataccgagattatatgagagtttgttggatgcggaataggcagtccggcgtgttttatcgggtaaacgctacgatttgcagcgtaattcgccgctggcgaactgctggcgaactacttgcggaccgctggcgaaccaatgccgaaccgctcgcgaaccgctgatggcccactcgcaagttacgctcgaaccgcgcatgaaccgccgaagttcgcccatgatacacgcaagagttgcggttgtcggtattgggctatatatttgtgaagttgtgtgttcggcatgtcgggtgaaaccggcggtcgaatgcgtgaaagacttgacacatcaaggttaagggagtccatcatggcagctcgttgcgcagtgtgcggcaagggaccgcagaccggtttcaccgtttcccattcgcaccgtcgtaccaagcgtagcttccgcccgaacctgcagtctgtacgcaccacgattgatggcgagaacactcgtctgcgcgtgtgcgtcaagtgcctcaaggccggcaaggttcagcgcgtggccgcgtgaatcgcgtactaacgtggagcaaaacccgtttgagcttcggctcagcgggttttgttgtttctgcggcctaaagaggccgtgcgaatagaataggccaatatgagcatcactatggacaccactctcgcttcgctggtcaccaacaagcgtcgcgtgtccgcgctcaaatcgctgggaatcgtcactgtcggcgacgccctgacctactatcccttccgcgtcaccgaaccggtgccgcttcgcgccatccgcgaggccgcacccggccagcagatggcatttgccgccgtgatacgagacatgcgcgtggtgccgatgaacgctcgccgcggctaccgactcgaggcgacggtcgatgacgccgactttgcccgttcgcgtcgcgtacccggcagcacggcccggctcacgttcttttcgtatcgtaaatcgtatgtggattgggtcagcatgcggctgcgcgccggcacgtctgtggtggtctccggtatgcccagcgaatacatggggcagctgcaattcacgcaccccgaaatcctcactgtcgcgcccgggtcggccggagcaggagcggggcttgagggttacgctcggggtgcggcatccggcaatggcgcgtttgcgggaagtaccgatccgtatgccagtgtgcagtccgcgtatccgccggccgcggctgcctcttccggggccgcgctgaaatacgacgccgataccgtgcaagaggcgcttacccgcgtctgccggccccgcccggtatatcacgccagttcgcgtatctcgtccgaacatattcatgagacgattctgggattgctgtggatgatgggggcccgcacgtcatccacgcctgacgggcaactcgctggcgctgggtcagccggcatcgtggctcccgcgaccgacaccatcgccgtccaaaacggggaagagaattccggcacgaccgccgaatccggtgctgaggcgctctcccaatccatcccagatgtgctgcccgaatcggtgcgcaaggccaagaacctcatgcatcgggctgaggcgttcctggccattcatgatccggcctccacgacccggttcaaggaggccatcgaaaccctgcgctatgaggaggctttcgtttcgcagacctcgctgcttaaagccaggtcgcacgcccataaatccgcggctcactcttgcccgttggtaaccgacagtctgcgcgatcagttcatcgcatccctgccgttctccctcactgcagggcagcagcaggttattcatgatattgccgccgatttggctcatgactggccaatgcagcgtctgctgcaaggcgaggtgggctccggcaaaaccgtagtggcgctcgctgccatgctccaagccgtagacgccggctatcaggccgtgcttgttgccccgactcaggtgctggccgagcagcatgccgaaaccattggccggatggtggagcaactcaagccagcgattccagtcacgttgttgacgggcggcatgaagcttgctgcgcgacgtaaagcacttgctgcggcgtccagtggcgagccgggcattatcgtggccacgcacgcggcgttttccaagaccttccaagccccgcacttggccttggtggtaatcgacgagcagcaccggttcggcgtggagcagcgcgaaagtctcaacgccaaaaccgatgacggcaccacgccgcatctactggtgatgaccgccacgcccatcccgcgcaccgccgccatgacttggtttggcgatctcgatatttcctggctcaccgaattgcctggcggccgcaaaccgattcgcaccgtggtggtcaatgaggccgacgccgccaccatgggccgtatgttcgcgcacattcgcgcgcgagtcgacgcgggggagcgggcctatatcgtgtgcccgcgcattgatgcggatgatgaggggaacgaaggcggttccggcgtttcggcagcagccggttctgcccgcggacgcgccgcagcatctggttccagtgcccgcacagctgcgggcggccgtgcaacgcgcgcggcggccgacgccatcggcatcgacgacccctacgaaaccttcgacgaaaacggcgaaaccgtggctcgcccgccattgcatgcggtggccgaaatcgccgaccggttgcagaaactcccgcaattccaaggcattcggtttgcgactctgaccggccgcgacaaggatgacgtcaaaacccaggtcatggccgattttgccggcggcgagactccgattctggtgtccaccacggtgatcgaagtcggtgtggatgtgaaacaggccagctgcatcgtgatctttgatgccgaccgatacggcctctctcagttgcatcagctgcgcggccgcgtggggcgtggcggcaccaactcgtgggcgttccttgtttcccgtgcggaacccggctccccggccgagcaacggctcgaagtgattcaccactcgctcgacggtgccgaaatcgcccaagccgacttggaattccgcggtgccggcgatgtgctcggcgacgcccaatccggcggcaagtccagcctgaagctcctgcgcgtggtcaaggacgccgacatgatcgccgacgcccgcacccgtgccgagcagcttctggctgccgaccccgaactggcagacgaggtccaactcgccggtgccgtcctcgacttcacccgaggcaacgaaaccttcctgacctccagctgaggctagggctgcgccccccgtaatcgcacgatattgtattttcatctggtaaacagaagtaaatgcttgtgccagagacggattgcatatgcatgggtgcttcgtggaagctgattctgtgttccgttgctgagttacggacgtgctggcgatacgcagctttcgcgttcgacaagctgcgtgggaaaaatgaagtaattctgttccacctttccttcccgcgcttcgagaatcaggttgatgcattgtctggcgatgaggtcgaatggctgcctgatggtcgtcagggatggacacatgcttgccgcaggatagacatcgtcgaaaccgatgatcgataattgttcgggcagactgatgtcgtgctgtcgggcggcgcgatagacgttgatcgcgccgagatcgttgaacgcgaagatggcggtcggtcggtcctgctccctcatttccaggagatcgcatgccgccttgtatgccttgtcagacacgtagtcgccaaccttgatgagatgcggatccgcgctgatgccgtttttctgcagcgccgccatgtatccgctcagtcgcgcctgcgaggattgtgaattagtagggccagtgatgacggcgattcgtcgatgccccaatgatatgaaatattgcgtggcgagcattcccccggtccagttatcaatgcccactcccaatgcgtcagcggagacctggccgaccggatcgacaatcacatatgggatgttcctcgtctgcagcagcgattcctcggccgatgagatattcgataagagaagtatgacgcctagtgggttgcgttcgatggcgttacggaggcagctgctggcctcgtttcttgttgcgtattctccggaatccggtccggcgcagcttacggtgatgccgaggccaaaatctctggcgtatgaagctgtctccttgaccatttccacggtgccgttgttggtcatttcgctgacgaccagttcgattgaccgtatggtttttgttgtgggaagttttttgcggaatccggcttcttcgaggagcagttccaccctatcgcgggtctcgtcggagactccatcacggccgttgatgaccttggacacggtagcgggggatactcccgccgcttgggcgatgtcggagaccttcggtctgtttgttgttttgattgtggccatgactcttctcttttcgtatgcgacgctgcaaaaaagcgttatatatagagtagcgaaattttcgctactctaaaacagcttttttatcggcgtattgctgtctatatagcggaaatgggtgttgtagacatggattggctgctgtttcttcgatgagtacgatttgtgcatatcgttgcaataaagcccttttaaggcgaaaaaacaagataaagaaaatttcgccacgcgcaacgaagttttatttgctcttttttgtaaaaccttgtatattgaacgtaccgatgaatgaaacggcaatggcaacgatgttgttggcgggctcattcagacgggttaagaagaaagagaaaaactatgacaaatgcaacggcgaaaccggatacttccgggatgcgcaagccgaagcgcgagtacataggcatgttatattgtcttccatacgtggtggtcttcctattcggcatgatcatcccgatgttctacgcgctttatctcagcttcttcaagcagtcccttcttggcggcaccacattcgcaggcttcgacaacttcatagctgcatttaaggatgaagcgctgtggagcggtttcagaagagtgctgatttatgcggcgattcagattcctctcaatttgatcctttcccttgtggcggcgctcattctggattcccagagaatccgtcatatcgcagtgccgcgaatcctgctgttcctgccttatgccgtcccaggcgtcatcgcagcactgatgtggggatatatctacggcgacaagtatggccttgtcggccagattgcgtctatgatcggggccactgcgccgaacatgctttctgaaaagctcatgctgttcgccatcgcaaacatctgcacttggtgttctcttggctacaacatgctgatttattattctgcactgatcggtattccgaacgagctgtacgaatccgctcgtatcgatggcgcatccgagctgcgtatcgcatggtcggtaaagattccgcagattaagggatccattatgatgaccgtgctcttctcggtgatcggcacgcttcagttgttcaacgaaccgagcatcttgatgaattccgcgccgaatgtgatcaccagtaactacacgccgaatctctacgcatataaccttgcgttcaacggccagaacctcaactatgctgcagcggtctccttggtgattggtgtcatcgttatgggtcttgtcgcagtcgtgaaggtcattggcaataagtgggagaacaagtgatgagtgaagcaatcgcaaaaccacgttccaagtcgctgcagcgcagagacgccaagctggcgctcaaggcgagccaacgctataagcgtatgcagcagcgtgaggcagctccaaagctgaccggcaagcagcgtgtgcttaactggctgctgcacattatcatgggcctgatggtcatctactgtctcgtgccgttgctgtgggtgttcttctctgcgacaaagaccaacgagggcatgtttagctcctttggtctgtggttcgatgacaagaatgtgttctggcagaatgttcaggaaactcttgcatatcagcatggtacatacgcacggtggttgcttaacacagtgatgtatgcagttgtcgccggatttggtgccactatcatcgccacacttgcaggctacgccattgccacaatgcggttccccggacgtaatagtctgttggcgatcaccttggcattcatgtccattccggccacggtcatctctgtcccgctgttcctcatgtactcgaagattggtctggttggtaccccatgggcagtgattattccacagctggccacgccgttcggactgtacctgatgattatttatgcgcaaacatcggtgcctacttctctccttgaagcggctaagctcgatggtgcaaattcgtggaccatcttctggaaggttgccttcccgctgttgtctccaggtttcgtcaccgtactgctgttcacgctggtcggtgtctggaacaactacttcctgccgctgatcatgctctcggacaccaacgactacccgatgacggtcggtttgaacatgtggttgaagatgggtgccgaaggtaccgcggacggtcagattccgaacaactacattgtcaccggatgcctcattgcagttgccccgttgatcatcgcattcatgttcctgcagaagtactggcagtctggcctttcggctggtgcagtcaagcagtgaatcctcgccgcacggttattggcgatcacccattcgttgctctaatgaccgtgcggcatccacatccatttgaagaacaacaataagacagtgattcatgacacacaaaggagtaatcatgaagaagatgaccaaaatcgtcagtgcgctggcggcgcttactatggtagccagcgttgcggcttgtggctcaagtactggtgccaaggacactaaaactgcagtcactgtagaagacattaacaacgctctcaccgatacttccaaaaaaatcgagctgaacgtatggggattctccgggaagcagatggcaggaccgattgaagctttccagaagaagtacccgcacatcaaaattaaattcaccaacaccggcgcggcaagcgaccatttcaccaagttccagaatgtcgttgctgccaataaagatgttccggatgtcgtgcagatgagtgctgaccgattcgaacagtacgctatttctggagctctgctgaatttcgccaacgatgatatcgaaaaggcgtggagcaagctttatgcaaagaccgcttggagccaggtgcattatgctggtggcctgtggggcgtgccgactgacgccactcctttggccatgtatgtgcgtaaggacattctcgacgagcataatctcaaggtgccaaccacttggcaggaattctatgaagaaggcgtcaaacttcacaaggaagatcccagcaagtacatgggcgtcctcatcaataacgatatctcctgctttacggatttgctgcgttcggctggtgcacgcccttggaaggtcaattctgtcgatgacatcagcctgagcatgacttctggcactaccaaggagttcattgaattcctgcaaaagtgccttcaggatggggtcatggaggccgctccaggctggaccgatgcgttcaaccgtgccacgaatgagggtacctatgccacttatatttctcagaactggcaaggcaactcctacaagggacagaatccatctcttaagggtctgattcaggtaacgctgccacctgcattcggcgattctgccgatgatttcaagtcttcttccgtcggctccatgatgagtgtttccgcggcatgccctaaggacaagcaggctgcagcccttgccttcatcaattggctcgattccgacaaggaagcaattcagtcttggcaggataacaaccatggcaactacttcatggcagcttccgcttaccaagatagcgaagacatccgcaacatgaaggaaacagatggatactttgtcaatactgacgtgaactccgtctacttcgagtccatggacaaggtcaatactgattgggagtatcttccgttcatgtctcaggttggagtcgtatataaggatgtcatcactcctgaaatgaaggttggcggtgacatggtcggcgctatggccaaggctcagcagaagctcaagacctacgcaaaggacaacggcttcaaggtcaccaccgacgccgactgacatccggcccgccactgctagggagggcggccgaatggccgtcctccctttttgagattaaccattttccaaagaaggaagcgcatcgtgagcgttattaccaaagtcaccacctatgatttccgattcccgacgtcggccaccttctccggctccgacgccatgaaccctgatccggattattcctccgcctatgttgtcatcagcacggatgctggtgattccggcaacggattcgtcttcaccatcggccgcggcaatgatgtcgtcgtccgagccatcgactccatgtccgaaacccttatcggacgtaacgtcgaggaactgctcgacaacatgcgtctcgcatgggatctgttcgtgcgcgattcgcagctgcgctggctcggccctgagaagggcgtcgagcatatggccattggcgccgtgctttcggctctgtgggacctcaaagccaagcgcgccggcaagccgctctggctgctcctttccgagatggagcctgaagagctcgttgcgactctcgacttccgctatctgaccgatgccctcactccgcaggaagccctcgagattctgcgtgccgcccaggaaggcaaggcggaacgcatcgcccacctcaaggaagtcggctacccgggatattcaaccgcagctggatggctcggctattccgacgagaagatggtccgcctggccaagcaggagaccgaggtcatgggcttcaagcagatcaagctcaaggtcggccagaacctcgagga

SEQ ID NO: 3878 - DNA, 23241 bp, Unknown
  R22_24m  MAG No. k141_4598
ggcggccccttcgcgattgcgaatcaccacgtgcggcgcgttgacgccgaacaaacgttcacccaacagtacgagcgggtaatcgccctccaaagctgcgatatcgtcaaccgtcatcatcagagggcttaagatgagcccgtccgcgctgtgcgtgcccatcgatgcgatgctttccagctcgcgggcacgattgttagtggtggattccacgatgacgccgtagccatgttgccgggcctcggccagaatatcctcggcgagttcggagaagtacacctgccgcagatcgggaataaccagcttgagcaaccgggtacgcccggaacgcaggtttctggccgacgagttgactttgtatccgagcctgtcgatggcttccgcaatacgcgcggccatcgcctcgctcatatatggctgtttgttcagaaaattagacaccgaggctaccgaaacaccggcctcatgggccacgtccgccatcgtcactctgtttttgcctcgcacggtgaccaccctacccgactttgctggagatacgaaaacgactcccctgctacgatgagcagcaagggagccgttgggtaattaggcgctatgcgcggttttacagcttgacgacgagtacgccgttgggctggatggcggccgtgtgctcggactcgttgacctgggccagcgaggcgaccagcggttcgccttccacgtccacgaccgcaacatcgtgggtgcggttgaacaggaacacgaagtggttctcgccagtttcgtccgcacgctcgacgcgcagcacttcaccgcgatcgtcctcagccgaagtctcgatgccgagttcctccagcagcacgggcaggctcttggccaaaccctcacggccgagacgggcaccgacgtatgcggccttgccgtcgccgaagtcgttgacggtgatggcgggagcgccgtcgaaaccggtccacttatctgccttgaaggaggcgaccacgtgagcggtatcggccacggaggtgatcacgtcggcgaaatcgtgcgccacggttccgttgtccaagtcgaggtggtccatggcaccggggaagtcgttgcccatcggggcgaattcctcaacgcgcacacccaccacgtcacggatggaaccggggtagccacccagccagacgtgatccttgtcgtccaccagaccggtgtagtaggtcacgaacagcttgccgccgttcgccacatactcgcgcacgcggcgcgtggtctcttcggacaggatggtcaggctcggcagcacgacggcttcgtactcgtcccaagggccgcgaaccggcaccacgtctgcggtcagaccgttgtccgccagcgcgcggaaccacgcgagcggctcggtccaatggcgtacctcctgagtaggcgtggcggtgtgttccgtagcccactgggactcgtaatcgaagacgacggcgaccttggacttgaccagcttggtgctcagcaggccctcgtcagcaagcttgttgaggtcggcacccagctcgcacacatcgcggaagatctgggagtcggggcccgcgtgaggaaccatcgaagagtgccacttctcggcaccggccttggactggcgccactggaagtagcagatggcgtcggagcccatggccaagtgagccagggagtcgcgcaccaattcgccgggttcgacgcgatagttgatcgggcgccaattgacggcggaggtggagtgctccatgaggaaccacggattcttgcgggcgatgccgtcgcacagggaggccgagtaagccagctcgtcgaagtgagcttcgccaggcgtgaagtagtgatcgttggacacgaagtccacgtcgtaaccccacttgtcgtaatcgatgacggcaccgccggcggagaccatgaagttggtggtctgcggcttgggggcgatctcgagcagggcatcgcgctcggccttgtaaaagtcgagcagggcgtcggagctgaaacgcttccagtcaagcagtttgcccgggttcatgaagttgccatcgccgatgaagcgcggcgggatgatctcggagaaattgttcatgcgctgcgcccagaaggcggtgccccaggcgtcgttgacggcgtcgatggtgccgtacttcttctcgcaccacttctggaaggcgcgctcggcgtcttcggaatagtcgaagcggttgtggcagccgtactcgttgctcacatgccaagagaccacataggggttgtccttgtagtgctcggccatcttgcggcacaggttgagcgcgtagtcaaggaagaccgggctggtggcgcgccagtgctggcgggcaccgggctggcagacgtcgccgcggtagtcgacccagaggatctccgggtgggcctgggtcatccacatcggcggggatgcggtgccggaggcgagatcgacggcgatgccggccttgccgagcttgtcgatgacgcggtcgagccaatcgaagtcgtacacgccttcttcgggctcaagcttggcccaggagaagatggctacggagacgaggttgacgccggcctgctgcatgagggctacatcttcgtcccacacttcctcaggccattggtcggggttgtaatcgccgccgtaccagatgcggggcttgttgcccgcaagcggctgcggccacttgaactctttacgttccatgatgattcagctcctttattgaattttatcgataatctgcgtccgcgggaataaacagcccacagggctgtttgcctaacggctcagctcgtcagagggggggcttggcactattttacctccctctgatgaggaaggttgtctcggcggagccgggacggagggagggaccccgccgcgaggcggtgaagacaccgcgtcggcggagccgactccatcactccttgacggcgcctgcggcgagtccggactgccagtacttctgcaggcacaggaacgcgatcaccagggggatgatcgtgatcagggagcccgtgatcaccaggttctggatcgcctggccgcccgcggtcgaggcctggtccttccactggttcaggccgatggtcagcgggtaccagtccgcgtccttgagcatgatcaacggcaggaagtagttgttccacgtcgccacgatcgtgaacaacgccgtcgtcacgatgttcccgatactggccaacaacacgctgggggcgagcacgtcgatgtccgtgcccaggaaatcgttcaacgaacccaccaggccgtacttcgcgccatacacgaaaccccagatcaacgtcgacaccaccgccggcaccgcgtagggcaggaacgtcgagatacggaagaacctcgtgccatgcagcttcatcgaatccaacgccagggccatcaaagccgacaggcacagcatgatcggcacctgcacgcacgtgaacagggccacacgaccaacactgctccagaactggccatcacccaacaggcgcgcgtagttctcgaagccgacgaacttggtgccgccgatcatctgcttcttgaagaacgaaatataaacggcgtacacgatcggcacgatgaacacgaacacgaacaccaccgcaaaaggccacatgaatttccatccacgccaatcggccttgtgcttattcacacgagccttgcccgaatgcacgggcgcagctgcgatatcggctgaagccattcccaacccctctccttcgaaggttgaccaaaatgtttgcgttatcatcataacaccatttgtaacattgtccaatcgtgttgagtaccgtgttgaattaagggtttctcagtcactctgctacaatggtcacgaagacaacgatgttatcgttaccgtaagcgtccctaagataagcgttgtaaacgaaacaccgacattaatgagtcaagcgagggtgaaatgtcgagaccaacacaggtgtccatgcaagacatagcgaaagccgccggcgtttcgccacagacagtgtcccgcgtggcgaatggcagcgatgcggtgaaacccgaaacacgccagcgtgtcgaagctgcaatgaaacgccttgggtatcgtccgaattatgcggcccgagccctaaagcacggccgcttccaggatatcggcgtggtgatgttcaacaccaccgcgttcggcaacgcccgcatccttgattctattgtggccaacgcggccgatgacgattattcagtcaccatccagaccatgcgccacggtgcggaacgcacgctttccgccgccatcgatcgcatgcagcgtcagccggtggatggtgtcatcgtagtgctggaggaacgcatctccgatttcgtcggatacaagcctccgcgagaacttccagtcgtgctcatctgcgaatccgccgccgaccactgccccaccgttgacgccgaccagtatggctgctcgaccgctatcgtcgattacctgatgggcaaggggcacaagaccgtctaccacattgccggaccgtccacctcgcgcgccgccgaaagccgcgcccgcggctggcgagaagcgttggaacaaatgggagcacgcgtaccgagcatgtacatcggcgattggtgcgcggattcaggctatcaggccggcgtggcgttggcccacgaccccgactgcacggccatctacgccgccaacgaccaaatggcatacggcgcaatgctcgggttgcagtcagcgggcaagcgcgtgcccgaggatgtcagcatcgtgggcgtcgatgattcgctggtagatatggttccgcgcttgaacctgacgaccatgaagctgcgctttgacgacattggcgccaccgccttctccatggtccgccgtcaatgcgaaggcgagaagataccggtcggcgtcaaaaccgtaatcccgccggaactgatcgaacgcggttccgtgcgcgacatcagctgacgagcggcatgtgctggcatccactggtacctgtcagtgattcacctgtcagtgatccataggcaattccgcaccgaccaatcgactcggttgtgcaatattctgcacatttccaactatgtgcagaatattgcacactttactatactgtgatatattttgcacatgattgtcatggatatcgccgaatacgcgcggcttatcaaggatgaaaggcaacgccagggcatcagtcagaccgacatggcccaacggctgggcgtgtcacgtcgctggctgatcgaatttgaacacgcccgagtccccaatcccggattctccaccattctcagcgctctgactgagcttggcttgtcgctggatgtctgcaaaaccccgcagcccgccgaactctatgaatggtgacaccatgagcgaaaacactctcaatgcatttctcggcgaaacacccatcggccagtttcgaagaacaaacgatggcagcattattttccaatatcacgattcctatcgttggtcgcaatcacccacaccaatatcgctttccatgcccattaccgcagccgaatattcaggcgacatcccgcgtaatttccttgaggccctggtcccggaatcccctcaggcccgagatgaagccatgcgattgcatcatgcccgatcgacaagcgcatttgatctgttgcaagccatcggattcgatgccaccggcgcattacggctgtccgccgacccgcacttgcccatagatgacgattcgcttattccaatcagcgattcgcagatcgcgaatcgactacgcgcagccgcccccacaggcatccagtccgcaagcgtagacgagcattggtcggtcgcgggacagcagggcaagatcgcactgaggaaccgcaatggatcatggttctccaccactggaatcgcgcggacgactcatatcatcaagcccggcataccgacccttccacaccaagcattcaacgaacacatcaccatgcgcattgtggaggcgatgggaatacccgtggcccacacctcttttcacatctttgatggggtcccagccatcatcagcgagcggtatgaccgtatagtgtccgccaatggtacggtgacggccctgcaccaagaagactttacccaagcgctgggcattccctcatcgctgaaatacgaggaacacaacggcccaacgtccaatgcatatgcggaaatgttgcgcaagcacggtctgcccgatcaggccgaaagcaatatccgagccttcaccgacggcatcctcgccagttatctcgtcggggcaacagacagccacgccaagaactactcgctattgctcgatggcgcgtccgtgcggcttgccccgctctatgaccttgcttcggtgttcccttatttggggcatggcaagcagatcataaatgccactttggcgatgaacatcggcggacgccgagatcttcttcaattacgccgcaaacatctggaacgattcgcacagcggatgggattagatgaggaatccgtgattttacgattccacaccttggtggataggctgccggaggcattcgacagcaccgtgcaacccgctcacgacgttatcgcgagcattggtgcgcaggaattcatcgatagctatcgcaagcgcatcatgatggtgtacgacgatgcaatgagctggatggccagtcgaaagggacagtgattcggacgggcggggattggtctcgccatcccccccctaagaaatcagatcttaagcggcacacgggaaacgaattcgcgcttctcgcctgttattggatcggtgaatcgtagcacacgcgccactaattgcagcggctggctgaaatcgtcgtaggggcgtgtctggatgcgcgggtagaagtcgtcgcccacgatgggcaggccgagcgaattcatgtggacgcgcaattggtgggttttgccggtgcgcgggtggagtgtgtagcggcagatggggtgatttcccggatggggaccaccctccggcgcttcgcgccacctcccgccagcgggagggaaacagaggtcgccgcgctcgatgagggtttcggcgttggccaaacccggttcctcgaatgcggccatcgtgccgtgttccttggtgatgtgcgatcggcgcagcaatgggaacgggcgtggcggttcgacctgcatgatcgtgccgaatcgtgggccgctgatcggccggcagggtgccaggcattcatagatcttgacggcctgccggttctggaacagcatctgatacgcgccgcggcaggccgaatcccgcacgaacaccaatacgccggcggtcatgcggtccaatcggtgcgctggcgtgatgtccggctcccccagccgctcacgcaatcggatcagcgcggtctgccgataccacatgccgcgtggcatggtggccagaaaatgcggcttgtccaccacgatgatccgctcgtcctcatacagcacgtccatctcaaacggaatatgaggctcgtcaatcacataccgatgtggcttactcaacggtcacggacttggcgaggttgcggggcttgtccacgtcgtagcccttgagctttgccatgtccatggcgaacagctgcagcggcaccacgtcaaccagcgggctcatcagcgttgggcaggcggggcgccagaacaccacgtcagcgtaccgttccacatccgggtcgccctgctcggccacggcgatgatgtacgcgccacgagccttgacctcctcgataccagagatcaccttggcgtgcaacacattgcggccgcgctgcggcggcacgatgaacaccacgggctcaccctcgtccaccagcgcgatcggtccatgcttgagctcgccggccgcgaagccctcggtgaacgtgtaggcgatttccttgagcttcaacgcgccctcaagcgccaccgggtagcccacgtggcggccgaggaacaagaaggagttggcgttcaccatgcgctcggcggccgcctggatggtcttgggctgggtgtcgagcacccactgaatcttgcgcggcatgtctttcagggagtcgagcatctgatgaatctcatcgcggaacatcgcgcccttgacctgcgccagatacaggcccagcaggtaggcggcggtaatctgcgccacgaacgccttggtggatgccacggcaacttccgggccggcgtgtgtgtagagcacggcgtcggattcgcgcggaatggaggcaccctgcgtgttgcagatggccagcaccttggacccctgttcgcgcgcgtggcgcagggccatcagcgtatccatggtttcgccggactgagaaatggccaccacgagcgtacgcggggtcagaatcgggtcacggtaacggaattcgtgcgcgagttcgatttccacggggatacgcacccagtgttcgatggcgtatttggctacctggccggcgtagctggcggtgccacaggccacgacgatgattttgtcgatggccttgaagtcgtgttcgtcgatacgcacttcatcaagggtgatgtcgccattcgtgtcgaagcggccaagcagggtgcgctgcactgcggcagggtcttcgtgaatctccttgtccataaaggaatcccagccgcccttttcggcggccgaagcatcccaatccacggtgtaggtcttcgggttttcgaccacgttgccgttgaaatcggcgacgatgaccttgtcggcggacacgcatacggcctgatcctggtcgacttccatggcgcgcttggtgtaggccacgaatgcggcgacgtcggaaccgaggaagttctccccctcgccaaggcccacgaccagtggcgaatcatggcgggctccgaccacgatgtccggctggcggcagtcggtggccagaatggtgaacgcgccttcaagcatgcgggccatacggcgcacagccttgaacaagtctggcttgccttcgtccgcgataatcttgtccacgatcttgccgagcagcttagcggccacctcagtgtcggtggcggaggcgaatcggtagccttcggcttgcaggtcgaaacgcagctgagaggcgttttcgatgatgccgttatggatgatggccaccttgccgtccatgctggtgtgtgggtgggcattcacgtcgctcggctcgccattggtggcccagcgcgtgtggccgatgcccaccgtggcgagcggcatcggcttgcgctcgatgtcttcgaccaggttcttcaaacggccggccttcttgcgcacgaccaccttatccatgccgggcgcggtcagcgccacaccggccgagtcatagcctcggtattccagacgttccaggccttgcaggcagacctccaaaggcttgccgcatgccgtttcaatatttcccgcgtatccaacgattccacacatggctcaccagcctagcggacgattattgcgcaaagcgaatccaacccgccgcctttgcaggattggaacatgccccttcgtgaaaagcgtacgctgagttcatcagcgtacgcttttggagctgcaacaacgagccttcctacagcacgtgctgtaggcggagccgtaaagcggggagcccagtgggctccccgtaggcgacgccgaagcacgacagtgctgaggtaatataacagccttcctacagcacatgctgtaggcggagccgtaaagcggggagcccagtgggctccccgtaggcgacgccgaagcacgacagtgctgaggtaatataacagccttcctacagcacatgctgtaggaagtccttaaacctaggctcggtggggtggtcgatgatgtcggggccgcccttttctacgactacgccgccgtccatgaacacgatctggtcggcgacttcgcgggcgaagccgatttcgtgggtcacgcacaccatggtcatgccttccttggccaaggaacgcatgacgttgagcacttcgcccaccagttcggggtcaagggcggaggtcggctcatcgaagagcatgatctccggcttcatggccagagcacgggcaatggccacgcgctgctgctgaccacccgacagctgggaggggtaatagtccatgcgatcgcccagaccgacgcgctgaagctcggccacggccaggtcacaggcggctttcttggactggtgctgcacgtggatcggggcttccatcacgttctccagcgcggtcatgtgtgggaacaggttgaagcgctggaacaccatgccgaggcgagagcgctgtgcggcgatctccttatcgtccaaggtctgtagcatgtcctggccgtttttggtcacgtgcttgtagccgatgagttcgccgtacacctcgatggaaccgccggtcagggtttccagctggttgatcagacgcaggaacgtggacttgccggaaccggagggccccagaatcacggtcacagtaccgggcataacggttagatcgatgcccttgagcacatgcagcggcccaaacgccttgtgcacctgcacggcctcgacggcaggaatcacggaaccgtcagccgccttgcgcacgaccggagcggagttggtgatgtcattcgtagtcataatcgcgctcccgccttatgcattcaatccgacaaatgtggtctggttgagcttgtccacgtcatccttcggttcaccgtcggtcttacccggcaatggcgtctgcttgcccttggtgcccaccggtcgggcatcgaagcccctgccgaagtgcgcctcgaggcgggactgcacaaccatcagaatggaggtgatcagcaggtaccagaagcaggccacgagaagcagcggaatcggcttgtagatacggttggcgatggcgttggtggcgaactgcagttcgagagtgaacggcacggcggtgaccagcgaggtggtcttcagcatgccgatggtctcgttgccggtgggcgggatgatgatgcgcatggcctgcggcagcacgatgcggcgcatgatgagcgtgcggttcatgcccagcgccttggccgcctcggtctggccggggtccacggcttcaaggccggcacgcacgatttcggacaggtaggcggcctcgttcagggccagaccaatccatgcggcgttgaatgcggtgaccaccacgttggagtcgatgctccagaactccaccgaggtgaacggaatgccgaggctgatcttaggaatcagcacggcgaacagaccccagaaaatgagctgcgtgtacacaggcgtgccgcggaagaaccagatgaagaaccagctgacgccgcgcagcaccggattgatggatttgcgcatgatggcaagaatcaccgacaggatgatcgccacgaccatggagatcacggtaagctccaaggtatagcgaatgccttcaagcacgttctcgttgaacaggtacttccagacggtgggccaatccagtcgcggattggtaatcaagccttgaatgagcatcgcggcgagcagtaccacgatcactgcggccacaatcgggccggggcgcttgaccggcaacgccttgatgcggttggggatgttcagcccctcaccgtcgacttctttcttcgccataatctggttccttggatgtgttaggcagcctgaactgcaagttgcaactagcgttgaaccttagtgcacgaatggggcgactgtgttacaaacagtgcgccccattcgaattttcgcgacagcttgtcgactattcgacggccgggttgatttcggccttgtccagtgcgccggattcgacgccccagtgctggagaatcttagtgtaggtgccgtcgtccatgagcttttgcatggccttctgcacggcttcggcggtctgggaatcgcccttcttgatggcgatggcgttcggcacttcatcgaagtccttgccgagctgttccagctgaccatcggtctgggcgatggcgtagccgacaaccggggaatcggcgaagaagacgtcggccttgccggtcaccacagcggtggtggcgtcggtctgctgcttggaggactggatggtgatgtctttcttgccgtccgccttgcactgcttggcggtcttgttgatggcctcttcctcgacggtgccggtctcgacggcgacgttcagaccgcacaggtcatccgggttcacgttcttggggttgcctttggccaccgcgtagcccataccggcggtgaagtaggagacgaagtccacggactgcatacgttccttggtgatggtgaacgcggcgatgcccagatcgtacttggagccgatggccggaatgatcgtatcgaagttggaggagacgatttcggtctcgagaccgaagatgttgcccatggcgcgggcgagatccatgtcgtagccgatctgggtcttgccgtcggcgtcgaggaattcggccggggcgtaggaggggttggtgccgatggtgagcttgccgtccttggtcacggattcaggcagcagtgcggcgatggtgtcatccttctccacggagctgacatcgtagctggtgatggtggcggcatcggagcccttggcggaatccgtaccggcatcggccttgtcggaggcgccgcaagcggcggtggcgaacagcatggccgagctcagtgcaatggccataatggacttcagtttggtggactgcataatcgtttcttcttctctcttacgccgcttcaacggcaacgatcaacggttaagcatatttatacactacagtgcatacatatacaaaaagactcccgccgcagggcaacgggagtcttcatagtaaccgaaactactcgacggacgggttgatctcggccttgtcgacggcgccggaagagacgccccacgtgtcgaggatcttcttgtacgtgccatcatccatcagcttctggatggccttctgtacggcctcggcggtcttggaatcgcccttcttgacggccacggcctcaggggtcacaccaacgtcctcgccgagggcctcgagcgtatcaccggtctgcttgatggcgtagccggcaaccggcgtatcggcgtagaagatatcagccttaccggaagccacggcggtagtcacatcggtctgcagcttggaggactggatgtcgatggcatccttaccgtccgccttgcactgctcgttatccttgttgacttcctcttcctgggtggtaccggtctgcacagccaccttcacgccgcacaggttcgaggagtcgaccttgttcgggttgcccttctgcaccacgaacgtggaaccggccttgaagtaggtgacgaagtcgacggcctccatgcgttccttggtcacggtgaaggaggagatgccgatgtcgtacttggagccgacggacgggataatcgaatcgaacgtggaggagacggtgttttccttcagtccgaacactgcggccagcgccttggacaggtcgacgtcgaagccgaccggggtcttgccgtcctcggccaggaactcggccggggcataggaagtatcggcgccgacggtcagcgtgccgtcgccggccacggaatcgggcagcagtgcggcaatctcgtcgtccttctggatgctgctggtgtcgaagccttgaatcgaagtgctggacgagtccttggatgaatcgccgctcttggatgcggtgtcggtgccgtcagtcgtgccacaggccgccacggcgatcagcatggccgcgctcagggcggcggccgcagcggattgtattcccttgcttagagacattggatttcctctctccggatagtcagctgggcgggtatgtttcccagatggttccagagcgtaggagtgcaatgctacggaagcgttaatcgtgggcgaaatgacccacaacgcggacatcctacccttggctcccctccggaggggagccaagggacgggactagtggcgcatgttggcgtagcgcatggcgcgtagggcttcgcgcttgtcctgctcttcgcgcagggcctggcgcttgtcgaattccttcttgcctcgggccagtgcgatctccgccttgacgcgaccgtccttgaagtacaggctcagcggcacaatcgtgtatcccttggcctcgatgccgcgggcgagcttggtgatctgcagtcggtgcagcagcagcttgcgcttgcgcttgggcgcatggttgttccatgtgccgttcaggtattcggggatgttcgcgccctccagccacatctcgccacggcggtcgatggagatgaacgcctcggacagcgatgcgcggccttcgcgcaacgacttgacctcggtgccggtcagggccagccctgcctcgtacttgtcttcgatggcatagtcatgccgggccttcttgttctggacgatgagtttctcaccggtttccttgggcatgtctcctcctttcgtgggcaataactcgtgagtagcaactcgtgggtagcaactcgtgggtagcaacgcaacatccgacgatatcacggaccggcctcgaatacgaaaagggttcctcttcaagaggaacccttcaaccgcatatatcggccgaaccaaccggtcagtggacgaaccagtactgacccaaattggtcaaggtgcggtcgtgcatgttccacggaccaccccagttcatttcggagatctggaatgtgccgtcgccatacacggcttcgactacggcaacatggccataggtaccgtcggcaccatcctgaccaggcaggaaggagagcgccgcaccgacctgagggttgtggtccacgcgcaagccgtacgagggggcgttgcgccaccagtcgccgccattgccgagataggacggcgtgccaatgcccatctgcttacggcgttcatacgcccaatacgtgcactggccggcggcataggcgttgccgtaatcaccgttcgacgtgccttggccgccgacgctgggagcgggggcgggggccggcgccggagccggagccggagcgggcgccggagcgggggtcaccggagtagacggcgtaccgccctggttaccggtatccacccggttggcggcgtcctgctgttccttctggtactgacgattgtaggaatcgacctgggaagcgatcagtacggtctgggccgcctgcttggcggattgggaatccagactgtcgatcatggaagacagttcgtcacgccttgtttcgccctcctggcgtagcttgtccaaagcgtcacgttcgctttgcgcggtttcggcggcggtctgtgcggaagcggccttctcatcggactgggtcttgagcacagcgatctgcttttcgatggccgccagacgttcgccacggttcttcgacgtgctcagtgaggtcgcggcggaggaagccgcattcgcctcgttgcgggacaacgcgtcccgggactgcatggagttgacgaagtcctgtgtgctggtggcacccgtcaccacgctcatcacgtcggaagcattcgagccgtgcatctcgtcacgggccagctgggccacggcggcgtgcgcgtcatcgtagtccttgccggtctgcttgatccgctcctcgagcgtctccttgtctttctgcgcggcggaaagacgtttggatgcggcgtcggcctcgtcctgagcggtggcggcatcctcgttggcctgcgtgaccttggcctgcgcggcgacaatcttgttgttggtcagatcgtccagctcaagtaccttattcgccaggtcctggctggcaccggccagctgctgcttgagttcggcctcgcgctgtaccgacgcggcgtgctggttctgcgcattgatcaggtcggaataggtgtctgcctgggcaggctgtgccgagctgaacgccagacctcccacacaggctgcggcggccaccagtgccgccagtgcgggcttgatcacacgtacgttcgtcatatgtgaatagtcctttcgctcacttaagccaataccatagcatgcgaacctgagaggcttgcacacgatgtcatcacatttctcgcgggtaagccggtcgcgttacgccctcaaataacgccgcaacgagatggttgaagcgatgatggacagcagtatcgcgcccacaaccaggaacggcgatatcaccagtaccgtgagctgattcacataaggaatccatgtaacggatttcgccagccagccggtgacgaacacgttgacgatggccgaaagcatcaggcacgagagcaccgagccgatcagcgaggcgatggtgccctccagaatgaacggcagacgaatcgtccagttcgaggcacccacgtacctcatgatttcggtttcggttcgtctggatgcggcggacatacgaatggtggttccggtcagcaggatggcgaccaccaccatcacgccggcgagcacagccgtaaccgccgtggctcggttgagcacggcgaacaccgggtcgaagatctggcgctgatcggtaacgtcttccacaccctccttgccagagagcacttcggagaccacctgatatttggtggggtccttgagcttgagccagagggagtcctgcatatcgtccgcggtcagcgtacggccttggaattcaccgttcgggtactgcttggtgaaggtgttgtcgtagaaatcctgcttgctgacatagtcgatgttggagaccacgtcgttgagttcatcgcgaatggttttctgcagtgccgtgatctcattggctgagggcgatttgccggaagcacagttcgcggactggctggtgccgtcgggacatagccacaccacgacctcgaccttgtcgtaccagtcgcccttggctttggtgatctgcgcctgagtaagcaccgaagcgccgatgaacaggaatgagatgaaggtgaccagcgtcagcgacagcagcatcgacaggttacgggtgaggttggcccacgtttcggacagaatgaatcgtgctcgcatgatgatcccccttactccttcgcgccctcagcgggttgatcgtcggatgtttggtctgcggcggactgctcgtcggcggactgctcgttggccggcggtgcgggcggttccggcggtgcgggcggctccggcggggccggcggctcggcggcggatgacacggacgtatcggcaaccgcggcggtcgcggcggactcgtccttgaacgggtcgaacgcctgggtgctttccagggcggcggcctgctcatccaacgaaatgcccttgccccaggtcagcgtgtcttccagcggcgcaaacgtctcgccatagcggccggtgcggccggaatgcacggaattggccaaacgggcgatgccttcagacggctcgtcactgccctcgatggccttggtcgccgccgccagcacatgatgggcggtgtcggacttggcttcgacttcggcatccgggaagaacagggcggaatcgtaggagccatgagcctcgtcacgcacgatcttgccgttgtgcagttcgaccacgcgcttgcgcatcgagttgacgatctcttcgttatgcgtggccatgacgatggtggtgccggtgcggttgatggcgtccagcacttccatgatgcccagcgaagtggtcgggtcgaggttgccggtgggctcgtcggccagcagaatctgcgggtgattcacgtaggcgcgggcgatggccacacgctgctgctcgccaccggagagctcatgcggatagttcttttccttgccggtgagtcccacggtattcagcaccttgggcaccaacgatttgatggtggaccgccgcgtgccgatcacctcaagggcgaacgccacgttctcccatacggttttgttattgagcagcttgtaatcctggaacacgaagcccagcgaacggcggtactgcggcacttgacggttggtgatgcgccgcagatcgttgccggccacgcgaatctcgccgctggtggcctcctcctcgcgcaacagcaggctcaagagcgtggtcttgccggagccggacgcacccacaaggaacacgaaatcaccgcgttcgatatcgaggttgatgtcgtcaagcgccggtcgggtgcctttgggatagatcttggacacattgtccagtgagatcagtgccataatgctgtttactcctcggtttcggcggcgcggcgctgttcatggcgccagcggatgccggcctcgatgaacgcgttgatgtcgccgtcgaacacggcctgagtctggctggtttcgtagccggtgcgcaggtccttgaccatctggtaggggtgcagcacgtaggagcgcatctgatcgccccagctggccttgatgtcgccggcgagctccttcttcttcttggcctcctcctcgtggcgcagcacgagcagtcgggactggagcacggccatggcggaggcacggttctgaatctgcgaacgctcatcctgcatggtcaccacgatgccggtgggaaggtgggtgatgcgcacggccgagtacgtggtgttcacgccctggccgccggggccggaggaacagtaggtgtccacgcggatgtccgtatccggaatgtcgatatggtcggtggcctcgaccagcggcaccacttccacggcggcgaagctggtctggcggcggccctggttgtcgaacggggagatacgtaccagacggtgggtgccgccctccacggacagacggccgtaagcgtagggggcgtccacctggaaggtggcggacttgatgccggcctcttcggcgtaggaggtgtccatgaccttggccttgaagccgttacgctcgcagtagcgcaggtacatgcgcaacagcatctgcgcgaagtcggccgcgtcgacgccgccggcaccggagcggatggtcaccacggcggaacgttcgtcgtattcgccatcgagcagggtctgaatctccatctggtcgagatccttctgaatctcgccgatttcgctttgcgcctcgtccagagagtcctggtcgccctcctcgtggccgagttcaacgagcgtttccacatcgtcgatgcgctgggaggcggagttcagacgcttcagctgcgattccgcggcggacagccggctggtgatcttctgggcgttttccggatcatcccacaggcccggggccgcggcctgcgtttcgagatccttgatatcggccttgagccggtcgacgtccagcgccttggcgatggattcgtatttggcgcgggcttcgccgatcgcctgggtaaagtcaaattctgccatcgtggtttaccttactgttgattctttgagattctttgggaagtcacgtccttgttgacagccttcgcacattcctctggcgttggcgggcattgccgcgccacacacgcatccgcctgcaatccatgctgccagaaggttccgggcctgccttgccgatagccggccgggcgacctcacaaatccctcgcatcagacgtgttcaactgcgggcacgaatatgcgaaggcaacgtcaaagccccgcgtaaatcgccgggatgatcagggagccgagcatggccacagctatgacgacacacaccacacgcacgatggtgcggcggcggttctcacgctgctgtcggccgtcctgatagttactcacgagaccaatagtgtactcaccgcttacgaccgcaggacttgccgccgacgccagccctgccggcgggcccccacggccctttcctttgcgctttcagcgccgccagatggtgtttcatggccaccagcatgatgtgcgaatcctcaaggcccaagtggcgttcgttgtgggcggaatcaagcgcgccctgacgtttggcgtaggcgtcgagcgtgttgtctccgtaaggatgctcgttggtgggtaccgcgccggggtcccactgccggctcatcggcagggtatcgatgatggtgatgcgcccggcacggtagctttccgcgtatccggcgacgttcagcatgaaccagctatgttcgaaggtggcgttatgcgccacgtacggctgctgggtaagccgcgcgagcaggccggcctgggcttggggccattcgtcgaagagtcggtacccggcctcgctgctgcggccgcgtacatcgatgccggtgagtttggcgatgagggcgttgccgagcgccgcgttttccggcggcacgccaaaagcgagacgggactggccgtaggcgtcgccggcggcgtaatagccctgctcataggcgtatgtctcaggttcgccggccgggcgcggactggccatgttcatgaactcgaagccgacgtcgatgatgtagtcacgcgccggatcgatgccggtggtttcgatgtcgatgcccatcaccgcgtccacgtcgcggccgggcagataggcgtcgcgccagtcgggcttgggatggtggccggtagcgttgccagacgaggcggcaccacccggcgaagtcgcgccggagagattggcgcgggccatcgccgcatcgcccgcacgcttctggaagcgctgggccttacgtcgttcggcgcgtgcgtcaagaatcaccgccgtacggtcttggatatcgtccaaggcgactgttgtggggaacttgacatcgctgttttcggcagcagtgtttccggcagatgcgtcaccggtttcaccgctcagattcagcatgccttggtcatcgttcgatgggcggctgccggagtacggcctgagcacggcaacggtagtcctcccccgccgttcgcgactgaccacccataggtgttgctgttcgcccagatgcaacagcgtgttgatgttgtcgttgagccgacgattggcgtaggcgagcgcgcgaggcagacgataggagccgatgaatcgatcgtaatcggtcatgaatgtgctgttgcattgggcgatgattgattccagatgctcgcgtgtggcgtaatcgaccttcaatgcgtcgtggatagcttgtggcgtcagttccggttggtccaacccgagctgaggctgtgctgcggtttcgccatattgctcaccatctgcagcaagcgccagcaatacgctgatgccatgcatcaggtccagcgaacgcacccagtcccagtcaatggtggtgccgtcggcgtctttgggcatggacgccgcccattggggaatgtctcccttggcggcgtccagccatgtgcggtcgatcatagtgcgaagccgagttcttcggcggcctcggtgggtaccgggtcgtcgcaccaataatcctcgaggttttcggtggtggtcagcgaacggatttcggcgcgatcgatatacagttcgccgctcaaatgatcggtctcgtgctggaagatgcgtgcgggccagccgtgcaacggctcgctgtggtgcttgccgtcttcatcatcccattcggcggtgatgtcgagccaacgcttgcgcacggcctggtatccgtcgaagctcaggcagccttcgtagaacgaggcggttttgtcgctggtgggtttgtagctcggattgatgatcacgtggaaggggaattccgcgatttcgcgcggatcatcctcgtcgtcgcgcacgtggtcttcgaccacggcgagcgcgagccccaagccgatctgggtggcggcgagccccacgccgggcgcctccagcatggtggtgtgcatcgtatcgatgagtttggcgagcgtacgcttggaaagctggccatggtaggccaccgtccgttggcgcaacaccggttcgccagcctgcacgatgggcaggagcttctccttgccgccggttttgatgagttgttcgacatcacggttgagttcgaggtcgactttggcgttctttccaaacattgcttttccttagggaagggtgctacagcgcgagttcttcggcgacgatcttggcgaggcgggtgcagacttcgtcggcgtaggcctgggtggcggcttcggccatcacgcgtacgagcggttcggtgccggaggggcgcagcaacacacggccggtgtctcccagcagttcctcctcgcgggccacggcatcctggatgcgcttgttggtggcggcggctttcttgtccacgttcggcacgttgatgagggtctgcggcagctgcgggaagtcggcggcgagctccttcaggctcttgccggacttgacgacctcgttgcacagggtcagtgcggtcagggtgccgtcgccggtggtggcgaattcgcggttgatcacgtggccggactgctcgccgccaagcgagtaatcgcccttgagcatttcctcaagcacgtaacgatcgcccacggcggtttccacggtcttgatgcccatgtctttcagggcgagcttcagaccgaggttgctcatcacggtgaccacgagggtgtcgtggttgagcttgccttcgcgctgcttggcacgggccagaatgcccatgatctggtcgccgttgatcatgttgccgtcttcgtccacggcgaggcaacggtcggcgtcgccgtcgaaggccacgcccatcacggcatcggtggccttgaccatggcctgcagctgctcggggtgggtggaaccggcgttcttgttgatgttgtagccgtccggcgaggcgttgatcacgattacatccgcaccggcacggcgcagggcttcgggagccaccacggaagtggcgccgttggcgcagtcggccacgatcttcaggcccttgagcggcttgggctgggttttgtcatcgttcagcggagcgatggtggccaccagatgatcgatgtacaggttggtggcggtggtctggtcgtggctcacgcggcccacgccggcaccggtcgggcggtcccagtcctggccgagcacggcctcgatgtcgtcttccttctggtcgggcagcttgaagccgccgcgtgcgaagaacttgatgccgttgtcgggcatcgggttgtgggaggcggagatcacggcacccatttcgacgttgagcacggaggtcaggtaggccacgccaggagtggggatgatgccggcatcgatcacgtcgaagccgccggcggccatgcccgcggacagggcggaagccagaaaatcaccggacacacgggtgtcacggcccacgagcgcgcggcggcgtccctcaggctgatcgtcttgggtgccggcgtcgccgagcacacgcacggcggcatcgcccaaatccaacgccagacgtgcggtcaaatccctattggccagtcctcgaacaccatcggttccaaacatcttcggcatatgaagttccactccttgtatcgcgttacccgcaccatcgtagtcgttgtgctccaccctaggacccgactcggcaaaaaacgccacggaatctgctctaggaccagacaatggcattcccga

SEQ ID NO: 3879 - DNA, 6044 bp, Unknown
  R22_24m  MAG No. k141_4657
aaccatggcgatgccacggaagactgtttccgcggcatcatcgatagaaatccccaaggtgtgattatgcagcagatgggcggtctgaccactcaagcgaagtctttgttgaaatcgcgcagtattcccgtggtcatcatcgacccaatcgataccgtcgattcggatgtgatgagcgtgtccatcgataactggaccgcaggataccaggccggcaaacacctgctgtcgctcggccatcgacgcatcgccgttatccgggggccggcgaacctacagaccagcatcgcgcgctatagcggattcaccgccgctctgcaacaggccggggtggatctgccggagtcctatatcgaacagggcgactacttccccgccgaaacaagctatgaagcagcctgccggctgctggaactcaccgaccgacccaccgcgattttttgctgcaacgacttatctgcagtaagcacgtatcgtgccgcacgagagcataagatcgcgttgccaaagcaattgtccgtcatggggttcgacgacattttccccgccggccaactcatgccctccctgaccagcgtgcatcagccgttcagcgaaatagcccaacgcgccgtgcagatgatcatcgacagccgcaagggcaatcagggtgatatgcacgtcatcctccccaccagtgtcgtcacccgggaaagtaccgtaccgcctcagtcatcggcccgataatcggccagattcaagctggcggccacccgattggacgcgaacgcgccgatggaaaccagcgcatagcacagcgcaagcccgccgaagaagctggccagcgtggccggttcggtcatcgaagcggcgaacagaggggccataagcagcatggaacagccgccggccacgatcaccacgatgttgagcggggtgagtacctcgatgaatcgcgcacggttcaaggtcttgacatcagtgccctccaacaccagcatgcgatattcgccggcctgatcgtacacgctgccggcctgcatcacaccggagctgaccgcggcaagcacagcggcgaacactagcgtcaggatgccgccggtgccgatgtcgcgaatgaacacggtggacgggtcgttggcgtcaccgaccacggcggccgagccaaagaatccgcagatcgaggtgatgccggcgatgaacacggccagtgcaatgccggacacattgcgccacgcgcgcttcggattgtcgagaatacggcgcatggcaatcatcgtggccgcgtccttgggccgtttggccttggctttggcgcgggcggtgaccacccaggagcccacgaggttcaccagcgcgaagcacagcagcatgaaaccgatgatcacgccgtacatcactacttcaccggcctgagccagcaccatcggattcttgaacagaagaacggcaatcaccatgatgacggcgaacaccaccacacgccagccggacggcagcgtagtcgcaacgcgtgaagtgacgccgagtggcgtgatggccacgcgccgaagcgtgaccagcgaagagatcagcgccaacacggtcacgccaacaagcgtaatgatcaaggcaatcggccccacccacagttgctcgaacgtaaacgtctgattctggaaatgcagcaacatgattagggggatcaacacgcagtaccccgcgatgccaatcagcgcccccaccaaggcctgcccagccgcatcaagcgccgtaaggcgaataacttgccccgtggtcgcgcctgccaagcgcagggatgcgagccgagcgtcacgacgggacgcagccaatcgcgcggcggaaccggcaagcgccacgaacggcacaatcagcagcaggcaggcaaagaacgccagcacgacgtatgccgtggcgtattgatccaggctgtggggattggcgatacgctgcttccagatttccgctgttccgggtttgcaagcgtcgagattgattgcgcatccaatggtgtggtcggcggaggcgcgccacatgaacccatgcacgccgcccaaaacggtgagaaagatagtggtggctgcggcaaaagcaatgatggccaacaccgaagtatgacccgcactgccacgcgagccggggcgatggaacaatcgccacaatgcgaaagcgctcatcgtacgcctcccagctggccgtcctgcatggtcacggtgcgcgagcagaacgaagcgacgttggggtcgtgggtgacgacgaccacggcggaaccgttgtcccgcgcggcggccatgagaatgcccatgacctcgcggccggtggcttggtcaagtgcgccggtcggctcgtcggcgaagaccacggcaggtttgacggcaagggcgcgggcgatggcgatgcgctgcatctggccgccgctcatctcccccggccggtgcgtggcgagcgcgcgcaatcccatgcgttccagccacaggatcgccgtgtcggtggcggtgcggtagggcatgccgtcgagcatcatcggcagggcgatgttttcgaccgccggcagttcgggcagcagctggccggattggaagatgaagccgaaggcgttgcggcgcagtttggtgcgctcggcgtcgctcatgcggctcaggtcggcaccacggaagatgacggtgccggcggtcggcttaatgatgccggcgagtgcgtgcagcaaagtggatttgccggagccggacgggcccatcacggctactgtttcaccctcccggagcgtgaagttcacgtggttcagggcgagcgtgtgcatggtcggcatggcgaagccgggctgggctggctggccggcctgaatggcacccggtccggccgcagcgggattcgccgacgcataaccggctcccgtgccggctggcatcacgccggtgacgccgtgccctgcctgtgcgcgggccatgctggcggtgtagtccatgaccaggtcgtgcgcctcgatgaccggggcccactgctgggtgtgcgatgccggctgctggaaatgttggggttgctgagactgctgaggctgagccgccggtcccgacgccggctgaggctgctgcaattgcgatgctgctgtgttcatactcccgagcgtacggagcgaacgcccagccgaccatcgggctgcggtatgaacctttctggatcaccggcccgctcctcatccgcaaggattagagatacgcagtcgacgcgacaatccatatatcagatgttcattgctcgagaagacgaggaacagtggaagaccggttcggaagctggaaccacaacagaccaagcaaaggagcccacatggccatcgcaatcgacatcccgcacacaccaatcgtgtccgtacaaaagtcgtacaacaggagtatgactacagagaataacaagaacagtcgttttgaaatgagactcacctaagagcaacgttccagaatcgaccaagcggccgagtccaaaggcatgacttcgttgcaatgggcattatcgaatctgctcgccgccgcagatcgggacatccatgaagctcatatcattcggctcaacagtaaagcgtggaatgatttcaccgcagcattaaacgaacctatgggcctacgtctgaatgaattgttggagcgtgatcccatatggacgtgaccaacttcactgagcctcggcacctgactgcgagcgaggatatttctggtttcgactgcggcctgccattggtcaatgattggctggtttccacacactaagtgcatacagcattgagcattcggaagctcccggttggctgaggcgaaatagtccgaacctcattcccgtaattttgctaggcatgatgggcgtggatatcagatttcaaaccatgcacgtcgacagtcagtcactccgagatgcggtatttcattctctgaacgatatgattttcggcatatccctgaatcatctagaatgtttactccgctcaatgtccacaatcaccaatgattaatggctggagaccgctatttgacgccgaccattgtctgaatcgcattcagacacaacactcctcattgcgcgcagaccagcgagttccgccgagtcggcgatgtgtctcttcagcggttgatttaggttttccgcatgcgacagctgaccacaccgctaaaaatgccattttcgcactgacttggggcggaggtcgtggcgaaacgcacgagggaacgtgtgtcatccgatatggtcatgcccgccagacattgaagcgtcctgtctatgcgcggttgatgtcccggtggcggggtcaatcgatcgacatacgaaccgggacagattcggctgtcccggttcgggatttcggcctcttttggcgaaccgggacaggctcttccatgaacacccgatatatgcaaatccaaaaccccggaattccgccattccccgacggcgaccatcgcacgatagggcgtcaggtgaatgagattctgtcccggttgcccaaaaagaggcaaaatgacgaaccgggacagcagaatccgtcccggtccacacgcggttcacacggcattacccaagtaaactcatcggcaaaacattggcccagccaacaccactaccgatgtccagcacaggccagctcgtccaggcgggcggcgaagcggggccagtcggtcttcatagcggtgaggagcttgcggttgggcacgtcgtcaatcgggacccagcagatttccatgctttcgtcgtcgtttgccttgggctcgacggtgtggccgggcttttcaaaggcaaacacggtggtgtaggcccacgggccatggtcctcgcggtaggagccgaccacctcgatgtcttcgggggtgatgttggcttcctcgtagctttcgcgcagcgcgccttcgatggacgattcgccgtccgcagtggcaccgccgggaataccccacgtgccaccttcggcgctccacgcggcacggtgctgcatgaccacgtgagtcaccttgccgctcgccgggtcgcggcgagccagcagaatgccggacgcaccgttggtgccccaatgcttgcggccgcaggcgcagtccacccagccatcgccgggctgatgcacgttttcgaccggcggcagaatgccagcgtgctggttgcccgaggccttgctttccggctccagttcgccacggccgacattccacaggtcggtccacgtgatgcccagttcgccggccagatgccgggccaacggcaggctgaggccgatgatgccgtgcggatcgccctcaatgctgtcgatgaacgcgccgccgaagccttccagcgtgaacgatccggcgacttccagcggctcgccggtggcaatgtaccgttcgatgtcgtcatcggtgaattcgccgaaatggactttggcgtggcttgcgccgcgcacggtacgtccggtcgcgaaatcgatcaggcagtggccggtccacagttcgccggtcgcgccgctcatgcgcttcagtcgttctcgggccacggattcgctgtgcggcttgccgtagcattcgccgtccaagaggaacatcgaatcacagccgagaatcagcgggccgactgtcgcctcggtcagtcccggctgtccggcaatagcggtggcgatgggttcggtgacggtcggcatatcgatgccggagaagtcgcgcgtggtggcgatttccgccttggaatagtcaataggcttgccggcggcggctttgcgcaggtcttcgacggcagcttcgcgttccgaatccttgatctccttggccttgagcgggtaggcgatcacgcggtcaccggtcgcggcggcggcagtatcggccacatcacgatacgcacggtgaacggcctcggccttggccacggccagaatcatcacgcgctgcttgatgctcagatcatcgacggtgacgccttcctcacgggcggccgcttccagcgcagcaggctcatccacgtgcgagacgcgaattgtggggcagatacccgccgaatacagcacgtcacggcgaggcttggacttggaagcaagaattagcggaatggacatgact

SEQ ID NO: 3880 - DNA, 8676 bp, Unknown
  R22_24m  MAG No. k141_4736
tgcgggcccgcgacggtgccgagcaggtagtgcgtgtccttgacgttggtgacccagtcgcgcagggcttcgttgatggcgtccttcaggatcttgtcgccgagggtcacctcgaccacttcggcgccgagcatacgcatgcgggccacgttcagggcctgacggcgggcgtcgatctggcccatgtagatgcggcacttgaggccgagcatggcgcacacggtggcggtggccacgccgtgctggccggcaccggtctcggcgatcacgcgggtcttgcccatgcgcttgacgagcagggcctggccgagcgcgttgttgatcttgtgcgcgccggtgtggttcaagtcctcgcgcttgaggaagatacgggcgtcgagaccggtcttctgcttgaccagtgcggcgaagcgcggggcttcggtcagcggactcggacggcccacgtaacgctgctggagcgtcatgaattccttgtggaattcggggtcggccttggcttgcgtgtacacgcgctccagctcgtcgagggcggtgatgagggcctcgggcacatagcggccgccgaactgtccccagtacggtccctgatgttcgctgagcggggtggtttcggatgctttcacttgtgctcctgcctttactagtcgttccactgcaagttcatgatcatcggcggtggccacgccttcaccgaccagtaccgcatccgctcccgcgcgggcgtagtcttcgacctcgaccgcgccgaatacgccggattccgccaccttgatgacgttatcgggcagatcggccgcgagttcgttgtatttgttcacgtccaccttgaggttcttcaggttgcgcgcattgatgccgatcaccttggcaccggccttgcgggcgcgttcgatctcctcgcgggtatgcgtctccaccagcacggtcatgttcaactcgtgcgccaggtcgagcaggtgcttgagctgggcgtcgtccaatgcggcgacgatgagcagcaccaggtcggcgccgtgggcgcgggcctcgaagatctggtagtcggtgacgatgaagtccttgcgcagcaccggaatgtgcacggcggcgcggaccttgtcgaaatcgtcaaggccgccgaggaatctgcggccttcggtgagcacggagatggcgcttgcgccgcccctctcgtactcgcgggccagcgcggccgggtccgggatgtcggagaggtggcccttggacggagacgcgcgcttgatctcggcgatcacggggatgccgtcggcgcgcttaagccatcgtgtcgcgtcaatcggagccggggccgccagcgcggccttcttcacgtcctcaagcgatacggtgagctcacgggcgcgctgatcctccagcgctcccgccaccagttcgtccaaaaccgacatggtcctccctttgttggtgttcggtcatgcgccactctaggtcacgccccgtcccgattgccgaacccgtcctacattctgggctattcctcgttggttcgtatcgctacggaaccagagcggccaacaaaaaggaaaatcgccatgaatatcggtcatacggcctgggattgattccattgatggcatagactgggcgcatgtgcaggagattcgcgcttgatttggattgggatgccgtggcctcacagttcgcggtagacgaggatgacgtgcgcgttgacactctgccacagccttcctacaacatcgcacccatgcagaacattggcgtggtggcacagggcaaggatggccgccgtcatctgaccggtgcctattggtcgctggtgccgcgatggagcgccagcaaagtgctgagctaccccacatataatgcgcgtgtggagtctgcgcatgtcaagccggcgttcgccgaatccacaaaatccatgcgagccatcatccccgcttccggctactacgaatggaaaggtcgcaggccgttctattttcacgcaccacatgatgaactattgtctttggccggcctgtactcatggtggaggccgtctcccgcatcgccatggcagctgaccgcaaccatcatcacctgccctgccgcggacgagttcgtcaaggtgcatgatcgcatgcccctgctggttcctcggaatatggttgcctcatggctggaccgctccgttgacggagccgcactgttagattccatgcgggaagcgggtaccatgctttcccggcatctgcaatttcacgaagtcgcgccactgaacagcgacggcaaacgtcttattcagccattggattccgccgaacccatgcgtctgttttgagctcttgcagctggaaccggctatgcagctgtatatgaagacgggtcaatcaacgccccgctgatagctaacctcgtatggcccccagtcaaaaacaggtctcttccgctcgacattggtcgactacgactacttttgcaccaatccgcgcaacaactcgatctcgtcgcgatgcgtggcgggcgtctgctccttggtttcgagaatcatcgggagcttggccatgattgggtcgttgaccagtcgcgtgaaaaacgggatgccgagctggccctcgccgatattggcgtgacgatccttatgcgagtcgaggccgaactgcgaatcgttcacgtgaatcgccttgacctcggccaagccgatcgcctcatccaactggcgcatcacaccgtcgtagtcgtgcaccaaatcgtagccggcatccaacacatggcaggtgtcgaacgtgacgccgacgttcgccttattctccacgccatccatgatcgtggcgagctcatcgaaattgcggccacattccgtgcctttgccggccatggtctccagaagcaccatgacgccggccgcgcgctcgaacacctgattcagtccctcgctgatcagccggcagccggtctcggagccttggcccacatgcgcgccgggatgaatattgatatacacctcctgtccggcctcgcggatggcggtcagcagctcgatgtcctcggccaacgcctcgatcgcgaatgtgcgcttggcctcatccttgccggctagattgtagacgtacggcgcatggacgaccaacggcccatagccctcagccttcagacgcgcaccgaacgccgccgcgccggccgggtcgagcgccttcgaacgcttgccgtacggggaacgcgggaagaacgcgaacgcggtaccgccctcctcatgggaacgttccagcagcgcattccatccgccggccgtcgacagatgcgatccgatatacagttccatcattccaaactcctcgtgttccactcgctgttcgtgttaccgctatcatatggtaggcggcatcgagcgccgcccgcacaaccgacacgagacacaactgttcacccgaccaaaggagacccgagcatggcggcagccggcacacccaaggacgataccggccttgaacggaagatggagtcgcgtcacctgacgatgatctccctgggcggcgtgatcggcaccggcctgttcgtcagctccggctatacgattcaccaggccggtccgctgggcgcgattctcgcctatgcggtcggctccctgctcgtctattgcgtgatggtctcgctcggcgaactgtccgtggccatgccgtacgccggaagcttccacatgtatgcgaagcggttcatcggccccggcaccgcgttcaccatcgccatcctgtattggctgaactgggcggtggcgctcgcctccgaattcacggccgcagggctgttgatgcagcgatggttcccgcattcgccgtcctgggtgtggtcggccgtgttcattgtggtggtgttcgcgctcaacatcatgtccgtgcggctgtacggcgaggcggaattctggttcgcgtcaatcaaggtgttcgccatcatcgcgttcattgtgatcggcctgctggcgatcttcggcgccataccgattgccggtcatgattccgcgccgttgctgggcaacttcgtggctgacggctggttcccaagcggtatcgcgccgattttctcgactctgctgaccgtggtgttcgcgttctccggcaccgaagtggtgggcgtggcggccggcgaaaccaaggatccctcgcgtgcgattcccaaggccgtgcacaccacggtgctgcgcctggcgattttcttcatcggctcgattctggtgatggcggccttgatcccctggcatcaggccggcgtggatacgagcccgttcgtgctggtgttccagtcaatcggtatgccgttcgccggcgacatcatgaacttcgtggtgttgacggccgtgctttccgccgcgaactccggcctgtacgtgtgttcgcgcatggtgtggtcgctggccaaggagcggctgattcccgaacgttttgctaggacgaatttccgtggtgtgccggtgtgggccgtgctgttcagcatggcgggctcactgctggcgttgctgtcttccgtgatcgccgcctcgaccgtgtatctggtgttggtcgccgtgtcaggtttggcgacgctggtggtgtggttctccgtatgcgtgtgccatatccgtttccggcgcgaatgggcgcgggatgggcacagcgccgatgagctcggctatcgtgcgcccggtttcccggtgctgccgtggctggccatcgtgatgtgcatcggcgcgctggtgctcgtggtgctcgatgatacgcagcgttcgaccctgtattgcatgatcccgttcgtcgcctgctgctacgcggcttattacgcactcgaacggcagcgcaaacgcgaaaacaacgcctaactcgatttcgaggggctgatttggcacttgccggagatctatctccgtttcaaggggctgatgcccgagtagacaaggctccacaatggcgtaatggcgttgccgcaaagccgtttatactcgcggtttggcgtttgagcagcccctcgaaagccaagtagatgtccccaccggacgaaatcagcccctcgaagccgagaaaccattgatggccgattatgttgtgcccagtgacgcgcctggttttatgctcgaactggtacaataattggagtttgttttttgcaaaggggcattgttatgtacaaggtgttggtgtcgttcgcagacagctaatgcgcgttgactcgtcgcgctaagccgtggtcaccgtttgggcccacggcacttctgttgtgccatttcccacgcacttggtcgaaggctggcgatgggccctgaccaagcgcgtcttcctatccgcgatcatactcggggcaattgtgaacatcgcctgcgtagtcagtatcaccggcgcgcagatcatgttggccgcccgtggcgccaacgcggtcatgatcggactgctcggcacggcaatgggcgtgagtactttggtcggctcgctgttggccaacaagctagtcgatatggttcccacagggaaactgattgcgggcgcgctggcgttgttcgtggtcagccagatgccactgctattcctgcacagctacgcggccattctgatctgccagattctggccggcctgccgttccccgcgttgaacgctggtctgctgggctttctctacggcaagacacccgacaacatgcaggggcgggcttctgccgtatttgaaaccacggtcggcatactgggcgcagcatgcccggcgatggtcggctggctgttgcaacagccagatctcggtttcacggcggtgatggccgtagccgtggtctgttccgtagcgggattggccgtatcgttggccggcccgctgcgcagcattccgaatcccgaccagtggtcggaggttttcctgtaacgccaagcagcggagcgccggtttatatcaggtcgtacggcatctgacgcttgaccagccagaagatgccgaggccgatgaacaccagcagattgaatccgccactatgccaccacaccacggcgatcagcgtcgccatgcgcgccacatagaacgccacgcgaagccacccttcgcgcggccgggtctctatcgtcatgtgcgtgaagctgccgccgaacgtgcagccgccgcgcaaccatggcaccacgccctcgaagaggatgagcgccgccaggaagaggatcgagccggtccagtcgaacggttccatcgactgccatgagccgttggagcccgagggcaggtttgggcggacgatcatgacgaacagatgcgtcggcatcacggcgaacccgatcagcgtcatgtcgatgatgaacgtgatcagccgcctcatgaagccaggtgtggtggtcggcgtcatatcggcgacccgcgccggaatcaggcgcagcgaaagcatggccagcgcgaatccgatcagcgcgccggtcgtgttccacaggagatcgtccacgtcgaacagacggtaggcgcacgggaacacgcccatgaggccggtcagctgcatcgtctccagaaacagcgacgtggcgaatgacagtactgcggtaaccggcagcggccaacgccagatacggcccatgatgaagcccaacggcaggaagaacacgatattaaacgcgatttgcagtacggcggtgagaccatcggtacggatgtcaccgatgaactgcaatggattgagctgtggcgtcagatggtgcgcggcgcaataggctgccgcatcggccggcatcggatacagtgtgaagcacagcaggccgagcaggtacagcaccgtgccatacgccactatggccgacgacagtcggatgcgattgtcgcgatgatacagcaacgccagcaccggcacggtcagcagcatggacacaaacggccacaatgccatcgcgaatgcaaacggttcggaaaagttcttaagaaatcccatcttcaatgctccctgcttcggcccgctccgttcggtttcggaccttgactctcgacttctgattccaaggtacggaacatgacggcacgcgggtatcagccatgagagcgaaatcattgggatgaaaggcgattcgtatcattcgcatggatgaggaagatgcaccagttaccattgacgccgacgaggatggcgtggtcggcgccgtgaccgcgcagatgagcgagcgtacgtcgttcatcgtgttggaccagattacttccgccaccgctatgctgtttacggcccagcgcatcgccgccgaagcccatcgccgcggcatccgcattttggttgatggcgcgcacgctcccgcccaactggccgatccggccggcggactgcagtccgattggtgggtcggcaattttcataagttcccgtgtgcgccgcgtggcacggcattgctggtgattccgcccgaaggcggtcaggatggtcaggatttgtggccactgatcgactcgtggggtttcgctgacccgttcccggagcgattcgatgagcaaggcacccaggatttatgcggtccgatcgccgcgcccgagtccctgcgcgagatcgagcgactgtggggctgtgatgccgtgcgccggtacatgtccgatcttgccgattacgcggagcgtcgggtatccgaggcggccagcgcggtcggcggcgaactgtacctgcgcctcaccgcccacgcctacgtcaccgccgacgccatagaccgcttcgccgaacaatctatcccaaccatcgtcggatggctgcgtaagcgaatcgtatgttgcgtggtgccttaactatggatgattaaggcgccaatgcaacattcatgaagccatgtctttgaacagtgagcaacgcgcggcgactatccgcgaatttcaggagaacatgagccggttgggtctgaccgccgaacggatcggcaaggatttcggcgtcagcggcagcagagtggagcaaatcatcaccctcaagtcgggcgtgctggagtatccgtggattatccgcgcctatctgctgagcagagctgagacacagggcgtggaactcacgccgttcatggcgttacgcggaaatccgcacgattattggttcctcgacggcgactttatcgaccgaggcgaaatcgattaaaaccgattgataatcggccatttacacgcaagaggcgccgtcaatcgcctcgcgcatagaggccatcgctctccgtgcaggtggcgatgcgtgtgtagtattccgtcttgtcctcatggtcgatacgtgcgccgcaatgctgctgcaccgcaagacttgccggattggttttgtggacactcaggtaagcctccttgatgccgagctcgcgggccttggcaagcgtgagcttgagcccggcggtcgcgtagccgtgaccgcggtattcgcgggcgacaccgtagccgatgtggcccggaccgttgcgcaggaagtcggtgagccggtgacgcaggttgaagatgcccacatagtcgccctcatcgttgacgagaatgtatttggtggctggcacccagccgtccggcaggccgacgccaagcgactcatcacgcaaccctcgcacatatgcggcgaaccgttcacgattcatgccggccgctgggttctcgaatcccgtctcctccgccgggaatttcgcgaacaagtcaaacgcgcgttcctggtccgccagccatgtctcaatcagccgcattggtcacactcctcctgttgacacagcagaccacactactactgtgctcggccaa

SEQ ID NO: 3881 - DNA, 5382 bp, Unknown
  R22_24m  MAG No. k141_4798
ggcgatttgcatctggtcggtggtggtcagggcctgttcggcggtgaagccataaggattggtggccacaggctcctcgaatgccgcctgagccgcgggctgctgggctgcgtactggtcggcagcgggctgggcagcggcgtactggtcggcggcgtaagcgtctgcaggctgctgctcggcagcctgctgggccgcctgtgacggggcttcctgatcctggaccgggccgccgaatgcctcggcggtgaacccgtattgcgccagggtctcgcgggcgcgctcatcgccgaactcggcgatccaacgcttcaagccggggtagcaacgcggatttacggcgacgtttgcgccgaattccggattctcgtaggcgatttttgccaacagaatcgggtccgcgttcggatcctgtacggcagcgaccgcagcatcataatcaaccatgggattacctccttatgttcgctcggttatgccgaacgtatggtccgtagtgtttgtagtgttgcgtcttcaatggcgccaatgtcctcgccctcgtccagtttaaaagcgctgaacgcgtgatgttcgggttcggtcagtggcatatcggccacaatcacagtgatattgtcggttccgcccgcatcgagcgcggccgccaccaaggcgtccacggcttcctgcggactggaatgcgctgcggcgatggccgcaatctgttcgtctgacacttcaccgtgcaatccatccgaacagatgatgaaacggccggtcagatcggcaacatatacgtcgggcactatgccgtccggatcgcccaggcattgggtgatgatgttgcgtggaatggtcgcctccgcctcttccggcagcatctgaccggaatcgatagcctcctggcgttgggaatgatcccgcgtgatgcgggtcagcgaggaggcgtcccacacggggatgatatccgtggcgggggcatcggcatccggcagcgggctgagatggtaggttcgggaatcgccgacattgaccacataggtctggtccgagaaatccggggagtcggcatcgtcaaacggagctgcgctgtgggcattgatggcatctgcgtaaggctggggcaaaaccaggccggagcaggtcgtaccggccacgccgccgagacggtcacccaaatcgagaatgtcgtgctgagcctgtgccagggtgtcgtcgatgtcatggcgggtgcgcgagggcatggaagccagctgcgcgaaatgctgggcagccaactggcttgcttgctcgccgcctttgccgccgcccatgccgtcgcagaccatgaacacgccctgttgggcgaatccggtgtcttggttgttcttgcgcctaagacccacgtcactggtcatcgcgatacggatggagcctgtggtcatgacgtcttccccttcttacgcgcgcgcttgacatgcgtcgtgtgcgacttggctgcgtgtctatttgacagtatagccacgcttttcagggaaagtcgtgtacgtatcctcctgaaacgcggcaaagaagcgagcattgccttgcgcaattggtcgactcctgtccaatatgtggtggcttggcccgattcaatgtcttgccccgagaacgtggcgtagtcggcttcccggccaagctggatcaaagcctggtcatctgtgccgagttgacgggcgatggcaccggcctgatctcgacgagtgcccttggctgtgatgccgctttgctcggcaagcatgcgtatggcattccaacctgctgccacacgggctttcggactgccatgccgccgcgctcgcgccagcagcatggccttgaacatcagaatcagaccgcagacgatgagtagggtccacaatgggctgccgtacagggccaccttgcgggtcactcgccagaaccgcacccagaacaggttggtcggcgaatcatcggcgtcggcgcctgccaatgagctttggcccctggcttgcgtctgatcgcgcagcggatcggtcaacggcaccggtggttgccggaccagcgtctgcggattcggcggcgtcaggttctggttttcatcaggcaccttggtctccttgggcgtcggatagaacgccacccatcccaggccctgcaatttgatttccacccaagcggtgacatcgttgccggtgaattcgattttggtgccattgcccgaggtcttctccgtgcgggcatcggtgatttcgccatcctcgtttttcggcaggaagcccaggaccacacgggagggcagtcccagctcacgagccatcagtgccatggcggaggcatattgctcggagtcgcccaccatggccgtgcctgccagcagcttgttgatacggtagttgccatggccggcatcggagggataatcgccttcgagtccatgagagaaccatccggagtctttcaatgtgtcggccaacgccgtggctgcggcaccgcccgaggactgtccgccggcaatggacgtggccagtttgctggccgaatcgggaacatcctgggcttccggttgggtgatgcgggccgcggccgcactgctgatctgcttatcggtgggcttgcgggcgataatgccggattcggtataggtgaggcttttacgcgtgccggcgggaataatggcggaatcggtatccgtgttgtagtagaacgtgtcattgccgttgtcggcatcgttggcgaagctcacgccagtggccgctcccgccagcggcagccaggtgtcggtcaatccctgatcgacggtgaaggtcgcagtgaaggattcgccctgctcatccgccttgatcgtggtgcccacgcgatgataattcgaggagtccgtggcttcggaagaatcggacaggttccatactgtgccgtcgaatcgatccatcaccgcaagtttgactggtgttccggccggcagattatggacggtcagcaacacgtcttttttgtggtccttgatataggatcgcatgccgctgagcgggctggtgtaatcgtaggggcttaacggcggatcgtagcggtcacgcagcacgaaacggtcctgcggcaccagcaacgtgcctccgaaagcaaggccggcagcgagcacgacgatgatcagcgcggatatccagcgcccccattccagcagttcaagacgccaagacagccagataatcagcagcaaggcaaaggcaatgccgcagatggcacgttgccagccgctgtccgtacccagcagagcacatacggtcacggccgtcgcaaggggcaggactcccaccagagacaaccatgcgttggcattaatggcaaacacgccggtgaggaacgtaagccacaggccgatggtccataccgccatcagcacgccgtcttgcgtgcccagaggcggatcgacggaaataatgtacttgaacgagccaaacgtcatttcccaacctgaactcaaggtcttcaaggtgggaatcacgtaatgggacgtggtggaactcagcgttaccaccggaccgatgatgaattgggcaaacgtcagaaacacgatttgccaccacagtcgcaacgccggcaacatgcccgccagagcgatgatcgcgcccagcaaggtggccggtacggcggcaatcgcccaagtggccacgccgccgtacacgtcgatgagattggcttgcgccagcaacatcatcgccgctatgagtacgaggctggcgattcgtttgccccacggctggcgactgaggcccataccgcgaagcacattgcctctggtcatccagataaccgaatgtgtggagtcggcccaggagccggtggtggtggcggttccggtgtacgtgccggaggaagtgccggtgtatgtgccgctcgatccggcgtacgcagcggtattggtattggtgatactggactggtcgaaggtcatgcgagcacccccatgatcagtgggagatcatcgagttcgccgatggtggccaatgtgaagttggcgaatcttctgatgccgcgattggcgccggcgctggcctgcaataccacgcagctggccgatcggggcaaggccaaggtcatgcgcttgatttgctcgatgtctttcagcgatccaacagtgaaaaaatagaacgaagcatcaggactgtgcttcagcgtgccctcggcgagattcggattgtcctcacgatcaggctctatggcactggcgttgtcgaggaactccatggcgttgcgcggctggccgtgcgcgttgcccgcgtgacagaacagcgggcgatcctgcagcaggcatttgacgccgatggaggagtggatggacaccgccatctcgaattcctcgccgttgacgtactcatccgggttcacgctgatggtcaccgaggtgtcggtgcggcgcgtggcttcatattggcgaatcatcaacgtgccggttttcgcggagctcagccagtggacgttacgcacgtcgtcgcccggctcgtattcgcgcaatccgtagaagtcgagatcatcatccacgatctggccggatggttggccttccagatcgcggggcacgccggcattcagggtatcgagacgcacggtacgagggtggatgaatacgatgatgcggtcggccagctccttttcgtgacgcaccaggccgaacgggtctcccttgcggatgcgcaacggtccgatgggcagtattgcgcgcgataccgtacggaactccacatcggtttgcttggattgcccgggagccagcatggggatgttgaatcgttcatgcgcatcgccgattggcagatatccgcgtgccgtggttgtcggcgttctgccggtgttgtcgatgccgacgataacggatatggtgtctcccacggtcacgcgatgatcggatacggcgatggacgcgtggaagcgtgtgttgccgagggaaagcgcgattgccgcgagcatcatcaccatcgccacgatgccgaatacgagcagctcataccagcccagaggcaggaacgcaataagacatgcgatgcctgcgcccgttaccgcccagcccaagggcgagacgtaggatgcgaagaaccgtctgatgcgtcttaccgcgcgcttgaacatgcgttcagcgcgccggcgacggcgtaatgcggcggatgtagatgccatggtcggatacctttccaggccctatcaggaaccgatggtgggggagggaacgtcttcgagcacctgtgcgatcaggctttccggagtcgcgccatcgaaggtggcttccggagtcagcgtgatacggtgtgcgagcacggccactgcaaggtccttgacgtcatccggcaccacgtaggcacggccatcggccgcggcccagatacgggcgcatcgggtcagcgccaaagcgccacgcatggagga

SEQ ID NO: 3882 - DNA, 5778 bp, Unknown
  R22_24m  MAG No. k141_4986
cacatgggcttcgttaatttcatcctcgaactgctgaaggatccgcgtgccgcgattgccggttggattgccatgggcgtggcgccgaccctcggcttcatcttcctcatcgtatttatcgaaacgggtgtggtgttcttcccattcctgccgggcgactccctgctgttcgccgccggtgtgttcgccgctcccgatgccgcgaccggcaaggccgcgctgccgctgttctggctgctgccggtggtctggtgcgccccgattatcggcgaccagtgcaattacttcattggtcatttcttcggccgtcgcatcatccagtccggcaaggtgaaggccttgaccccggagcgtttggccaaaaccgagcacatgattgagaagtggggcccgctggccgtgttcctgggccgtttcttcccgttcattcgtacgttcatgccgttcatctccggtatttccggtatgcgttggagccgtttcacgccgttctcagtgctcggcggcctgtgctggtccacgttgttcacgctgctgggctacttcttcggtaacattccggcagtacaggaccacttcgagctggtgatcgtgctgattctgctggtctcgctcgccccgaccatcatcggtctgctcaaggccaagttcggcaagaagaagccggccaaggtgaccgatgctcagttggatgctatggaagacggcattaagaacctcgataagtaagcaagaaatgtagattaccgcataaggaatcgtcatgaaaatgaaggccctgactgtgcatgtgaggtcagggccttttctgcatgagatgggcgtgaaacagcagcgtggttatccacatttgtcgtggacgacatgccggggtgtggataactcagcaagctagaaccacaatggtcgattcgtgttgagcattgaactcggacacgtttcaatcggcttatgaatagcaacaccacaccccgcgtggcgcgtaggatcacctcgccagcggtagcacctccgggcattccgctgcccacggacgatgcgccaattccagcgtatcgctactacactccgccgcccaggccgttggcctcatgcgaacggcagagatcgggcgaggctccggcactcgccctaactacagacaccagcttccataacattgtaacgatgacgtcaggtcatggaggcgtggggttgagtgtcatggcttccatgcttgcatggacattggcgagacgtgaacacagctgcgttctcatagacgctgatttcgtggccggatgccttgacctgctgcttggtgtagaacgagagccgggcttgcggttcagccaagtcgacgcgcccctcggccgtatcgagggtgaggcgatgaaccatgagctgatgatgtgggagggtgtgcgagtacttccctatgacccttggagcgcgcgccagcctgactggtgggaagttcaagcggccattcgggctttggcggaaacgaacgacgttgtcatcgtagatgccggtcagggtggactcattgagaccgtacccgatctgcgcagtggcctgcaggtgattgccgcggaattgtcggtaatggggctggccagagccaagtcgcaccggtccagattggattcatggggctgtgaagcgccacatatcgtaggtgtggaaccacgtggcgctccacgtgggagaggccacgtgggtattggcgaggcgcaggactatttgactgccacggtattggggcccatcaagccaagtgtcaatctgtgcggagacgtactggaaggcctcggcatcagatcggtgaccaaaggcagtcgcaaagccatgaacttgcttgccgatctcgtagaacaggccattcgcccggtttcgggagcttctcacaaggaccagtgatgctatggctgccgtcagcacgcgagccaatgaggctggcacagcgctcagaaccatattcttcggtctgctggatgacgtggcatctgacccgcaggttaccgatttggcggtgacctgtgatggccgcgtttgggcggaccgcggcaatggcatgcgcgaaacagtattgcatgtgccgttccgctcgccgcaagtagttcgagaatacgccgtccaactgtgcgcgcagctcgggcgcagactggatgatgcctgcccgatagcggatgccgccagtccggatggcatccgcgtgcatgcggtgattgccccattggtgccacaaggtgccgcgatttccatacgattccctgaccgaaccatggcatcgctacagcacctgagcaaattaggcgtattcccggctgcttggctgccgacgttcgtgggattggtgcgcaaacatgccacagtgctgattaccggcggaacaggcgtgggcaagaccaccttgctcaaggcgctgctggcgcaatgcgacgtgaacgagcgcatcgtcaccgtagaggaagttcgcgaactgggggaactgggacgcgacgatcatgtctcgttggtaacacgcgaggcgaatgtggagggcgtcggagccataagcctggcggacttggtcaaagcgacgttgcgaatgcgccccgaccgcgtggtgctgggcgaatgccgtggcgcggaaatcgtcgacctattgcgcgcgttcaattctggtcatcacggtggcatgaccaccgtgcatgcggacggcgtgaaccgagtaccgtccaggctgatttcgcttggattactcgccggagtcagtccacaggcgttgaccatgctggcggcaggcgctttcgacgcggtggtgcatttggagcgagtgaacggacagcggcgtatcacgcagatcggcgaactgcgcgtagcacatggtgaactggcaggaacaccgctggcggtatggaatggctgccatcctcctcggtatgccgccgaatgggggcacttcattgaacgatggggcatcgttcccaggccgagtggtggtgggtgatgatgtggtgtgctgttctggtggcgctcgccgtgctgatatggccggggaacaagtccgggaggctgtaccggctggcttaccgcgggcgcgcggtcgattccgcagccataaacgaacctcgatatgccgactcacctcgcgtgggcgttgcgcaggtgattacgtccgccatcgcgcgattgcgaggtggcggcacattggttgaagcattcgaggaacaatccagcagacgcttcgccactcatcgcattactgtggaacggctcataacggtgttcgaacagcggcgtctgcccgacgaatcaccagcgcaggtacttgaagctgcacgcggggtcgccgccgcagcggttttgagcgatgagctcggttgccaagcggtgccatgtctggaagcggtattgactgcttaccggcagatgaggctgatgcagaacttgcgatcgcaagcatgtgccgttcctaaagccactgtggggctgctgagcgcgcttccggccgtcactgtggcattgggcgagcttctgggagctagaccattggcgttcttgcttggatcgccacgcggtgtggtctgcttgacattgggaggatgttgttatgctgccggcttggcatggatgcgggcattgttgaaaggcagcggattatgagtacggtgtgggtacacgccgcggcaggctgtgcggcgattgctggttggctgtataaggctctgtctcgtcatgacagccgcttgccgggcgaggagccggccgtagcgcatgattgcgggtcgtcatggaccatactcatattgcgtatgttgcaggtgtccttgcgtcagggctcctcgattccccgggcgcttgacatggtgggcaaagccgtcggcggcgactgcggcgctcgcatgagcgaggtcgggaactccctgaccagaggggttccctgggctgatgcgtggcatgccgctatggctgttcagcatgagggtgcgccagctgatagtccatccaaggggaatacgaataccacgcaacgagatcttggcctgctgcaatcggctttggaatcgtcatggacgcatggcgatatgcctggtgtgcgcctcgaatccgccattgaacagctggaccgtgacgagcgtgctgctatcgaacggaatgccgcgaagctgtcggtaaagctactgatgcctacagggctatgttttctgccggcattcgtgctggtaggagtcattccggcgattgcgtccttcatgatgtgaatataggcgtgaactgagtgcgcttaggctgaatcttgttgtattgctcggtattgtacttggctgcgtttggttatccacatttgtggtggacgacacgtcgaggtgtggataactcggcaagctagaaccacataccccgtttttcctggtgcatgaagcgttgatagtccacagtggtatgcaccccgcgtcaacccggcgcgggggccaaccactcacatacgcatggggaaggtgcgaagccactgcgcagcttcccctccttaccgaaaggaacgccaatgaatacccctatccccgtcatcgtcgacgggcaggccggcatctttgcgcacagcaaggctcgtgtggccacgctgaacgccaaggcgaaagaacggctatgcctcatggacgcacgcatccgcgccctcatggctgagcccgaagaaggcgcagccactgcggaatacgcagtcgtactcgttgcggctacaggctttgcggcggtgctggtcgccatcctgaagtcggatgccatcaagacgttgctgaccaacatcatcaaacaggctctgaaagtcgggtgacagccatgaagaccatgagatgccggtggaggctcgccagactgccgccagacctatgcacgggatcggccaccgccgaattcgcgatcgtattgcccagcgttatcgccatcgccgggctgatactggcaatgggacgtgtggtcatcgtttccatggactgccaaggtgccgcgacggcggctgcacgcgagtttgtggttaccggtgacgaatcatccgcgcgcagcatagctgcggacgttgcagggggagatccccgcgtcagcattgcccacaacggccaatcgacgagcgtgatggtcgaatgttcggtactgcccggcccactggatgtcactccaacgcgggtcaccggcaacgctacggcgataagccaataactggtcggctgctggctgggcggccgcaatagaaaggaactgcggtgcagggaatgcgttatgaggagggatcgggcacgatggccggagccatgctggttatggcggtgggcattgcgctcgcggtggcggcaagtgtgggcaacctcatgatctgccagaatcgagcgcgttccctcgccgatctcatcgcctttgacgccgcgtatgcgctgtggcatgtggatatcggtgatccatgcgcgcttgctgcaaacatggctgaagcgaatggcgtcacgctgggctcctgctccgtgcgggatgaagacgtgttggtaaccatcaaggtggaaaccatggttccggtggcatcatccgtggagcggatggctcgggccggaccggtgaattgtacggaaggagacaattatcacaataatggaccgtaagcactgatgctctggcgggcttctggacctttggttaaggtgagagcatgagcgagagtgaacgcacagaacgccgtcgcgtggtggccatggtgggcaatcccacttccgataagggccgtggtgccaaggtggatgcgcgagtattgggactgctggagga

SEQ ID NO: 3883 - DNA, 20364 bp, Unknown
  R22_24m  MAG No. k141_5026
cgttttccgcggaatcgtcggattcttcggactcggtgccggtgtgccggaacccttcgtcatcgacttcggggatggcgccgggctgcttggcccaatcgcggatggtggccgtgcacagcagggtgggggtgccgttgatggccacggcgtccgaaccgcacatgccgtgaccgcacgaatagcggaaggccagcgtcgggtcgacggtgcgtttgatggtcagcaggcagtcgagcacggtgtccgaggggcgcgcgggaatcgtgtattcctgcacccactgcttgccgcgcggacgacggcgtgccgccgaatccgagccgccgccgaagggggagcttttcttggcgaacgggctgccgccgcgtgcacgttcggcgcgctcgggtcgcggcgtgaaacgatgcacttgcagggtaaccgtcgtgttgctcgcctcagccatgttctgcctccatgaaacagtgggatgtcaagtccaatatcagccaacctattgtgccacaagccctaggcggcttggtattaccaccagcggatcagtactcgcgcttcttgggtggatagtcggtgatgtgcaccggcttgaaacttgccggaccatcatcggcgaccatcgagtgagcaaggaaatgctcatcgtcgcgttcggggaaatcaagtcgttgcatggatccgcgggattcctgacgggattcggaagcgtgcagcatggcctcggccagttcgattagatgacggacttcccagatggcggtgacctcctgattgaaagcggcggtcttgtcatgggcccgcaaggtatcggcaaccggtgtgatgtcgttgttgatctgagtcaacgccgtatcgatggtctgagcggtgcaacgtacggccagagcctgctccatcactgatccgagttgggccatgagctgataaggattggcggtgggcccgccatcgtctgaatcgtccatcggcccggcgagcagttcgtcaagctctgccttgcgggaatcggcagcctgatcggcggcatcggtcagcatgtcatcggtcgaatcatcggccatgggggagtcaaccgggttctcgacgatgcgtgcggccatcgtctgaccagcacgtgtaccgaacaggcaggcgtcgagcagagaattgccgcccagacgattcgcaccatgtacggagacacaagagcattcgccagcggagaacagtccatcgactacctgcacggcaccgtcggcccaacggtacacctcgccattggtggtgatggggatgccgcccatcgtgtaatgcgcagtgggcttgataggcaccaggtccttggccggatcgaggttcgcgtactgctcgatggtttcgaccacctgcggtagcacttccttcatacgttcggggtcgatgccggtcatgtccagccagacgcagtccttcggaccatccgggtccttcgggtcggcgacgccgcggccggcgtcgatctccgccatgatggagcgggagaccacgtctcgcgcggccagatccctatgctccggggcgtagcgttccataaacggctcaccgtcggcgttcctcaggatgccgccctcggcgcgggccgcctcggacagcaggatgccggtgtgcgcgagcccggtggggtggaactgcacaaattcgatgtcctccagctgcaggccggcggccaaggccaatgccatgccgtcgccggtcaggtcccaggaattcgatgtggtatggaacagtcggcccgcgccaccggtggcaagaagcacgttgcgcgcgtggatggcctgaatcttgcccgaatgcgtgtcaaatgccacgatgccggccgcctgcttgccgtcgtcggcgagcaccaggtcggtcacataccattcctcggcgaactcgacgccggcggccacgcactgctgccacaaggtgtgcagaatctggtggccgatgcggtcggccgcataggcggcgcgcttgaccggggcaccgccgaactcgcgcgtgtggccgccgaaccggcgctgggcgatatgcccgtcatcggtacgggagaaggccacgccctgacgctccaggttgatcacggtctgcggcgcgtattcggcgagcagtttggccgcgtcctggtcgacgagccagtcgccgcccttgatggtgtcgtagtaatgccagtgccagtcatcggactccacattgcccaggctcgcggcgatgccgccctcggccgaaccggtgtgcgaacgcagcggctgcagtttggagaccacgaggatcttcgggtccacgccttgttccttgagctcggtgattttgggggagcgcagcagtcccaacgccgccgacaggccggccgctccggcgccgacgatcaccgcatcatacatatcttccaaacgtttcggactcatgggttcgattctcgcacacccgccgaacagtcttcgagccgtgtcatgaaagccgattagccgacacggctgctcagcttgagtatgccggcatcccgctcgatcactcccttcagctccaatgcgccgagtagctcaagtatggtgccgatattgggaatctcgtcgggtaccgtctctcgcgccacacgcaatagtgcgtccggggtgacgatgagatgtcgtttacggcattcacgaatcaatgccactaatgtgcgttccatttccggcagcttggcgataatgatacgttgttgggcttccttctcgggatcgagcttcggcttgacacgaagatccggcatctgatgcgacgagggcggctcttcacccttgctcttgttggcaccggcctcggcagttgcgctcgccggcccatccttggattgaacgagtgtaggctgagtatgcttggtcctaagacgtttcgaatgacctgaatcttgtgacgactcctgtgacgccgatgattccgaggatgctggcgataacggagtcgttgccggcacttccatggcctcctcgttttcggacgagtcctgacctgtggatttcggtatgcctgggcatgccgccataacgggcttatgccgttcatggcatatatcctcagtggatgtggcggcacacagaatcatcgcccggtggtcgccgatcatcttattgcacccggcgttgcaaggctgattgatgtcaccgggaaccgcatacacttcgcgcagcaattcgcatgcccatcccgcggtgttgagcgctccggaacgcaaccgggcttgcgtcacaatcaatgtggaagacatggccgcgataatgcggttgcggagtagaaaacgacgggcttcgggaatcgtccctgggcacagttcactgatcagtgcaccaccctgcgcctcgatacgttcgaacagcgtgcggttacgcatcggtccgatatggttgagcccgccggcgaatacggcaacggttctgcccacattggcgggcattctgccgtgcagcgcattcaacgctccccaatgtgccgccgcatccgtgcccattgcgcctccggacacgaccagatgcccggcaacgactgcctgttcggctacggtgtgtgccacataccggccgtattcggtcacgtcccgtgaaccgacgatgccgaccggtttggcgcaactggtcaatgcgcgtggatcgcctttgatccacaaacacagcggtggcgcccaatcggagcgaatggacaggtcggccaactgcgagggccaacatggatggccggggccgataatccattgcgtgccatccatagtgaaccagtcgcccagttggatgatgtcttgcgagggcaggtccatcatgcggttatgccagccggccagtgcattgcggaaggagcacatcgcattcgccgacgccttgcggccccatcgggtgaggccatccacgaacatgcggtcaatgcgtgacagcgccgggccgcagattccagatggctggcttggatgggattgcgccaacgcgtgccagagggattcggcgctttccgcgcctttgagcgtggcgtacatcatcacatccgccccatcaagacagaacgtgagcgcggcgcggtataacgtatccgtgggaggcatgggaatggtgcgcgaaacagcgaggcccgtatcggtgtgatccacactgcctgcggtgccgccagattgtcggatatcagtagcgttactcatgtcatcctcgttctcattccgatgccctgatggacgtcctgctcggtgggggatacgcggccggccagatcggcgagcgtccaagacagacgcatggcgcgatcggccccgcgcaatgtgagttgatgattggacagggcccgattgaccaattccatcgctttcagcgacgtattggcgtgcagccattttcccgaagcttgcgcgttgcacacccatccgtactgtctgaaccggtccttggccacttgacgggcgcgaatcacacgagcttgtattccggcactggactcgccgattggttcgctttgcacggcaatgcgcgagaccggtggcaccgccatctgaatatccacacgatccaatatcggtccggacaatcgcgagaaataacgtatacggtctttttcccggcaagcgcaacgttcgccggtgccgtaatagtatccgcacgggcaggggttggccgccatgatgagttggaatgaggccgggtaataggtgctgccttttgaacgggaaagcgccacatacccggattccaatggttcgcgcaacgtctgcagggcgcgtgcgctgaattccggtgcctcgtccaggaacagaatgcctcgatgcgcgcgcgtgatcgcgccgggaacggcgatgccgctgccaccacccaccaaggccgccgtgctggaggtgtggtgcggtgcctcgaacggcggcatgtcggtgatgccgtactgaggcagtatgccgcacagcgaccgtatcgatgctacctccagttgttccgcctcgttcaacgggcacatgatgccgggcatacgtgaggccagcatggttttgccgctgcctggcgggccggtcatgatgagattatgtccgcctgccgccgccacttgcagcgcccatttggcatgttcctgacccagaacctcgttcatatcgccacaatcgttgggatggcttgtgggcgattgatccatggtggtctcgtcggcaaccggtgtatcgggaatcgtataggtggcatcgccgcccatcagttcgatgagctcacccacatgcctcacgcccactacatccagtccatccaccattgaagcctcgtcaagattgcgatggggaacaatcattttgcgcacgccacgttcctcggcatgcagcatgatcgggagcagcccatgaatcggcagcaccgagccgtcaagattcacttcgccgagcacaatggtatcttctaggcaatcatgccctatggcacccgccgcgcataggacgctggccgcgatggccagatcatgcgacgaaccacgtttgggcatggccgcagggctcatgttcacggtcacgcgggtttgcggccaaccgaatccagtggcttgacacgccgatttcacgcgctcgcgggcttcggacaacgatgcatccggcaatccgatgatgctgaagtatggcaagccagggctgatgaaagcctgcacttggacgatgaaggccttaaggccgatcagtccgactgagagagtgctgccgatagccatgtctactcctttcgcaatgtgtttcgcaacgtggctgttttttttgggggacgaattcagaaggcgttttcgatgtgatgcacgagcggtctgcccacccgaagcacgatggtgacgacatcgaaacggactgccgtatgcggcacacgattacgccggtcaagcagccaatcgcaggcggctttcctgagattgtgctgtttcgccggcgtgatggcctcttgcggatatccgtaatgcatggaccggcgtgatttcacttcgacgaacaccaccgtgtactcgggattgagcattacgatgtccaattcgccgtaacgggtatgccaattgcggctcaaggtcgtccaaccgtgttcctccagccacgcggcggcatactgctcgccgagcgcaccgaactgtttgggcgtcagattgcggtcgcccatcgtggccgcaatccgttccgaaggcagcgtcgcctgcggatcaggtgaagccagcatgggctggtgaaaggcaagaccggcgtcgatgccggacttcgtcgtcggctgggtaggtggtaaagcgttcatgattccactgtgcgggttacttatgtaagagcacaagcgcaaccggcaaatgtggatactatgacgcggtttggcgtgttgtggataacgtgtggatgaaaacctggttatccaccattagttcagaaggtttaccaaggctccccagtcggcttccctgtgacgacagacaacccgccgagttgttcgctgaatacgtcagacccagtgagcggagaggggagccaaggtgcggtcacttcaccaaatcggtgagttcgccaaggttcagttcgaagctgacgccacgatcctcgaaatgcggctggttacgggtgctgaccatggcgtggcgcacgaactcgccggcgatttcggccgactcggccaggccgcggccggccatcaccgcgccgcacagggcagatgcgaaggcgtcacccgtgccgtgaatcatgtatggcagcttttcatgagccagctcgatcttgccggcaacaccggtggaagcgctgaccatatagttgacgattttgccatcgccatggtcgatgcccttcaacaccacgttcttcgcgccaagctccagcagcgcgcccaacagctcgtcaaccgtggcttcatcgatatcctgaccggggtagtcacgcttggtcagaatgctcgcttcggtgaggttcggcatcagcacatcggcgccgtcggccagcgcacccatcgcctcgcacagttccggcgtatacgtgggatacatttcaccggcgtcgcccatcaccgggtcgaccagacgtagcgcattcggatattcgcggtagagacgctgaatgatcgccacctgatcgggggagcccaggaatcccgagtacacgccgtcaagctcaacgtcttccttctgccaggcatccagatagccggagaggatatccgtggtgtcatggaacgtgaacaccgcgtacttcgtgtgtgcggagaacagggcggtcggcaccgggcagacatcgcagccggctgccgaaagaatcggaatcgcggcggtcagcgagcacttgccatagccacacatgtcatgcacggcggccacgcgcgggatgtacttcggatcgcggtcgtacaacgtaacgtcggacactagaaaactccaatcaatcagacggatgtcacataatcacagttgacattagtctgtagggatacggacacgctaaccggtattcatctggtgaggttccgtcgccgaattcaacagatcgctcaaactcctagcgacagaaatcttggaaataaaaccatccaccccaaaattccgttgctggttccatctgagcgacagaaatttcggaaatcatcccattcgtcctgaaattctgtcgctgacgtcacctcagtgacaggatttcaggaaattgaggatgatttcctagatttctgtcgcgaagagacgtggaagtgtctcggcgtgtcgtgagatttttgatgactattttgcccgacgtaaccgcctcatatcccaatgattccaagggtttataagggtctataggcaaccccgataacgctcagcttgcgacatgcaccttgagcgtcgtaacttcataaccaacacctcgccaaccgcccgaacacggcaggcgggtggcaaggaaaaatcctcgcgacctagcacaaccaaggagaaagacccatggccgagaacaacaagaagtaccgttttgaaaccctgcagctgcatgtgggccaggagcaggccgacccggccaccgactcccgtgcagtcccgatctacgccaccaccagctacgtcttccacaacttcgaccacgccgaggctcgcttcggtctcgctgacccgggcaacatctacggccgtctgaccaacaccacccagggtgtcttcgaggaccgcatcgccgcccttgaaggtggtaccgccggtctggccgtcgcttccggcgccgccgccgtcgaatacgccgtgcgcaacatcacccagtccggcgatcatatcgtcgccgccaagaacatctacggcggtacattcaacctgctgcgccacaccctgccgcgcgacggcatcaccaccaccttcgtttccgccgagaacccgcaggagttcgaggacgccatccaggagaacaccaagctcgtctacttcgagaccttcggcaacccgaacgctgatctgccggacttcgaggccatctccgaaatcgcccacaagcacaacctgccggtgattgtggacaacaccttcgccaccccgtacctgttccgcccgctggagcacggcgccgacgtcgtggtcgagtccgccaccaagttcatcggcggccacggcaccaccctcggcggtgtgatcgtcgaaggcggcaagttcgactggaacgccgttccgggcaagttcccgactctgaccgagccggatccctcctaccacggcctgaacttctacgaggccctcggcggagccgcctttgtgacccgcgtccgcgccattctgctgcgcgacaccggcgccaccctgtctccgttcgctgccttcctgctgctgcagggcaccgagaccctgtccctgcgcgtcgagcgccacgtccagaacgctctgaaggtcgtcgagtacctgcagaccgtgccggaagtcgagtccgtctcccacccgtccatcccgggccgtccggatcacgacctgtacgagaagtacttcccgaacggagcaggctccatcttcaccttcgatatcaagggcggaaaggatgcggctcgcgtcttcatcgacaatctgcacctgttctctctgctggccaatgtggccgacgcaaagtccctcgtcatccacccggcttccaccacgcactcccaggagaccttggaagagctcgaggaccagggcattcaccagggcaccatccgcctgtccatcggcaccgagaacatcgaggatatcctcgatgatctgaagggcggcttcgaagcccttcgcgcttccggcttggccaagtgaggtcgacaggagggttgacggcccgatgagaaggggcgcgatgctaatggggtgcatcgcgaatcatcgagccgcatggggtgccttccgcctgatcgcttgacccaaggagtagaaagctcgcactgacgtcatgcagtgcgggctttcttgcgtctgtatgcctcacactgtttgcgcagaggcatgaatagtgtgagacctgagacgacataatcctcaaggatgagggccggcgcgtggcccctagcccaattcagtctggcgcacgatggggcgcgccgttatttcttcataagttggaatcatcatccgggcataaggcccggcccaatatggagaggcattatgaacgtgcagaacccgtccgcatcgcgcggcatcgctattcaggccgtcgacttggtcaagaactacggcaccggcagcaatatggttcacgccctgcgtggcgtgaacgtgagtttcgaacgcggcaaattcaccgccatcatgggcccgtccggctccggcaaatccacgcttatgcacacgctcgccggcctcgactccgccacatccgggcatattcttttcggcggggcagacctgacccgcatggacgacaagcagctcaccttgctacgtcgccacaagatcggcttcatcttccaaagcttcaacctgttgcccatgttcaccgcagagcagaacatcctcatgccgctgactttggccggtgataagcccgaccgtgcctggttcgacctgctcgtagaaaccttgggactcaagcagcgcctgaaccaccgaccgaacgagctgtccggtggccagcagcagcgcgtggccatcgcccgcgcgctgattaccaagccgaagctggtgttcgctgacgagccgaccggcaacctcgactccgtttccagcgccgaagtgctcggcttcctgaagcgttcggtcaacgagcttggccaaaccatcgtcatggtcacgcacgatgcggcggccgcctcctacgccgaccgtgccatcgtattcgccgacggacagatcgtggccgatgaatcgaatcctactgccgaaacgatgaacgagctgcttatggccgaacgcgaacgcgccacgcgcactgccgtcaccagcacacgcgccgacacgctcgcccgtcttgccggcgtagaggatgtgcccaacctgcccatcaccgacgctccattgcccccagccgggagaaccggcaccatacgccatgcccgcgccgccgcacagcacactcgctgagtcggaaagcgagagacaggatacccccatgttttccatcactctgaaacttatgaagaaaagcgccaggatgctgattccggcaggcatcgccatcctgatcggcactgcgttcatcgccgctaccttcctgttcggcaacgcgatgaacgatgcgcttgccgcccagaataccgcccagctcggcggcgcgaactacgtgatcagcccggatagcggcaaggacctgaccgataaggaccaggactacatctacacgcgcacggttaacgacttccagcttgaccgcatccgcgccaccaaaggcgtcaaggacgcacgtgccggctacgcgggttccgtgaccgtaacccgtggcaacaagcatgccagcagctacgtcatcaccaccgccacaaaacgcacgctgctgccggtcaccatcacgcaaggagaccagccggcggacagcaacgagatcgccctgaccaagtccgtagccgaccagctcggcgtcaaggtaggggaccgtgtgaccgtcaactcgcaggcggcgcagtatgcgggcaagaccggcgattcggccggtaataccggtgacgctggtgatgagtcggcccagaacgccgatggcacgagctcgcacgacggtgattccgatgccgcgtccggcgcgtccgccccatccgacggcaccgacacggccgccgactccggcatgaccgtgcgcgtggtcggcctcaccgacgacccgaacggtgcctacgcctactacggtggcgcttccgtgctttccgacaacgtcatcaccgcaatggccggcagcaacgatttcggcaacctgcctgtctacctcgtctatctcgacatcgacgatgccagcgacacggccgcggcatccaccgtaaaacaggtcagcacactgctccctaagcatttcagcgtgcaatcccgtgccgcgctcgtcgaggaatccgtcaaaagcatgagctcgggcgaaaccagcatcaccaccatcttcctgctgagcttcggcatgctcgccatgctggtcgcggcactcgtcatcgccaacaccttccaagtgctcgtggcacagcgccgccgcacactcgccctgctgcgcaccatcggcgcgaacaaaagccagctgtatgtctccgtgctgtttgaagccggtgtgctgggactgatcgcctccgcactgggagtgggcctgggcatcggactcatggccgcactatgccagtcgggcctgatgaaagccactggcatgaccatgcgactggtactatccggtccggtgttcacggtgcctatggcattcggcatcattatgacggtgattgcctcgctaggctccgcgcgttccgctaccgccgtcaccccgctggaagcgttgcgacccatcgaactgaccgacacgcgacgggccggtgtggtccgcgccgtgatttccatgctgctgattgcgggcggcgtggcactgtgcgcattctctgtatggcagatgtccgagaaaatcgccggacgtgattcaatggccgacaagcagtattcgctggtgctgctcgccgccatcatcggatgtgcattgatcttccttggactggtgctttccgccacgttctggctaccggtgctcatgcgcggcgtgggcgcgctggttgcactggccggtccgtccgccaaagtggcacatgcgaacattcagaagaacccgcgccgcgtggccgccaccggtgccgcactgcttatcggcgtgacgctggtctccaccatcgccaccggtgccgccagcgccaagcaaaccatgaacgaggcgctgaccacgcgctacagcgtcgacatgattgccgctggcaccgatatgactggcaaacaggccagtgaggcagccaaagtcaagggcgttcagagcagtatctacgcgccgacccgcatgatgaccatgaaggatgccgacggcaagagcctgagtgtgctggtcgtgggcgtggatggcgtcgacgcgctgcgcaaggtggtgcgctccgatttgtccggtgtgaccattgatggcgattccgtactgatgcccaagtattccgccgctacaggcaaggatattccgctggacaagagcgttacgttcacggctggagcggccgaagcacaagccgatgccgccaatggtccgtccggtaatgatgcgaacggcagcgccgaaaacggcaatggacaatccggcggcacacagacgctgacgctcaaaccgcggaaggtggactatcgccgcattgcctccaactacgccgcggtcgccttcgtggacgccagccacttcaccaacggtggaatcaaggccgacgggcatatcatgcttatgcgtattgacgccgagggcgcgggtgttgcgctgaacgacgtattcaccaacgtgcagaatgtgttctccgccagtgctggcgttaccgtgaccggtccggtggccaaacgtacgcaatgggagaccatgatcaacggcatgatggcattgttggtcggtttgattgcggtggctgtgctcatcgccttggtcggtgtggcgaacacgctgagtctgtcggtgatcgaacgcacacgcgaatccgccaccttgcgtgccatcggcatgacgcgcggccaactgcggcgctcgctggcggtggaggcgttgctgctttcgctcgtctccggcgtggtgggagtggtattgggtaccctgttcggctggctcggatcctacatggtgtttagtttgtacggcgacaccgtgttcccgttcgaatgggccaccaacggtgtggtgctcggcgtcgccgcgctcgccgctctgctggccagcgtggcacccgcccgccgggccgtcaaaacgccaccagttgaagccttggccgaagcgtagagcaataagctccctcatcagagggagcttttttgttacaccagcccgttatcgtacgcgaagactacagcctgtacgcggtcacgggcgttgattttggcgaggatatgcgccacgtgggttttgacggtgggaagggagataaagagcttgtccgcgatctcctgattgctcagaccatgggcgatctccaccagcacctcgcgttcacggtcggtaagcagatccagttcgggatcggtgtatgctgggcgtgacgtattggaaccgtcggaagcggccccggcaggggaggggatgccggtcatcgagccggcaccgttgccggccgcaccgccagagacgccgacggcggaaccgtacacggcaccggagcgcgcgacatcgccggtcagcgaaccatgctgcgcgtaaccgtcctgcatcatcttttcgatgagtcgcttggtggcggaaggcgcgataatcgcattgccttggaatacagtacgaatcgaattgagcaacgtttccggttcggtgtccttgagcaggaagcccgaggcgccggcattgatggccgccatcacatactcgtccaaatcgaacgtcgtcagaatgattacgcgcgtcggccggtcgtcagccgattcggccgagacggtcgcgttgtccggcgcggcggagagcgaggtaatacggctcgtggcctcaatgccatccatgccgggcatgcgcacatccatcagcaccacgtcgggatgcagggattccgccaacgccacggcttgggcgccgtcggacgcctgcccgaccacctccatatccggttgcgaaccaatgaccatggcaaaaccggcacgtaccagctcctggtcgtccgcaataatcacgcgaatgcttctgctctcgttcatgctctccactgtatccgtttcctatcggagcgccgctccataaacaccctgattgttccctgagttcttattgggcaagtctctcaccggggtaacgttcccgcgtgttgcatctgactatccaacgaagccgccggtcgcaactgcatatccggctgcacaccctcatgggcctcgtcgctgaacccggtttcacgcaacactctcaacagctgacgcatatgagccaatgcggcgcgcccccgagcaccaatcgcggcaaaagccgcttcaatctgcatactatcaggcgcaggttcggcgttgagcatcaccagtccctcgtcagcctgcgcaatcaccgattccagcgtggtcagtacttcggtttgcatcgccgcactaatacggttgcgctctaagttggccgccagcaccttttgccgctcctgctcggctcgcagcgcctcctcgcgtcgcaacagcaccagagcgtttgcgccacgcgaacggctccatcgagccatcgcaatgcaggcaaaaccgaccaacatgattcccgcgcccggcagcaagccggacaaaaccagcctccattttgagagcatggaactaccatcgggcaaaaacagatggaacagctgactgtatccattccacccagccatcaccttgatgcccgcaagccacgaatcggctgccagcgccacgctcacccagcgccaagcggactctcgtccatacaataccgccgaatacacggataccatcgcaaacatattgatggtcaaaatcgatggcaagaacaacagttgcacagcagacagcaccgccatcgccagcgcgctgccctctgagaagcggcgacggaacgccaaaggcgagagcataataatcgtcagcattatagtcggcacgcggttcggcgaatacggggcattgccgatcatttgcaaatcgccatacgtggcggaatcaaatagcgcaatcagcacgatagtggcgataacgtccatcagaagatagtgacgctcggtccactgcgcaaatcgacccacccagttcgactcacgcgtatctccctggtcgagtactttggggcgcgcccgatccatcaatcctcgtatacgcgagataacggttagcaccggatcctccgtatcggtgccagactgtggggcggcaggggagagcggaatcgtagccgccacaataaagccaccattcggccctgggccggcctgcacgctgccacccaacgactcaatgcgttcatgcataccaaccaatccgtatccgggcttatgaccgtctgctgcagacgtcgcgccacggccgttatcggatacggtaatcgacagcacatcgtttgaccagatttcatcgatggtggctttagcaccctcgcccgcatgtttgcgcgtattggtcagcgcttcctgcacaagacggaacacggcggtttccgcgtcggcggacagccggtcaggttgcgctttgccggtcatatgccgggacaccaccagatgaccgtcaaacagcgaatcgatgtcggcatatccggtactgccactcgcaccgaacacattgaacagacgctgcatatcatgctgcgcgcgttcggcctcatggcgaatcgtacccatcgtgtgcttggcgatggccagatcatgcgcacccgcataccggccgccatccgactgcacaataatcgtggagagcgtatgtgccaccacatcatgcatatcacgggcgatgcgtgcgcgttcggccagcgccgcgatgcgcgtctcctcggcctctttcgccacaatggaagcgttgcgctcgcgcatggccgccagcgtggcgttgcgcgctcgctgccacaaggccatgatgatgacgctcagcacgctcgattcgatgaacgccgcctccatgccgaagtcagcgagcatcttggccccgcagttgacggcgccgcttgcccccacgacgccggtgaccgccgggcatgtgggcatcgtgatggcatcggacagccagccgtcgcggatgacgcgcgaaccggaggaaggtccggcgaacagcggacccacgttgaaagacaccgaccagaccatcgccgcgaccagtcccatgacgaacgccgtgacgatgaaccgccaggaatgtcggggattgccatacagaatcaccgaatacaccatgatcagggcgtagaaatcgaaatacatgatcgccgggccgaacacaagatgcgtgatggtcagcgccacgaacagccaggccgccggctccgggcaatacctgcgcagcatcagcggcacgaagaccggcagcgaccacagcgtcatcgacgcctgagttgcgggaaacaatatgccgcccgtcgaatcagggctggtgacgccgatgaacggcacgcagccggcgatcagcgccgcagcgagcaacgtgtcccatagcagtgtgcgggtcgactcccgtgcgcaccatgccctcacgcgcgccataatctccataacgcgcaaggctagcgtgtccggagacgaaccggtatcactcttcaggaggatttatggactagagtcttgaaccatgacaatgctgagcaaatactacgtgcccggactggccatagaggaccattccatcgatgttccgctcgactggacctgccatgagccaggccaagcgttcgacggcgaaaccatcaaactgttctatcgcgtggtcaccgcgcccgaacacgtgcatgacgacctgcccctgctgattttcctgcaaggcggtcccggcggtgccggcccgcgcctcaacagcccgacctccgacggatggatcgaggaggccatcaggcacttccgggtgatcctgcccgaccagcgcggcaccggccgctcctcgcgcgtggacacgcacgccatggcccgcatcgccgccgcgcacgacgatgatgccgcggccggcgcacgagcccaagccgactacctgaagaagttccttgccgattccatcgtgcgtgacttcgaacatctgcgcctgaccgaattcggtggccgcaagtgggtgacgatgggccaaagctacggcggcttcctgaccctgaccacactgtccctgttcccggccggcgtaatcgccagcttcaccaccggcggcatcccgcacgtgccggccgacgccgctgaagtgtacgagcataccttcccgcgcatggtgcgcaagacgactcagttctacgagcgctacccacaggacaaggagcgcgtggccgccatcgccgacaagttgccgactactgcggaagtcgccgaattcgttggcaaactcaccgattccgtactgaatccgatggctggtaccgatgtggagcatcgacttggcgtgatcgccggcatggccgcccacggcttcccgctgatgccgaacggcgacccgctcaccgtcgaacgcttccagtgcttgggatccgactttggcatgaagccgagcttcgagcgtgtccattggattcttgacgacgccttccttgatggcgatggttccgcttctgccgactcgccgttgtctgacgaatttttgaccaaagtgatgaacgccacgtcgtcgcgcccactgtactggccgctgcaggaattcatctacgccaacggcgagcttgacgagcccattcgttgggccgcccagcgcgtgcgcgatggcaagcccgaattcggtgctgatgaacgcccgctcaacttcaccggcgaggccatgttcccgtggatgttcgaacaggaggccgcattgcgcccgttcaagccggccatggacctgctcatggaagacacgcacttcggcgtgatctatgacgaagaacagctggcccgcaatgaggtgccgttgcaggccgccgtctatttcgacgacatgtatgtcgattccggcctgcagctcgacaccttgagccgcgtgggtaacagccactactggaccaccaacgaattcgagcatgacggtctgcacggcccgctcgtcttcaagcacctctacaccgaagccctcaaccgaggcgacctcgaagaactgttctgactcaaggaagcaagctccctctgatgagggagctctgtatacatgcacgaaaggaaaacgtatgactcagaacctcaccatcggttttatcggatatggcaacatggcccaggccatcgcccaaggcttcgtcgacgcgggcgtggtcgccggcggccagatggttgcctgcgccgcccactacgacaagcttgagaagaccaccgccgaacttggcgtgcgcccgttgcgcaatgcgctggaagtggtgacagccgccgacgtggtcatcatcgccatcaagccctaccagatcgccgccgtcgtcaagccgctggccgacgaacttgccaggccgggcaagatcgtcgtttccatcgccgccggctggaatctcaagaagtaccaggacctattcgccaccgaagacggcgaatccgtcgactccccggacatccatatccagtgcaccattccgaacactccgatggccgtgggcaagggcgtgctcgtcaccgaatccgtcaacaccctgaccgacgacgaaaccgaaaccttcgagcagctattcggccccatcagcctcatcgagcgcgtggacaccgcgcatatgaacatcgccatggtggtggccggctgcgcgcccgccttcactgacatgtacatcgaggccttgggcgacgccggcgtgcagtacggtctgcagcgagccaccgcctaccggctcgccgccaagatggtcgaaggtgtcggcgcgctctacatggccactgaaacccatcccggtgccatgaaggacgccgtctgctcgcccggtggtaccaccatcaagggcgtcgcccagcttgaaaaggacgggttccgcggctcggtcatcgacgccgtagacgccatcgtcggctgactgccaatcagagttcgcgtatattcgcatatcacagtcaaggccttcgagccgtatgctcggaggcctttgcatatggccggttcaccacatgcaggttcaaggtgtccagcttctccctagactggaatcatgtctcttactatcggaatcgtcggactgcccaacgtcggcaagtccaccatgttcaacgcactgacccgcaacaacgtgctggccgaaaactacccgttcgccaccatcgagccgaacaccggcatcgtaccattgccggacaagcgtttgcccgtgctggccaagctggtccacaccgaaaaggtcgtgcccgccacggtgaccttcgtggacatcgccggcatcgtcaagggcgcctccgaaggcgaaggcctgggcaacaagttcctggccaacatccgcgaggcggacgcgatctgcgaggtcgtgcgcgccttcgaggacgacgacatcgtccacgtcaacggcaaggtggatccggccgacgacatcgacaccatcaacaccgagctgatcctcgccgacctgcagaccatcgaaaacgcgctgcccaagctggagaaggatctgaggggcaagaagatcgagccggcctacatggacgcagtcaagcaggcaaagaccatccttgaagccggcgagacgctcgacaaggccgcacgcgaaggccgcttcgacaaggattccgtctacgacctgcatctgatgaccgccaagccgttcatctacgtgttcaacgtggacgacaacgagctggccaacaaggacctgcaggcaaagctcgccgcatccgtggccccggctccggccgtgttcctcaacgctcagttcgaggcagacctgaccgagctcgacgaggcggacgcccgcgaaatgctggccgacgctggcttgagcgagtccggtctcgaccagttggcccgcgtgggcttcgacatcctcggactgcagaccttcctgaccgcaggcgtcaaggaagtgcgcgcttggcagatccacaagggctggaccgccccgcaggccgccggcgtgattcacaccgacttcgaaaagggcttcatcaaggctgacatcgtctcctacgacgatttcgtggccgccgacggctccatggccaagatcaaggaggaaggcaagctccgtcagga

SEQ ID NO: 3884 - DNA, 19766 bp, Unknown
  R22_24m  MAG No. k141_5224
acgtcgttgatgatctgggcgccctcgctcagcgcagcggcggccacggatgcgcgcgtggtgtcgatggacaatatggcaccggccggaatcaatgtcttgacggcaccggtgatgcggaccaattcgtcggcctcggacacgcgcttggcgccggggcgcgtggattcggcgccgatgtcaatgatgtccgcgccggcggccatcatgtcgcgcccgtgctgggccgccttggccgggtccagccacaggccgccgtccgagaacgaatcctcggtgatgttgagcacacccatcaccatggtgtgcgtagtgtcatgcaacgcctgcaaatcagtcattatgtttccccttctatgtaggtcccaagtgagctccctatgatgagggagcttagtagacactatttatccaaaatgaggctcatggcttcggctcgggtggccggattgcgcagcatgccgcgcaccgcagaggtcaccgtgcgggcggaagacttcttgatgccgcgcatagacatgcacaggtgctcgcattcggtcaccacaatcacaccacgtgcgcccgcatactcgaccagcgcgtcggcgatctgctgggtcaaacgctcctgcacctgcggccggcgagcatacacctcgaccagtcgggcgagcttgctcagccccatcaccccgtccttggcgggaatatagcccacatgggccacgccgtggaacggcagcaggtgatgctcgcacaccgaatacagttcaatgtccttgaccagcaccagttcgtcggtatccacgtcgaagtgcttctccagcacatcggccggggaagcctgcagaccggcgaacagctcgcggcacgcgcgggcgatacggtcaggtgtttccaccagcccctcgcgctcgggatcctcgccaatcgacttcaggaacagacgtacggcctcgcgcacgccttcctcgtcgtatgtgcgtttctcccgctggcaagactctatatattcgttcatctcatctctcccttgtcattgtccacaacgacgtcggcccggcctgcgtacgtgagaaaccacatgaacaggtcgggccgaatcgtcatcgtgtctactcttccggcttcatgccgaccgagcgcttaaggctttcgggaatctccaccggcggcttgtccgagtcggggcgacggtcgttggacagccacaccgggcggaccggagccttcttgatcggcgcgaagatcgccgcaagttccttctcgttcagggtctccttgaccaacagctggcggaccagctcgtcaaggatctcgcggttgtcgttgatgatggtccacgcctcggtgtgcgcggtctccaccagcttgagcacctcgtcatcaatcacttcggcggtgcgatcggagtacttgcgcggctgcagaccgtccatcacagtggtctggtcatcgtcggaaccccacttgatggcaccgagcttgtcggagaagccgtattcgatcaccatcgtacgggcgatgttcgtagccttctcgatatcgttcgaggcaccggtggtcgggtcgtggaagacgatttcctcggcggtgcgaccgcccatcgcgtaggccatctggtcgagcagctggttgcgcgactgcgagtagcggtcggaggtcggcatgacggcggtgtagccgagggcgcggcctcgcggcagaatcgtcaccttggtcaccgggtcggtgttgttcagggcggcggctaccagcgcatggccaccctcgtggtatgcggtgttgcgcagctcttccagagccatgcccttggacttgcgcttcggtccggcctgaacgcggtcgatggcctcgtcgatggcgcggttgtcgatcaactgggcaccggcacgggcgcacagcaacgcggcttcgttgagcacgttggccagatcggcaccggtgaagcccggcgtgcgcacggcgaccatgtgcaggtcgacgtccggtacgaacggcttgcccttggcatgcaccctcagaattgcctcacggccttccagatcaggggcggccacgcccacctgacggtcgaatcgacccggacgcagcagagcggggtcaagcacgtcagggcggttggtggcggcgatgatgatgaggttggtgtcgttgtcgaaaccatccatctcgacgagcagctggttcagcgtctgctcgcgctcgtcgtggccaccgcccatgccggagccacgcttgcggcccacagcatcgatttcatcgatgaagatgatggcgggggcgttcttcttggcctcatcgaacaggtcacgcacacgggaggcaccgagacccacgaacatttcgacgaagtcggagccggccatcgagtagaacggcacgccggcctcgcctgcgatggctcgggccagcaacgtcttaccggtgccgggaggaccgtacagcagcacgccacgcggaatacgagcgcccagcgccttgtacttggacggatccttgaggaagtccttgatctcctcgacttcggccacggcctcgtcttcaccggccacatcggcgaacttggtggtgggggtctggccatcgagtagcttgccgctgttcttcttgccacccatgccgagcatgccgccggcaccacccatgcggctcatcaggaaccagaatagggcgaagaagatgatgaacggcaggatcgaggtgacgaggtagctcagcatgctggtctgctcgatattcgaggtccagcccttttcgagatcaccgttctccacggccttggccacctgtgcgccctgcgcgaaggtgtagtagaactgcacgttcttgccgtagttggtcaccttgccggtgtcggcgtttttcttggtgtagtcgttcttcagcttaaggcggacgacctgcttgttgtccgtgatctcggcgtaggtggccttgccctgattgatcagcgcgaaaccatctttggtgtcaatggtcttcgtgccaccgccggcgaacatctggaacatcagcacgaccatgaccacgagtacggcaccccacagccagggggactgccatatcggccggttctcgttgttgttgcctttgccattgttcccgttattgccacggttgaacgggttggtgaacgggttgccgttgttacggttgttgttcgggttcggattattgccgttacccggcccttgcgggaagctcatgcttgcactccttggtagacggacggcttgaggaccgcgatcgaatcgaggttgcggtagcgttcgtcaaagtcgaggccgaagccgacgacgaactcgtccggaatctcatagccggcgtacttcacatcaacgtccacttctcggcgggaaggcttgctcagcaaagcgaagacctccacggaagcggcaccacgacgtttcagttctgcgaccagccacgcgagcgtgcgtcctgaatcaacaatatcctccacaatcaaaatgtgccgtccgcgaacatcggcggacaaatcctgcctgactgtgacctcaccgctcgacactgtgcccgagccatagctcgaaaggctcatgaagtcgatctgtacaggaatgctcatggcctgggtgaacgcgaccagcgtattcacggcccctttcagcaccgcaacgagcagcggattcttatcgcggtaatcctcgctcgcgagagcggccatctcgtggatcttggcatcgatctgttctttgctgaccagctcgtggtcaatatcttcctcaacgtcagcgattcgcatgcgctccatcttggcacacgcgaatgacgtgtttcttgcgattggctgaataacctctgggaagtgagacgccgccttggccatgccaatcgacgaccagccggtcgatggcggcaatctgggcggcactggcgttcacaccggcctggctcagcgcgtgagcgatgacccgcaaccgaatcgcctctggctcacgtgcaatacgtttgatgccgatcatcaggccgatgccatggcccggatcgttggtatcgtctgcagcacaggctcgtggcgtatcggtcgataccgctgccgacgatgccggccggtcaactgccgtaaccgcctcccccatcacctcgtcggatcgctgatccagatactccttgtccattctggccagctgtgcgctttcggcgaaatggcgggtgacattgaatccagcgaatcgttcgatggccggcagcaggtcgtggcgtacccgcgagcgcaacggatagtcgtccggcaactcgccgtctaccgcatcgccattggtggggtcatcccaatattccacacccaagtcttcacagaggccggtggtttcgtctcgagtaagggtcagcagcggccgcgcaaaagtcacgccactgcgtgtgaagacctgcggcatgccggccaacgcatccacgccacggctgcgcagcagtccgatcaatacggtttccgcctgatcgtccatagtgtgggccaacagcacggcaatggcacctgattcacgcgccgcggcgcacagctcgttgtaccgggcctgccgtgcggccgcttcgaggccctcaccgcgtgcctgcacggttgtgttgcgcacgatgaccgggcccagtcccaacgcacggcaacgatccgcggcctcgccggcgacctgttcggaaccctcctgcaagccgtgatccacaatcacgacaccgcaacgcacgcccatggacgtgcatacgatatggcttaccgcggccagcgccatcgaatcgcgcccgcctgaacaggccacgagcacgagtggtgcatcggaggcaacggcatggtccccatgctgcgcgaattcgggagcctgcacatcgcatagttccacggcgctcagcgttgttcggaccgcgcctacggccttgcgcaatcgtgcggaatatgccatgtactcaccacccttttctggttataggcactcgtgcgtttatggacgtttacggcctttgtagcccttgatggcccttgatgcctcttttacagccccgcgagcttggtgatgaacgagtcgatggcgctacgcgcggcggcataatcctcaggattgttgaccaccacggcaaacgacaacgctcccccattggtacgggacacattgccggccatcgacgtgaccgtgccgaggctgccggttttgacgcgcagcagaccggccacggcatcatccgtataccgatcctgcgccgtgcccaccaaccccgcgatggatagaccttccgcaccagcagcaccgctctcggtggtcagattacgttgttggacggccgccagcgtgcgtacggtgagccgggagccgggagacaggccggagcaatcggccatggtcagaccggatgtgtcgagaccgagatcgttcagagtggatttgaccgcctccgtgccgccttcaggactgtttgtcgctgatttcgccaaggcggtgagtctgccgaactcctcggccagtgtattgtccgaatgccgtaacgtgtatgccatgatttcggacagtgttgccgaactcaccgaggccaaaggcgtttcgccggatggagcggtgtttgccgtcacgtctccggtaacggccacaccgttcgattggagcagttcggcgaatttcgtggccacgtcgctggcggtgtgctgggacagttccgggtatccggccgaatcatcagggtcggccggcgcaggcgtatcggcggtgtattggcggcctccatcaatcgccattgatgagaccggcgtgaagtagacggtgtagtcgcttaagaccgcgccgccttccgacagacctgcgggaatgcgtgagtcgccgaatagggtgtcgtcgtactcgagattgacggaagtgatgcctcgctgggcgagcgcggccacggtggccttggccaaggtgttcagaccggcacgtccgttggtatggtttgcgtcggaatcgcctgcagacagcagcatgtcgccattgcctttgagggtcaacgtattggtgccgtcatcggattgggtcaggaacacttgggtatccaaggtggatgccatgttcagggtggatgaggcggcgagcgcggtcagcgttttcagtgtggatgcaggctcgcgtggagtgttcgactcatgttcggcagcgacggtgccttgggcgtcttcaatgatcaccgacgtatcgtttcccacgccttgcgccgacagcaattcgttgaccagtgcagaagcggccgtggaatcaatggccttgttcgcgttcagggcaccggcgatggtgccgcctgatttggcggtggccggattggcgaaaacaggtgcggtgacaggttttaacgtcaacaatccgggggccacgtcggtgatgtcggcggcgcagtaccccgcgaacagggcgatggtggtcagtgcggaaatgatgacggtcagtgttcggcgatgcgatcgttgggtccgccgttgcgcttcacgtcgctgacggcgtgataccgctgtagataccatcgtgctccttatgccaaggcaatcatttctgcaatgaggcgaacgagtcgagtgttgccacaatcgagagcattcgcgcatccatcagcttaccgcccagccatgtcccgagtgccagaatgccgatgccattggccagcgcgaccggaataaccgccagccacatgccgccttcggctcctgtcagcagcatgaccagcgccacgatgccagtgggcagcatgagcagcaggctgccaagcatgtagacgaacgggaagaagccttgggccatggcgcggccttgaggcgcggagaacggcttgtccattgaggcgaccgggtacatcagtacacaggaggtgacttcggccacgcccagtccgctcaaggcgatgcccatgcccgtggcgaggaagatcaggccggtagcgaggtcatcgggctgcgcccagcgtccggtcagtgcgccgaccagcacgatgccggcgagatagagcagcaccatgtagacgaccatgatgccgacgtagacgcgtacgcggccgattctgtcggtccggccacgcacgccggcgatgacttccatggtgaagccgcggccgtcatatgcgagcccgttgctttccacgacggacatgaaccagccgcaccagatcagcgactgccagacgaccgcgctgatgccgtgtgcctggaaggcgaagatgatcaggaacaggaccggcatggcgaaggtcatggcttgacgggggtctcgtttgagataggtgatcaggcgtgcggaaaccgcgccggatgccgaatcgggcatccatgcgaatgcgccgatgcctttggcggtctcggacggactgtttgcgccgatggtgagccgttcatgtctcagacaccaggtgcagacggcgaagcagacaatccatgtgacggcaaggatggcgatgcgggcgagcagcaccgcccaggctccggtaagcgcgtcgaacggtagttggaaggccgcgccgaacggcgtccatgcgacgatggtggtcgccgcgccccaggtttcggtgttgaggctgaaggccacgccggagttgaccagaatgttcggcaactgacagatgataacgaacgtcagcacgatgaagatatagaacgcgcctttgccgcgtttgctggtcaccagcgtggtggatagggcgatgagcagtttggagatgctcatcatggtgatgacggccagcactgcggcgaggagggaactgatgattacggctggtcccatatgccgataggccagtgtccagagcatcagtgaggccacgccggtaagggcggggatgccggacaggccggaaagcagcaagccgaattgcaggttgcggtcggcgatgccgtagagcgcgaatttgcgtgggttcatggtggagccttcgccaagcatcatgagctggatgaagccgatgaagatggtcatggtcgcgccgaccagcacgacgactatgttgacgatgcctccggaaccaaggatgttcagcggaaagccatccgcgttcacggtgaagggcggcagtatgccgatgaaccatgcgagcacgccggtgccgatgatggtgccggccgcgagtacggcggaaaagacataggcgacggtctgccacgccgattttcgcagggtggcgagcgtgagcgtccagcgcaggcggaccagggtgatggcgctgctgatcatcggcgggcctcatcggtgggtatggcgggcgtggcggttgtaagcggaatgggctggaccggctggaccgaagttggtgcttgggcttgggcttgcccgccgtcgagccatgcgagatgggcggcttcgtggcggccgccgaccagttgcaggaagcggtcttcgagttcttcgccggcggcgacctcgtccaccgtgccggccgcgcacaccagaccgttgttgattacggccacatgcgtgcacatcttttcgaccaatgccatcacgtgcgaagagataatcaccgtgccgccggtcttcgcgtattcgatgaggatgtctttgaggttggcgctggacaccgggtccacggattcaaacggctcgtccaggaccagaatgcgcgggctatgaatcatcgcggaggccaggcagatcttcttggtcatgccggccgaataatcggtgaccatcgtgttggcggccccggccaagtcgaaagcattgagcaggtcctgggcgcgacgcgtggtctcatcgcggctcatgccgcgcagcatgccggagtagacgagcaattgcaaaccggtcagtcggtcgaggatctggtcgggctggggcatgacgccgatcatgcgcttggccgtgttcacgtcgctccacacgtcatggcccaaaatcatggcggtgccggcgtccggtaccaatagaccggtcaccatattgagcgtggtggttttgccggcgccgttggggcctacaagtccatagaacgagccgaccggaatatcgagcgcgagtccgttgacggcgatcttccggtcgaagtgcttgaacaggccacgaatggacaccgccgcattcggattcggcggccatgcttgtggctgcggttgcgacggctgtgcaggcgcgggggcggcagctggcatcatcggcggctgaaatccgacattcctttgagtattgtctatgctcatacatccactctaccccaccagccaaccctcagcgaagcaaacccccgggttgctgttggattgccccgctgagcagctccaactagcggactcggtcaacccttatgcgcgatgggcttccactgggctttggagaagagggcctggaaggagatcggcacgtagctgagaatgtaaattgggaagctgagcacataggcgagcagctccttgttcgtggcaccgatctggtcgcgctcgacaatgatggtcaatgcagccaatgccatcaggcccaacaccgatatgatgatgccactggaccaactggccagcgattgcagctggctcggccaactcacgaagccacacgcggcgaacagcaagcccatcaccgcgcgaatcacgcccaacacggtaaacggacacagcatcaaggtgaagtcgatgcaggagaaatcacgttcgcgaaccgcgcgtttcagcaatgccgagccataataacggaatacctgcaggaatcccttgctccaacgcaaacgctgacgccaactttgcgagaaggtaaccggctgctcgtcgtagagaatcgcagtaccgcaatagccgatgcggtcgccatgcagaatcgaatccatagtgaattcaagatcttcagtgagcagatggaacttccatcccttgttccgcttcatcacctcgcgggagaacatgaatcccgtaccgcccacatggcaagaggaaccgagaatcatacgcgagttagacaggaatcgcgattcacggatgaaccacagcgcagaaccagaagacacccagttatccgccagattcaccgaattacggtagctggtcagaatcttgaatccggagcagaacgccttgttcatttcctcgaagtagtgcttgtccagcttgttatcggcatcgaacacgaagtaggcctcataatcatcggccacaccgatgtcgagcatatgccccaacagatacgtcagcgcatatcccttgccaaccagctcaagattgtggcgttccaccacatggcagcccaaagaccgcaccacgtcggcggtgttgtcggtgcagttgtcggccaccagccagatgtcgatgaggttggacgggtaggtctgatcgcgaatcgacccaataaggttgccgatcactttttcttcgttgcgcgcggagatcagcacggcataccggttggtcatcggggcgtcggggaagcgcacgggcttggcgaacagggacatcacgatgcacagtccctgatatatcatgccggcaccgccgacgatcatcagaagaatatcgagtacggaaagcagagtcatcagcgccaccctgccctaggattgctggaggcagattgatcagactgcttggtttgcttgcgttgctcgggctgctcaggctgttcggcggaccgctcaggctgctcgggctgctcagactgctgcgtatccgcggcaccacgctgcggaatcgccgccgtatccggctcatcaaagcttgcatccgcaccgactgtattatcggcgttatcggtatcatcggcatccgactccggctcagtgccgcgtaatcccttgcgagcgctggaggatagcacgttcttcggaatcgccacggtggcggaatcgtccaaatcggattctttcgtctcgtgcgacggaatcgcataaatctgttcctgcagcaaacgcagttcctcattcatcggcacgcggttggtggatcccctggccgcacgcggcatgtgctcgccgattggctgcaatacgtgctcgccgaacgcctcggacgcctcgacgatcttggacttcttctccggagtcggatcgttcatcagcggtgagtcaatcagctcatagcgcttggtgtacgcacggaagatggcctgcagcgatgcggtgaccggcagcgccaggaacgcgccgaatgcgccgaacagcgagccgaacgccagcaccgagaggaaggcgacggccgcgttgatatccatcgtgcgctgcgaaatcctcggcgagagaatcaggttctcgatctgctggtagacgatgatgaacaccagcaccgccacggcgtacgtccacccgcggttgccccaagcgaacagcaccggcagcgcaccgccgatataggtgccgaccgtggggatgaactgggataccacgccgcagaacagggccaacggcagccagtagggcacatgcaggatctccaagaagatggcggtgcaggtggcgttgatcagcgccagaatcgaacgggagaacaggaaggacgaaatctggccttgggccacggtccacaccagcaggaatcgacgctgcgtgttgggggccagccactggcagaaggagcggcgcagctttgggccggcggcggagatgtaatacgtggtcattaccacggtcatgaggttcagcaggaaggagaacaggccacccaccgtactcatggcggtgccggcgaaatcggtgacccacgaggtctggatattgttgaagatttccatgccaagattgctgatttccggcatcttgaacgtggcgtgctggtccacgaactcacgaatctgcccatacattgccggcaaaccgcggaccatggcaatcatctgctgtacgaacatattgccgaacagcgtgagcagcacacccacgaccacggccacgcccaccagactgacggcggaagccacgccacgcttccagccatgagccaccagcgccaccaccagcggttcgacggccagcgccaggaacagcgagatgatgatgtcgaacaccagataggagatgtcgccccacgagcgccagcagaacatgaatacgatgacggcgagggccacatacagcagcgcgcggccgaaccattccggtggcctgcgggaatctcccttggcggggaacaaagtaccaaagtcgatacgattctcgtcgtccgggtctgccccggcttctgcggcaccgcttctcgacgtgtcggtgctgtttatgtttcgcgcgcgttcgctcatggctccccattgtagcgaggggtttgaagctcggatacgccggcggcgtacacccgcttttctattgttgatgtcatgctcaacgtttcgatcatcatcccagcgtggaacgaagccgaacgcatccgcgactgtctgctgaacgccactcgccagaccatcatgccgcatgaggtgctggtggtggacaatcgttctacggacaacacctgcgcgattgtcgaacagttcatcgccgaacatcccgagaccccggtcaaactgttgcaccagaacgatgaacaggggctgattcccacccgcaactttggcctgaacgccgcgaccggcgatgtgctgggccgttttgacgccgactgtatgatccggcctgactgggtggaggtggtctccggcatcttcaccgaagacccggccgcgatgggtgccactggtccggtgatgtattacgacatgccctcacgtcatttcgggttgaaaggcgacaattccttacgcaagcgaatctaccgtgccgatggcggccagccgctgctgttcggctcgaatatggccttgcgcgcttcggcctggcatcagatcgcgaatgaggtctgccgagataaggccgatgtgatgcacgaggatatcgatatttccctgcatctgatgggcaagaatctgaaaaccgtgtactcgccgcgcatgatcgccgcgatgagcgcgcgacggatggacacgtcgctgagttcattcctgaactacatgcgacgttttaagaatacgtttgatgcgcatccgcaacatacgcgcacgcataagccggaggtgttgttcaccgccatgtatccggcgatgcatatgttctacccggtgtggcagaaagtgctgaattccgcggatatcaatcctgctgaagccgcgtggatcaacgagcagatgaaactggcggaggcgcaaggcaagcagctgtacgacgagacccccaccgacgaagtctacgacgaaaagcacgaaaagtagctggatatacgagccccctctgcttatgcaagctccctctgatgagggagctgtcgaacgaagtgagactgagggagagactgcgacgcagccgctaaaacattgaatcggccgcaggccgatacctattattcagcggctacgccgcaacttctctcccagtcagctacgctgacagctccctcatcagagggagctaatgtttaccgtcatcgactgatcacatcagcgacttgtaaatcgcgagaatgtcctcttcggtggcctgacgcgggttgccgggggtgcacacgtcgttgaaggcgtcgtgggccagcggttccagatcagcctcggtggcgccgacctcgctgatcgtggtcgggttcttcagatccacggtcagcttgtggacggcctgcacagcctcttcgcgcaccttctccaggtcgccggtgtaggcgtcctcgacgccgaacgcgtcggcgatgtcgcggtacttctcgcccgtgtagtccttgttgtattccatgaccggggccagcagaataccgttggccacaccgtgggccacgcccagacggccgcccagcgggtgagccatgccgtgcaccaggccgaggcccacgttggagtaggccataccggtgatgtaggaggcgtacgccatctgctcgccagccggaatgtcgccgtcggcggacttggctaggttcttggcaatcatgcgaatagtctgcatggacaggcagtcggacaggctccaggcacccggggtaatgtaaccctcgatggcgtgggtcagggcgtcaagtccggtggcaaccttcaggccgcgcggcatggagtcggtcagatccgggtccacgaaggcgacgatcgggatatcgtgcgggtcgacagccacgaacttacgcttgttggcggtatcggtgaccacgtagttgatggtcgtctcggaagcggtaccggcggtggtcggcacgccgaagatcgggacggacgggttcttggtatccgcgacgccttccagggacagcacgtcggcgaactccgggttggcggtgatgatgccgatgcccttgcaggtgtcttgcggggagccgccgcccaggccgatcaggaagtccgcaccggactcggcgaacttggcgacgccgtccttgatgcactcgaccggcgggttcggcttgacgttggagaacacctcgtacggcaggccagcctcatccagaaccttggtgaccttctcggcggtgccggtctccagcagtaccggatcagtgacgataaatgccttggtgaagccgtgctgcttggcgacggccggaatttccttgatcgcgccacgtccgaagtatgcagtctggttgaaaatcatgcggtataccatagggactctccttttgagctagtgtcttaactggtggtccactcactctttgagtggtccaacggttccccagtctactccgcgcatgagcattcacctgaaaacacgctgaaagaacaacactgaaaataatggcaagaaatggcggaattccgcacttgtcgaattattgtccattgaccaaaccagttcaatcgcccgagatctcaacgataagaccattttccggagtcgcttggtgctctccgagaaactcgtctctcatccgcttacttcgcgcgtacacaatcaatatgcgagatgcctaattccattcgtgtttcatcagccgaacgcgaactggttcaccagatggtgtattcaacggtttcagtctcttgaagaggactaagatacctcgacaattggggtgatcatcataagagaatgaggcagataatggcaaatggcaaggctatgacggtcggcgagatggcgtccctgtttctcgaccccgacactcccgttcgtatcgacgcttttgacggctcgcatttcggcccggcagacgcggatttgaaggtcaaaatcgccacgccgaactgcatgtaccagctgctcgcgcacccgaatgaaatcggcatcgtgcgcgcatacattctgggcgatttcgacgtggacgacattgactacgccgacccgtatccggcgatgcgcaagctggtgtcgctggccaaatacgttcgcccgctcgctcccgcatccattgcccgcgtatccgccggcattctgagtcacggcttcaagaagccgccggtgcccgccaccgagggcccaagcaagttcgcccgcatcaagcgtggcctgatgccgcacaccgaaaaggccgattcggaaaccgtcagcttccactacgacatgtccaacgagttctacgccgacttcctcggcccctccatgacgtacacctgcgcggtattcgacaacgagcacatgagtcttgaagacgcacaggccaacaaactgcgcctgattctcgacaaactggacttgcagcccggccagcgcttactggacatcggctgtggctggggttcgatggtcatcaccgccgcccgtcgcggcatcaaggcgctcggcgtcaccctctccaaggaacaggccgcgtacgccaacgaatggatcgcccgtgaggggctgcaggatctggccgaagtgcgcgtacaggactaccgcgaggtgcccgagcatgacttcgacggtatctgctcgatcggcatgatggagcacgtaggcgtcaagaactaccagagctacttcgaagagatgttccgtctcctgaagccgatgggccgactgctgaaccaccagatcaccatcagccatgacaagcctcacggcaagcccggcaccgacgaattcctcgaccgttacatcttcccggacggcgacctcggcgcgcccggcttcatcgaatcgtgcatccatgacgccggcttcaacgtggtgcatcaggagaacctgcgccagcactatgcgctcaccctgcatcactggaaccagaacctctccgagcattgggacgacgcggtcaagcaggtcggctttgaacgcgccaaggtatggggtatgtacatggccgcctgcgctctgaacttcgagctcgacggcatccagattcaccagttcctggctgtcaagccggatcgcgtgggccacccggacggcaagtggtaccctctgcgccaatggtggcaggcctgactccgtttctgtgggacggcacgcggtttttaccattgttcatctgccgtcccacagaagtgtgggatagcagatacatcaatcgtttgacgtatctgctatcccgcatgacataagccgagaaccgcagaatagagccgttctttgccctcagctctgagggcgttcttcgaacgctgtgggacggcacgtcgaaaatcggcaaaatcacgtgccgtcccacacgattcccttcgcacgcgcatttcgcaggtgctttttctgcaatactgactctatgagcgccacagccccagaaacggctggggcggacgatcgcaccgaccatgacacgcgcggataagacccacgtttctttatttaaccctaacccgatgttcgcattggtgctgttggcgtgcgtagttgcggcgaggaagacagttgttggcgaacgcgagcctttgcattgaccggccagcccgccggagtaggtacgtgacggatatgcaaaagccccacacaaggcggggcttcattgtggtggctccgaacggcgtcgatccgttgacctagcgattttcagtcgctcgctctaccaactgagctacagagccatgaacagtcaaaaacccggataatccgggtttcataaccattccagcgaccccggccggacttgaaccggtgacctccgccgtgacagggcggcgctctaaccaactgagctacggggccattgttctcacttgcgtgaggcaacagatgtatatattactgaaattcgccggtcgtgcaaatttcggcgtgttccgcgtaatttcaaggtttttgctatcaccagcacacggacacgtctgccataaacatccacaaacgacgaagggcgcgaccggaactccggtcacgcccttatgaacagaagcacttcacggcatccaccgcaaagcaatcgtcaatctcagtcagcctgcttccaggtgtcgatgtcgatgtggtgttcggggttggcctgccaggcatcccacgcggacttgacgatgtcttccacgtcgtacttggcgtgccagcccatctcctcgttgatgcgcttcggggagccgatcaggtgcggcgggtcgccggcgcggcgggccatgacagcctcggtgaacggcagaccggtgaccttcttgacttcgtcgacgatctggcgcacggaggtgccttcaccggtgccgacgttgaaggcgtcgtacttgcgctcgtcacggtcgaggtacttgagggcggcgatgtgggcgtcggccaagtcggagacgtggatgtagtcgcgcacgcaggtgccgtccggggtcgggtagtcgtcgccgaagatggcgggggccttgccctgcttgaggcggttgaacagcatcgggatgaggttcagaatagccgggtcttcgagttcgaccgggccgcagccggccacgttgaagtagcgcagcgcgcagaagcggatgccgaacggctgctcgcaggcgcgagccatccactcgccgaacagcttggtctggccgtaggggttgatcggcagcatcgggacgacgtcctcaggcaccacatcgaccggcggcacaccataggtggcggcggaagaggagaagacgagcttcttggcgttcttggactgggtcatgccggtgagcacgttgagcatgccgttgatgttctgctggtagtaccacagcggcttctccacggattcgccgacctgcttgcgcgcggcgaagtggatcacggagtcgacgccttcggcgtcgaggatttcggccagacgctcgccggcacccggagcggcgatatccatgccgtacagacgggagccttcgatgcgggtgggcttgccgtagctcagatcgtcgacgacgacgaccttttcgccggcctgatgaagtgcgtgaacgacatgcgcgccgatgtagccgcagcctccggtgacgagaactgtcatagttgacctttccttgtgcgggttgcaagtgtcggccgtgtggagttcagcggctgttcacttttggtccgctttgttaccttttgaaacaatttgagtatatcacacgaacataatcgcacaaaacggtggtgtcgtccggcaatatctgcattcattaggtcgatctggcgttcattaggtaggtcggcccggagccggcccgcacggacaccgggtaaacggcttgatatggtggttggtatcgcacaccacctacctaatgaacgccaaatcgacctaatgaatgaacagcggtgcggcgcacaaggaaaatccgaggaatatatgaccaatcccgaatccacagcaatcgatcccgtcgccgcgatgggcacagaccacaccgaggcaccggcgcaccccctgcacaaggtgctttccttcgtgcgccgctccggacgtttggacgatcgcctgcagcgcgcctgggacaactatgccgacacatatctgttggatattgcggccggcaacctgctggacgtgcgcgaaggcgtcacgctcgaccgcgcgttcgtggagtcctcatggggcaacgacaatccgctcattgtggaaatcggcaccgggcagggagaaaacgtggcggccgcagccgcggcccatccggagacgaacttcctagccttggaggtctatgaccccggtgtggcccacacgctgctgctcgccggcaagcaggggctgaccaacattcgtgtggcccaggtcaatgcgcccgagctgttcaaggtgaccgcgcccggcaccgtggccgaggtatggaccttcttccccgatccatggcccaagaagaagcaccacaagcgccgcatcgtgcaggaggccatggccggcgacattcatcgcgcgctggtcacagacggcgtctggcgcatcgccaccgacatcgaggactacgccctgcacgtgcacgaggtgatggacggcctcgatggctggaagaacctgggcagcataaccgtcagcctcccgctggagcacgtgggcaagggcaatgccgacatggccgccgacatgccgcacgccgacttcaccgaatccgagcggttcgagggccgcgtgctcaccaacttcgagaagaagggcctggccgccggccgcgcgatccacgacttcacctatcaggccgtcgccctgaactgattgcgacacgccgaaatgccgtcgatttgcataaccgaacaacctcccgtagagtaactcgagttgttcgcccccatcgtctaacggttaggacaccagactttcaatctgacaacgagagttcgactctctctgggggtacttctttgaagacctcggtcatagcgaccgaggtcttttcgtattcgcgggaccaggcctgaaagcattcggcgggttataggccaaaatgtgtgtccgttttggcttgtgttcctttgtggcggtgggcgttcctcctgttcgagttgtatgggcggggaactcgaggtcggccagaatgtgtgtccggaatggccggtcaggccttgcggca

SEQ ID NO: 3885 - DNA, 28016 bp, Unknown
  R22_24m  MAG No. k141_5361
taccgcaccggccgcaacgccggtcaccatgccggtctcagcgccgtctgcagcaccagtgaggcccgcaacgtcagcgcatcccacgccggccacggtcttcggccggcatccgtccgcggatgttgcctcgccggaaccggcagtgccagtagaaccggtgacgccatccagcccgactccggccatgatgccgcaacgccgtacgtcggacggtccgaccacattcgcttcactggatgcccaggaactgccggtcgtacgcgaatattcggcaggcggtctgattttcgatgaccagaaccgcgtggccattatcgcccgtcattcccgctccggtcatctcgaatggtgcttgccgaaggggcatatcgaaaaaggtgagaccccgcagcagaccgctgtgcgcgaagtgcatgaagagaccggcatcctgggcgaggtgatcgattccatcgccaccatcgactactggttcaccggcaccacgcagcgcgtgcataagctggtccatcacttcgcgctcaaacagaccggcggcgaactgacggtggaaggagacccggatcatgaggcggaagacgccatctgggtacgttttgaagatttggatgacgtgttgagctatcccaacgaacgcaaaatcgcgtggctctacgccaggaagaagaacaggcaggcaaacgagtgaacctacccggagtcttacgacattgcacacgtctggcacacgcactggcggctggcgtcgccgttgtggcgatgctggccgctccattgaccgtttacgcgaacgatacgacggacacgactgattcatccgatacgacggacgcaacgggcaatcagaccgagaatcagcccaagcagagcattgccatcacgcaaagcacccccatcgtcacctccaaatcgggctatcatgtcaccgcggtcatcagcaatacggacagcacggccacgtcaagcggcacactgcacctgaccaccaatacgctgttcacctttgtctcgcgcaccgatattcagaattgggccgagaacaacgcccccatccccacccccaacgagttgggttccgttgacgtgccatcgattcccgccggcggcactgccaccgtcaccatcgaggtgaacgccaatcagcagacccttgcctccatagggagctgggggccgaagccgctgatgctgtcgtatatcgtcggcaatcggatactcgccgatttgccgagttttctgacccgatcttcggatgggctcaacaccgcgacgacaccggccatgaacctgaccgtggccatgccctacaccgccagcggctggcaggtcgataacaaggccatcagcaatcgcattgccgaaaccaccacttcctcgacatcaacatcgtccaagtccaacagcacggacaaggccgacaagtccgataacgccgacgccggcaacgcggccaaagccactgatacgcaagccatatccttatccgagcaggatgccgataccgcgcgatcccttgggcagacattcgccaagcaccgctcgctgcaagtgatcgcggatcctctgtattggcgtcagtccgcagtgcaaccgtccattgccggcatcatgcagcccgccgactttgacatcaccgcctataccgcgctgggtgataccgcggcctacgaaaaggcaggcatcaccactgaacagtggaacgccaagcaggcggccgcatggtatgccgccggaaacgactccgaaacaccctccgcgtacgcatggcagggcaacaactgttggacgttggatgcgctgaccgcagcacgcgagcagggctatgacacggtgattgccgatgcctctttcgatgccgaccagactgaagccgtacacacaggcacctacgtggtggatacgcctgccggcgatgtcaccgtgctgaaggagcaatcgaccttgggcacgctggccaagggccaagccaccagcacggacgcgcaggccgagtccagcgatgccggtcggttggcccgactggtcgctcagagcgcgttctaccagatggaacagccctatacatcccgatacctgcttatgacgttctcccgcaccacggaggccggctggatcgatcaggtgatgagcgccttcgagcaggcgtcctggttgaatctgacggatctgaagaccatggccaaggccgatccgtacaatgtcagcgattcggtcaatcccgacaaggccgatgatgccaacaccgccaatacccggtcggcgttgagacagttggctgacagccggcatgacatcatgcgcatggccacctccatattgaagaacgagattgattccgacgaggtctcgtcgttggccccgcaggccctggcccggcaggatgccaatgacaccgtctcgcacagcaacgatccgacgcaatggattggctctttgctggtgctgcatgacgatatggcgctgcgatccatgtctggctccccccagccgacagccacgcgaaaagccatggtcagagccgcgaaaacactggccagcgatcttctgaacggcgtacgcatcaacccatcggaatcaatatccgtgttcagcgaatccgcgaaaatgccaatcaccgtcagcaatgaccttccttatgccgtcagcgtgcaggtcaactcgctgactgactccatgcagatcgtcacctcgcgaaccactgacatcgatattcccgcgcatagcgacgctcaggtgaccttcaccatccgcgtttccacttccggctcatcgacggcccatgtgtcgctgagcgaccgggaaggcaacagcttcggcaacacgcaggataccgcgatcaccagtgtgatgcgcgtcagtgatgccagcggtttcattatcatcggcttcgccgtgctactgtgcattatcggcctgtggcggcagttccatcggaagaaggaccccgacgaatgagttcaaccgtaggtcgtaattccctgatcatggccacgggaaccgctgcttcccgtgtgaccggtcagctccgcacgattcttctcgctgcggccatcggcaccactggattggcggccaacgcctatcaggccggttccatgattccccaatccgtgttcacgctggtgtccggcggcatcttcaacgccgtgctggtgccccagatcgtgcgcacgttgaaagaaaaagacgcccaagaacgactgaatcgtctggttacgttggccatcggcatcctgttggccatgaccgtggtgatggcggcggccagccctctgcttgcccgcctgtacgtgggtagcgacgatcaccagatgatagccctgaccacctcgttcaccctgtggtgtatgcctcaggtgttcttctacggcctgtatacggtattgggtcagatcctggccgccaaagaccatttcctcacgtatgcgtggagctcaaccggtgccaacattattagttgcgccggttttactggttttattctgctgttcagcaaggccaatgaacagcccctcgaattctggaccgccgacaaaatcgcgcttaccgcaggcacctggactttgggcgtggccttccaagcgctgatactgttcctgccactggcccgtatcgggttcaagtacaaacccagcttcgggcttggcggctttggactcaggtctatgggtcccgtggcgttaggctctttgggcgtggtggtcaccagcgagatctgcggcattatccttacccgtatcgccacatccgcaccgcagcgcgcccacgaactgacgggtgccagcctgttcagcgtggcaggcaacgcgacctatcagaatgcgtacaccctgttcatcctgccctattcgctcatcgccgtatcggtatccacggctatgttccccaaaatctcccgttctgtcgcagctgcgaatctggatgaggcacggcacgatctggtgagcgcgctgaacaacgtagggctgctcatcatattcttcgccgccgccatggtcgtgttccccgaaccgatcatccgcgcattgcttccgtccgtctcgatggacgagaccatgctgatttcctacgcgcttatcgccctatctgtgggcactcctttgggatcggcgttcctgttgatccagcgcacgttctacgcctttgaggacggccttcaccccttcttgtccgcggtgatgcagtatggattcacctcggtattcatgatgattggcatgatggtacttcctcctgagcattgggtactcggcatcgcctgctcggtgacactcggtggattactggcgttgccgctgacattgatgatgttgcgccgcaagttcgaaggcaatcttggtggtcgggagatcacgaggacatatgccaaggccattgtggcggcgctggcttccggagttgtggtctggctgatcaaacgaccggtagtcgcactgttcggcgcggatattcgatcggtaggcgggcacatgagctggtggtctgcactggccatctgcgtggtgctcaccatcgtgctggccgtagtatatgtggctgtgttgtgggtgatacgcaccccggaactcatcagcgcctatcactcgatactggcccgtctacacaagactccggccagtgaggacgttgctgtgacagcccagccggaaaaagtcgacgatacgcaaatcaatcctgagacggagcccgtcaaggatagccccacacgtagaatatctaagaccagtctcgaacaccaatcacacggagccgaacgcactatgaaaccgcaactcggagacacgattctcaaccgatacaccttggtatcatcgttgcgtgaggagcctggcattcaggcatggaaagccaacgaccgtgtgttggcaaaggattgccagctgttcatcattaccaatcgcagcgctttcgccgcaatcgatgagctcgctggtcgcatcgccgccactcgccctgatcgtgtgattcccgtactgaaataccgtatggaatccgacgtacttctcattgtcatgccggtggacagcggccaatgcctgactgactacatggtggataccgacaagccgctcagctacagcgccatccggtcgattatcggagaatgcgccaacgtgctgcgcgaggtcattgcggatactcccagcagcatcgtcatcacaaccgacaccgttcgagtgactacctccggtgtgcagattgccgatgcaccatgtgccacgatgctggccgacacgtccgctactgatctgcgtacggacggtcctgaacggtatgcgattcgccagcttgcggcattgctctatgccctgctgacacgcacgccaagccaagcgacacccacattcaatctgcgcgccttgccgcaagacacccctggcgaattccgcgtgatttgcaagcgtggattggccttaagcaagcccgacgagcacacgttgccgatggctgcccttgtagaactcgacgccttgttgggtaattggaagccgctctctgaactgagcgatgctgatatcgctttgccgagcgtggaaagcgattgctcgattaccaaggcgatactgaagcccgccaacgagaccgatatcgtgcctattcccagcacgttgattaacagcagcagtcttccggaattgtctattgccccttccctgccggttcagccggccgccgtccccgctccgcacgcgatgtcaccggctcctctgcctgatgggtccagtactgctgacggcaaccagtctcaatctgacgcccgccgtctgtttgacttcaacctttctgacgcctgggagcacgagaatctttccggtgaagacaccggtgactggtacagcgaaatgaatccggcccccatcggcggtccgggtgataatactcggttgacggtgcctattgttaccggcggtatttccgatgccaccgtgggagagacgaccagtcgtattcccgtgttcgatgtcagcggccgtgctgtggcccccggtgaggaatcgctgcgtgccttggaagaggagcaggcccgcattgccgaagtaagcgccattcctccgagcttcacaccgaaggatgtgccggatgacgaggatgacagcaagctgcccgatgaacatctgttcggcaaactgtcgaccaaggtcgttgccatcattgtggctctgatattggtagtggcagcggctgtttgggcagtgcatgcgttccgatcctccggagacaatcctgccgatgcttccagcaactccagtgaaggtgactggcccgatatcaatgctgacgctgtgccattcggtggcagcaagaacgcgacgaacggtggcgccactgacgattcctcaaagtcgagtgatgccactcagagcgaatccagggactcggcatcagacaagtccaagaagtccgagactgctgattcgtcgtccaagaagaccaaggccaagaagtccggcgataaggattccagcgctgctccgcaaccgcgccatgagaacaacacggcgtttacgatttccagcgccaacttcctgtcgaatcctggcggccaatccgggtacgcatactacatgcaccttgaccagccgcaggatgcgtaccgcatggttatcaccatccgcacatccggtggtaagggctatattcgcgcaaataccactggagaccccactcagggcgagcaggtggccgaattcacctttgctgaaggtggcactactgaggtgaagttcaccaaagccgtcaatacgcaggatctgctgctgtgggtgccatcgggtagcctgccgcagaaccagctgtacatcgagaaggtggaggtcttctaatcggcatctataccgataactgacccaagaagggcggtaccgttcgcatacattcgacggtgccgccctttcttcgcgtctggctgaatgacatggaatatcgtatgggggtgtgacaatgtttcacgtgaaacataacgtcatcattatcggttctggtcccgctggctacacggccgccatctatcttggccgtgcaggtcttaatcctgttatggtcactggtgcgttgtcgccaggtggacagttggtcaacaccactgaggtggagaatttccccggattcccggaaggtattcttggcccggatcttatggatcgcatgaaggaacaggccaagcgcttcggtacaacctatatcacagacgatgtctcttccattgaggcgtgtgagagtgattcggtcaagccgacctatcgtgtaacgctctccgatgactcccagttggaggcatcagcactcatcatcgccacagggtcgtcattccgtaagcttggggtgcccggcgaacaggagctgtccggacatggcgtctcgtactgcgccacctgcgatggcttcttcttcaggaacaagcctatcgtggtcgtaggcggtggcgattcggcttttgaagaggcattattcctgacccggttcggttcttcggtcaccttgattcaccgacgcgatagcttccgtgcctcgcagatcatggtggaccgagccaaagccaatccgaccatcaccctactgaccaacacagtggtgacctccattaccggcacctcctcccccacacagaacaccggtgcacctattgccattcctggcttgacaatcaaacgaccggctgtggcaccggccagtgtcagcagcattgccgtacgtaacgtggtgaccggagaagaaagcacgctggacaccaacgccgtattcgtggctatcggccatacgccagccactgattttgcagctggtgttgtggaccgtgacaatgatgggtatgtcgtggtgcagggtgccagcacggtgaccagtgcgccaggcatctttgctgcaggcgattgcgtggatcgtacttatcgtcaggcaatcagcgcagcgggcatgggctgccgtgcagcgctggatgcgcaggcctatcttacggactgattgcggcgacctgatgatggcttgctgttctgactgctgcctgtgacataggagcagcgctaggtcagtgttacagcatgccgcccttggatagtacgcaccggtcaaaggcatagaaaggcccctcaggcgacggagaatcacgatgtgtgatttgtcatcctccagcctgaggggttttctattgcgacaggggctacaacgcaggcatacgcccctgccaggaatcacgcagaggctataacgtcttgcgcgtacaacgcactgcacagcaataatgccggcgacagtgacaagccgatacaatgccaagtgacaacgctaagcatcggtgttgtcactgacgatgccggcgacaacacgaatgttcttatcgtgttacacccatttggaatcggcatcgccttggctcggcaccagcagctgcaggatgcgatccatatcctctggtgacgagaagacgatttcgatgcgaccatgcttggtgctgcccttaatcgacaccttggtgtcgaaatgattttccaaactctgctggatggcggaaccaacccaaggattggtcttggacgtcttgggcttcttcggctgctcccccgacgcaatcttcatggcgacgatttcttcggtgctgcgtacagaaagaccttccgcaataatacgagaagccagcttgtccatttcctccggatcgctcaggcccaatagcgcacgcgcatgaccggacgatagcacaccggcagccactctcttttgcacagaggccggcaggttcagcagtcgcaaggtattggcgatttgcgggcgagacttggacaccgacttggacagttgtacttgtgtcaacccgaactcttcaatcatctgctggtaggcagccgcctcttccagcggattcaaggccacacggtgcaggttttccagcaatgcatcgcggagcatatcatcatccgcagtggttttgacgatggcgggaatcgtctccaacccagccaactgggatgcacgccaacgacgttcacccataatgagctcatacgggctgtccaaatgaccggcaaacggatttgtgctggattccgtctcgtcgtgcttggcggctttggccgcagcaatctggcttgccggacgcttgcgcacgactatcggttgcagcacaccaacttccttaatggaagcagacagctcattcaactcatcctcgtcgaagatggtacgaggctgatgtgcattgggcccgatatcagacagtttgagttcagccagataaccaccggctaccggcttgagctcgtccttcttatctgtgtcagcggtctttgccgccgatgcagtctgagatgtttcacgtgaaacatctttgacggtgacggatgtacgatgtgccgtctgagacgcagacggcttgccgccctgctgaggtgcggcgaccttaccggtttgaggtttctccgtaccgaaaaacaggtcgctaggatgagtaatggtgtccaatgcgggcatggacgcgcgtttaccggcggctttcttggctgctttgctggacgataccatctgaggcgcggcaggctttgattcctgctgggcagtagccttcttggcgggggttatgtcagcagtggccgccggagtagacgaatcctcctcaatcattgcgggctgctccgccactggctcctcccctggcaatgtggggaacaaagcgccaaggcccttaccgagtcgtgattttgatgccattacttgttcctcctcgcatcaatggtgtcaaggacttgttgcgaacgctgtgcgatttccaaagctgcttcaccatacgatatggcacctatgccacgaggatcataggcaatcaccgattgggagaaactcggcgcttcggagatcttgactgaacgcgggatggtggtattcagcacaatgctgggatagtgtcccttgacctcgttatatacttcacggctcaatagcgttcggcgatcgaacattgtgacgagcatggtggacaccagcagtactggattgaaatgctcctgcaccaaaccaatcgtgttgatcagctggccaagaccctccaatgcgtaatactcagcctggataggaatcagcatctcggtcactgcacacatggcgttgatgaccaagaggcccaagctgggcgggcaatcaatgaacacgtaatcatagtgtttatctgattgacgcaggtagaggtccaaggcctccttcaacaatgtgtttcggttgggcagatcagccacttccaactcggcaccgctgagatcgattgatgcaggcacaacatcaagtgtgggaaaatcaggacagaccgtgataacatcacccagatcggaacgcccctcgataacgtcatagaccgagggctctcccgatgcatgagatacacccaacgccgtagaggcattgccctgcgggtccatatcgatgaccaacacctgcgcgcccttgttcgccagcgccgcagcggtgtttaccgtggatgtggttttacccactccccccttctggttggccacggcaatacgacgggtacgttgaggtttggggaaatcggttttcttgagtacatcgtagcgtgagctttcatcagccatctggctgccaagcactgaaccgtgaccatcgaatattcgctgaagcgtttcggaagccgattctataggttccgactgatgatccttggtggacatcgctcctccttgcacagacgtaagttccagtgttctcattcgtatggacatgatgctcgttatccacaattgcgatatgcaatgtggataagtgtggataagtatgaatgacgttgagtgttagattatgtattcgcagacgaaaaacattgaaaaatcagtgttttcatcattctgcacatcgtcccgtaaaaatgtggataacttttacgcacataaggaaatgtggataactcaatcagtactccactcatcgcttatccacaatcaccacgtgggtaggctcaagatccggtccgacagccgcctcaacgacgcgtggacgacgaccaccgaattttgcaatctccttgccagccttgtcgatttcagcctgagcagaccgtcccttcagtgcgatcaactgtcctgacggtttcagcaacggcaacgtccagccagagagtttggtcataggagcaaccgcacgacacgtgacaacagcgaacggatgaatttcccgcttccgtacctgctggatgacggcatcggagcgtccacggataatctcaacgttctgcagttgcatcaggtcaacacattcatgcaaccattcgattcgccgctccatcggttcaatcagcgtgaagtcatgatcaggcaaacacgcggcagccaccaatccaggaaaaccaccaccactgccgacgtcggcaactgttttgaagcgaataccattcgtcacattccgaacgtacggcacaatcgcagcggaattcagaatatgccgttcccaaatgatatcgacgtcacgggggccgattaatccacgaggttcaccctcttcggcaatcttggcatggaaacgctccaacttcggcaacgcatcacccaagacctcagcaagtacaggtgacccctgcagctgatccgtcatagccatctccctcaccatgtttcacgtgaaacaatcaacatggaaaaggcgtcgctcattacgacgccattctccctacggtcactcttgtttgtttagagacgacatccgttgaacgtccttgtcatctcaaaaactcgtcgacctattactcctgatcaagctcgtcgtcttcggcaacatcctcgattttgttcttgagatacaccgtcacgtaacgatgaggctcctcaccgtgcgagcgagacttcagcccctcttcccgaaccacatcgtgaacgactttacgttcgaaggaattcatcggcttcaaatcatacggctcgccggaatccttcactgcgtcaatggcatccagggcgatatcacggaggtgctgacgcttgcgcttcaggaaaccgtcgacatccacaatcagatgagaacgctcgccggtcttctgctgtacagccagacgagtcaattgctgcagagcatcaacgacttcaccattatggccaataagatgtttgatgtcggtatcgtcatcagcaacgatttgcacggtggggcggtcattacgcacgcccatctcaatgtcgccctcatagtcggcgatatccagtaggccttcaaggtaatccgcggcgatgtcagcctcttcgttgagctgatcgatcgacttcacgtcatcctgtgccatacgctactccttcatgtcgtgtttgaattccaagtctaagccctgctcccccgaacagagaaagtaatgtcggtgcgtgttgaatgtttcacgtgaaacatcgaacgcgcaccgacatggtcgtcacttctttttgcgcttacgcacgggctgttgacgctgatagccctgagtggccttgcgctcagcctcttccttggccttggccaatgcttcttcttccagagagggcaggccggcctttgcgcggcgagcattctcattacgatgatcgcgcttctccttgtccgccgcagccggagagccaggggtcgggaatgcgtacacctgccacaatgtgcggcagaggttgcacacgttgttggtcagccagtagaccagcacggcgaacggcatggtggcaccagagaagatgtacatcaccgggaagagccacagcatagccttctgcatggtctcggcctgtttgttcatcgatgcggcgggcatgttgcgcttcatgttgaagtactgcataaaccacaggcagaagcacatcaggaacacgaaggtaccgatgaccaccttgcctgcagtagatgcgcgggtgaagttatcggtcacactgacaatgccgaacacatcggtttgggtgaattgcttggcggttgctacgtcgaacgcgcccaacgcatcgcgtttaccgttggcaatgtatggaatggccgacagcgtatagaacatggacatgaacaccgggccctgaatgagcataggcaagcaggagccagccggattagcgtcattgtcttgatacagtttcatggtttcacgactcatggcttccttggacgcctgatccgtcttacctttgtacttgttctgaatgcgctgcatcttcggtgccaatgcctgcatcttgcgcatcgacttcatctgcttgcagaacagcgggaagatacacgcctgcaccaccagcaccaggataataatggcaagcacccatgagacaccaatcgggctcatgcccagcatcgcgaagaagtcatgcacgatcttcatgatccaggtctgcaaccactcaacgggagtcaggattttatatagaaatccccaaaacccgctatcaagcagaaattcatttgagttcatcgttgggcctctctttgggttgtggccaatggtgtcagtcggggctcttcatgagccttcgaccacgaaaatctgtaaaaaatggaataccgttgtggaacatcgtcgattcccccacgactccacggccggcaacgcagtaatctcagcatggcgagcactccccctttgaacgcgccataccgttccaatgcctcaatggcataattcgagcacgttggataatacttacaacaaggcggtgtgtttgccgagatgtgctgttgataccagcgcaccccaccaatcatcaccgccttgaaagaagctgtcatgcctcagccaccttatgcgccactgtggcaaaagccttcgcgatctgctgatctagcgaagcgaacgatgcggtcgcggcactgggcttggcgcgcaaaacgatatcgcaatgcgcgggcagcagatcctcatgggctctggccaatacacgaaacctacgcttcaccgtattacgggtgaccgcatgtcctaccgatttggagacagctaatcccaaacggcgatgcaccgtccggtcgtcatcatcatgatggtcgtcgggcaccaaatagtgcacgatgatatccttgccacctgctttgcgccggcgtttcagcacggtgacgaaatcacgatggctttgaagccgctccacctcgactatgcctgtggcactgatcggaatgatcaggcggagagggacttgcggcccttggcacggcgacggttgatcaccgcacggccagaacgggtgcgcatgcgcaggcggaagccgtgcttcatgtggcgacgacggttgttcggctggaacgtcctcttcataatccattgctcctaggtctattcggcaacgcttcgcgctgccctcacgtgagtcaagctataccaaagtactctcacccctaccctcaagtcaaaacggacggagtattttcacatttcgacacgttgcgagacacgcctcaaatctcttataatcggcggaataccaaccattcacggccaaaagttatccacaaattacatgtctgttattcacaatccagttatttcaacacgcgacacggtggataacttgtctaaaccagagtaaatattatctgttgtacagatttcgccacaccgatagaaggggccaccatggttaacgcttccggcgaccccgtaatcgaggccgcccacatctggtcagacacgctgacggtgctcaaacacagcgcttcgctcagcccacgagaaaaaggctggttggaaggcgttgttcctgaaggcgtcttcggttcgaccatcgtgctgtgtgtggacaacaacgatacgcttcaagccattcagggcgatttgaacgattccctgcttcaggcattgcgtacggtaaccggcgaaaatatgtttcccgcgttcaaggtcgtgccgaaaaccgagcccgaaccgctttcggcggcaaagccggcgcagccatatccttcggaaatttctccgaccgtcgccgagttcggtaaagaatcctatggtgcaaagccggtagccgcaccgcgggaaccgatgcccgccaccgagtcgcagttcccggtcggtcagcagaagatgaatcgcgatcccgagactcatctcaataagaacttcacgtttgattccttcgtgcccggcgattccaaccgttttgcccgtacggtcgcactggccgtggccgaaggttccggtcaggatttcaacccgttgtgtatctatggcggatcgggcctgggcaaaacccacttgctgaacgccatcggcaactatgcactggtcaaggatcccgggctaaaggttcgatacgtcacgtctgaggaattcacgaacgaattcatcgacgcgctgcaaaacccgaaccaaagccagggtcagattgctgaattcaaccgtcgataccgacaggttgatgtgttgcttattgacgatatccagttcctcggcggcaaggaagccaccttggatcagttcttccatacgttcaatgcactgcatcaggcaaataagcgtattgtcattgcttccgatgtggcacccaagaatttgaagggtttcgaggctcgactcatctcgcgcttcgaatccggcctgaccgtagacgtcaagccgccggatctggagacccgaatcgcaattcttcgtatgatcgcctcgatgaacggttcgaaaatccccagcgatgtgttggacctcatcgccgaacgcttcaccgagaacattcgcgaacttgagggcgcgcttacccgtgttacggccgtggcctcgctgagtaatcagccggtgacccgcgccttggccgagcagacgttgcaggacttcttcaccaccgatgtggaaatcaagcccacggacatcatcagtcaggtggcgaagtacttccacctgacgtttgaggatcttgtcggtaaatcacgaaccaaaaacgtggctgttcctcgtcagatcgccatgtatctggctcgcgaaatgaccagtatgagcctgatggatattggccaggtctttggcgggcgcgatcacaccacagtaatgcatgcctgcactcgaatcagtgaccgaatgcagcaaaaacaggagatctataactacgttatggagctcacggttcgcctcaagcaaagcaacaccaactgacacaacgcttctgagagacgaaaaacggcacttttcggaaagtcagtccgaaaagtgccgtttttggttgctcaggcggattctggtggatacgtcgaggcaacggattcgagacatcagattcctcatggctcccctttgtgaggagagctgtcgtcgcagacgactgaggggagtttcgaaggggaacacgcaaaaaacccatgaaacgagagaatcgattctgaggaccgattttgcgggtttgggcgagcgagacgaaaaaagtgccgaaaacggtctccagaatcgattctcctcgacgaaaaacagccttcaacacgccgtgcgaaagtacgaaaaccaaaaaagttatccacacagttgtgcacagatgtgggtaaactcggcggataactcgtggattacccactgttttgttgtggaaaactcgtgcataaccgcgacctcgatgtggaaaactcaaattcgacgaactggctgtggaaaactcgcccacttatccacaagccatgcagaatttgtccacaattttcatggacttatgaaccgttgcatttgtagggctcacccctacttatccacactatccaccggccttattacgacgattacttactcagttacgtgaaaagcatcatcgccacagtaacagccagtcacccatcgtacgtaagttcgccacctaacggctagaatatttctcagccaatccgacgaagggaacaatcacacatgaaagtcgaaatcgatactgcagccctggccgacgccgtagcctggacctcccgagtcatcgacgcacgtccctccaacccgattctcgctggtgtcaagctggaagccattgacggaacgctgcaattctccgccttcaactacgagatttccgctcgccaccacatcgaagccggcgttgacgaagccggttccgtactggttcagggcaagctgctggccgatatcaccaaatcgcttcgttcggagaaaacgtacctggtcaccgacggctccacgctgaccatcacgtccggcaagtcgaagttcaccttgcagctcatgcccgacaccgagtacccggatctgcctgtggtaccggccatgctcggccaagtcgatgccccgactttcgttcaggcagtgaaccaggcatgcgttgccgtctcccgcgaagaaaaccgcccggtactgaccggcgttcgcatgcaattccaaggcgacaaggtcgtcatgacctccaccgatcgcttccgtttggcccgcgccaccttcacttggactccgcagaacccggacgtcgacaccaccacgctggttcgcggctccctgctcaaggatgtggcccgtgctcttgacgagcaccagaacatccgccttgatttcgatgccgatagcccgacgctgctcggcttcgaaaacgccggccgcgtctccacctcccagctcatcgacggtgaattcccggcggtcgaccgcctgttcgccgacgaatacccgattcaggccgtagtcaacaagcaggatctgctcgacgccatcagccgtgtggctttggtcgccgaacgcaatgctccgattcgcatgaccttcaccggtcaggaagtggcgctgtccgccggatcggtcgacgaggcccaggccaacgaaacactggacatcgacatggatggcgacgacatcaccgtggcattcaacccgtcctacctgaaggagggtctgtccgccgtgaccgaaccattcgtgcgcatcaagatgacgaccccggtcaagccggtcgagttcaacggccagcaggaagctgattccgacgagtccatggactaccgatacctgctcgtgccgatgcgcttcaacaactgagatccctgaatttccaacgattcgctaatgcacatctcccgtctcgcactcgaccactaccgctcatggagtcaagtagtggtcgatttcgtaccaggcgtgaatatcctgttcggcaagaatggcttgggcaaaactaatctggtggaagccgtcgaagtgctgtccaccggatcgagtcatcgcacgtccagcacgttgccgctgatcgaacgcgggcagaccacggccaccatccgcgcgaacgtcgctgatgatgccggtcaaaccactacgtatgaagcgtcgattcatgcgcgtggtgccaaccgagcccgcatcaactcggggtcgtcgctgtatctgcgcgatatcattggcaagattcccagcgtttccttcactcccgaagatcagcgattggtgtccggcgatccgggagcacgccgcgtcatgatgaatcaggctgcggctctgctcgagcccggatacatgcagacgttgcaacagttcacgcgcatcgccaaacagcgtgccacattgttgaagcaattgaatgccaatgccaacaatggacagccgatggatgcggttctgagcggtttggaaatctggaccggccagttcatcgaagccggtgtggcgttgacccgtatgcgcgctcatgtgatcggtctgcttgccgagccatttgccgcgatttacgccgacttggccggtgccggcgagcaggtgacgctcacatatgcgccttcattcgacgaagtgctgatgttcgacgatccacatccgcagatcagcgagcattttcaacgcatctaccccggtgaaatggctcgcggcgtgaaccttatcggtccgcagcgcgatgacatgaaccttgagttggccggtattcccgcccgcgagttcgcttcgaacggcgagatgtggacgatggcgttggccttgaaaatggcattgtttgaaatcgtgcgtgaccggttgggattgcagccgattgtgattctcgatgatgtgttcgcccagcttgacgacagccggcgcacgcagattcttgatttcgccagaaaacaggatcaggtgctgattaccgtggccgctgaaggcgatgtgcccgactatgaatcggcccatcgtatcgacgtggccacactggccgaacccgcttccgtaatactgccaactctgggcaatttgtccgattcgcgggaaaacgagagtttgggtaagtatgacggaaaacccgcggtggacagcgcgtccgtagaacggaaagtgtcatgaacccgccgatcgcccgccaactcaacctggacgagaccaaactgccggccgaaatattcgagcggctctcccgtcgcggggcgaccttgaaggactacagacgccgccgtgaagaggccatcgaaaacttcggcaaaccggggcgcgatccggctgaactgggcagcgtgatgaccaccatcgccggcaatggcgtctgggcggcgaatatgaaacttgcgcaattgcgcaaccattgggaccaagtggtggggcaggccatcgccagccattcggcagtcgccgatttcacggacggcgtactgaccatccgtgccgaatccacggtctgggccacgcagctgacctaccttatcccccaacttaccgataccatccgtcgcaatctcaaaggattgaccatcgccgagattcgcgtgaccggaccggccgccggatacacgcgcaaatgggctcggcggcggtagccaagataccaaacaaattcgcaggagcctcgctatggcgctcgtcgggttagacgagtaaaatcacatgcagtatggtcaaatggccagaagagccctttacgggcctcgtaagccatatcgcctccgtgaatgaccttcatgacggaggttgaccctgtagtcacggaaggaagcctgttggcagacgaaaccagcaaagaggagcagctgaaggcggctgcggaacgcatcaacaatgcggaattgaccgaaggcgaacttgacgaatccatggcccccgagcattatgaggcctccgatctgagggtgctcgaaggactcgaggccgtgcgtatccgccccggtatgtacatcggttccaccggcccgcgcggtttgcaccacctggtctatgagatcgtcgataactcggtcgacgaggcgctggccggatacgccagccatatcgaggtcaccattctgccggacaacggcatccgcgtggtggacgatggtcgaggcatcccggtcgatgaggtgcccggcgagggcgtctccggtgtggagaccgtgatgaccaagctgcacgccggcggcaagttcggcggcggcggttatgcagtgtccggcggtctgcacggcgtgggtatctccgtggtcaacgcactctccacccgcgtggacatcgaagtgcgccgtcagggcttccactggacccagacgtacatcgaccagcaccccaccgcgcccttgaagcagggcgagccgatgaccgaaggcgagtccaccggtacgtccgtgactttctgggccgacccgaagatcttcgagaccaccatctacgacttcgagacgctgcgttcccgtttccagcagatggccttcctgaacaagggcctcaagatcagcctgaccgacgagcgtgagaatgaccaggccggcgacgaggtggccggcgacgccgcggacgagcccggcgcaaagcaccagaccgtcacctaccagtacctcaacggcatcaaggactatgtcgactacctggtcaaggtgcgcaaggccacgccggtggaagaggacgtcatcagcttcgaggccgaagacctgaagctcggcatctccgccgaactcgccatgcagtggaccaccgcctactccgaggccgtgcacaccttcgcgaacacgatttccaccaccgagggcggcactcacgaggagggcttccgcgccgcgctgacctcgctggtcaaccgttacgcgcgtgacaagggcatcctcaaggacaaggacgagaacctctccggcgacgacgtgcgtgaaggcctgaccgccgtgatctccgtcaagctcaccaacccgcagttcgaaggccagaccaagaccaagctcggcaactccgaggccaagaccttcgtgcagcgcgtgatgaccgacaagctcggcgactggttcgacgcccacccgaacgaggccaagaacatcatccagaaggccatcgaggcctcccgcgcccgtctggccgccaagaaagcccgcgagaacacccgccgcaagtccatcttcgagtccgccggcatgcccgacaagctcaaggactgccagtcctccaacccggaagagtgcgagctgttcatcgtggagggcgattccgcaggcggttccgccatccagggccgcaacccgatcacgcaggccatcctgccgctgcgaggcaagatcctcaacaccgaacgtgccagcttggaccgcatgatgaagtccgacaccatcgaatcgctgatcaccgcggtcggcggcggctatggcgaggacttcgacatctccaaggtccgctaccacaaggtcatcatcatggccgatgccgatgtggacggtgcgcatatcgccaccctgaacctgacgctgttcttccgctacatgcgcccgatgatcaccgccggctacgtgtacgtggccatgccgccgctgtaccgcctgaagtggaccaagggcccgcacgacttcgtgtacaccgacgccgagcgcgaccgcgtgctcgccgaaggcaaggccaacggacgccagctgcccaagggcgaaggcatccagcgctacaagggtttgggcgagatgagctaccaggagctgtgggagaccaccatggaccccgagcaccgcattctgaagcaggtgcacatcgaggacgccgccgcggctgacgagaccttctcgatgctgatgggcgatgaggtcgaaccccgccgcctcttcatccagcgcaacgccaagaacgtgcgttggatcgatgcgtaacggaatcctccaacctccctcgtcagagggaggtacacaacggacttagacaactaaaggaacaacagtggcagatgaaaacaacaccggcgacgagcagttcacgccggacggctcgatggagccgttgagcccgcaggaggcggacaccaccgactacggcctgatggacaccggcgaacgcatccagcgcaaggacctgcagcaggagatgcgcgagtcctatctggcgtatgccctctccgtgattgtcgagcgtgccctgccggacgtgcgcgacggcatgaagcccgtgcatcgccgtgtgatctacgcgatgtacgacggcggctaccgccccgatcgtggctacaacaagtgctcccgcgtggtcggcgacgtgatgggtaagtaccacccgcacggcgatttcgccatctacgacaccttggtgcgtatggcccagtcctggtcgatgcgcaacatgctcgtcgacggccagggcaacttcggctcccccggcgatgacccggccgccgccatgcgttacaccgaatgccgcatggccccgctggccatggaaatggtgcgcgacatcgacaaggacaccgtcgacttcgtgcccaactacgacggcaagacccaggagccgaccgtgctgccggcccgcttcccgaacctgctcgtcaacggttccgccggcatcgccgtcggcatggccaccaacatcccgccgcataacatgcgcgaggtggcggacggcgtccactgggcgctcgaccacccggacgccagccgcgaggaactgctggaaaacctgatccgcatcatcaagggaccggacttccccaccggcgccaccatcctcggccacaagggcatcgaacaggcctaccgcaccggccgtggcctgatcaccatgcgtgccgtggtcaacactgaggagatcaacggccgtatgtgcctggtggtcaccgaactgccctaccaggtcaacccggaccgcctcgtcgtctccattcgtgaggccgtgcgcgacggcaagatccagggcattgccgacatgcgcgacgagacctccggccgcaccggccagcgcctcgtgctggtcttgaagcgcgacgccgtgccgaaggtggtcctgaacaacctgtacaagcactcccagctgcagcagaccttcggcgccaacatgctggcgctggtcgacggcgtgccgcgcacgctgagcctggacgccttcatccgccactgggtgaaccaccagctcgacgtaatcgcccgccgcaccgcgtacctgaagcgcgaggccgaagagcgcgaccacatcctgcagggctatctcaaggccctcgacatgctggacgaggtcatcgccctcatccgcgcctccgaagacaccgacaccgcccgtacgggccttatggggctgctggacatcgaccaggtgcaggcggacgccattctggccatgcagctgcgcacgctgacccgcatgaaccgcgacaagatcgtggccgagcatgaggaattgcagcgcaagatcgccgactacatcgacatcctcgccaagccggaacgccagcgcaagatcatcggcgatgagctcgacgagatcgtggccaagtacggcgacgaccgccgcaccaagatcctgccgttctccggcgagatgaacgtcgaggacctgatcgccgaagagaacgtggtggtcaccgtgacccactccggcttcatcaagcgcaccaaggccgacgaataccgcgcccagcaccgcggcggcaagggtatcaagggcaccaagctgcgcgaggacgacgtggtggatcacttcttcctgacctccacgcacaattggctgctgttcttcacgaacaagggccgcgtctaccgcatcaaggcctacgagctgcccgagggttcgcgcgactccaagggccagcacgtggccaacctgctgcagttcgcgcccgacgagaccatccagaccgtgctgtccatcccgaactacgaggtggccaagtacctggtgctcgccacccgttccggcaaggtcaagaagaccccgctggccgagtacgattccccgcgccagggcggcctgatcgccgtgcgcctcatggccgacgagaatggcgagaacgccgacgagctcatcggtgccgcgctgtgcaacgccgaggatgacatcatcctggtctccaagctcggcatgagcctcaagttccaggccgacgacgagcagctgcgtccgatgggccgccagaccgccggcgtgcagggcatgaagttccgtaacgacgacagcctgctggccatggatgtggtccctggcgactccgacaaggacctgttcgtggtgaccaacgagggcttcgccaagcgcaccgccatcagcgaataccgtctgcagggccgtaacggcttgggcatcaaggccgtgcaactggtcgagggccgtggtgccctggtcggcgcgctcgtggtgtccgaagacgatcaggtcatggccatcatgaagtccggcaaggtgattcgttccaacgtggacgaggtcaagcgcaccgggcgcaacacccagggtgttaccttcgccaagcctgacaagggcgacacgattctctccatcgcccgtaacgaggagaaggacgagcccgaggacagtggcgatgccgcggcgaacggcaccgccgagaccgcacaatccggcgagaatgtgaacaacgcggacgaggcgtgagcagcgtcctgaaaagctggtagcctcgcatacagcagaggctaccgccaagcctgttaaggagaaacgatgagcgagaatctcgaagacaacgagccccggatcataccgccggcagtcggcaatacgcagaacgatcatgtcgagccgctgatcggtactgagcacgctccccgcgtggcacgctccgtgtccagcgatccggaagaatccacgttgccttcttcaggtgccgccactcccgtgcgtccggcacctcgccgtagcgcccccagggctcgccgcatgagcttgtcgctgacccgcgtggatgcttggtccgtggccaaggtgacgttcatgctgtccatcgccgtggcgattattcaggtcgttgcctccgcgatcgtatgggtgctgcttgatgtggtcggtgtattcagccagattacgcagattgtgtcttccaccggtcttgatgcaggcggtttcgatctcaagaacgtgttgtcccttaccaccgtggtctccggcgtcaccatcttctcgattgttgaagtggtgatcttcaccctgctggccaccattgcggcactgatctacaacgtggtcagctcgctggtcggcggcgtgcacgtcacgctcggcgacgactgatatagctatactggcagaacttccctcagtgaaccgcaccccggttgttggactgaagtaattcagattcgatgatcggaggtgcggtttcttatgtgtggggttcgtaggcgtcgttgctgggccgagacttgggactccggcgacgctgggggtggcaggcgtcggtgttgggacaggttttgtatctctgacgacgctgtggagggcttaccgtcgtcagcggtacagatcttggagttctgccgatgctgagggtgtgttctgtgtcgtttgcgtccaattcttggccctctgccgacgctgggcacagcaagcgtcgttgctgggccaagttttggactgccgccgacgcagagaatgcacacagcggtgttggtctgccagcgtgtggcagcttggcgccgttgaggaaggtctatgtggtgtggttccgccaaagaactggcaggttggcgctactgaggggactttatgggctcttccggttttggcgtgtaggggccgtgcggtttcattcactttttcaatcacacaccgaatcaaaccgcacggcccctacgcaccaaaatgcgaagagccggtttcgctaactagtgcctatatgcctgcaatcaggctgatttgtgctgtcaggctggctggcgtcagcggttgatctgccgatgttgctgctcgtcagtctggactgttgggctttcgttttgacagcggaaggaagatcctcctcgcggtagggcaacaattatcagtatcataattaaggtaatcgtgattacattaaccatgatactcttattattgggcggtaggcggatcggagggctgcaatgtttgtcgcacgagagcacgagttacaagtgctggaaaagctgtttaccagcgattcgttcgaaatggtggtgctgtacggtagacggcgtgtagggaaaacggcgttgatcgacgaatttgttaaagataaacgcgtgctgtacttcacggccatacagcaaagcgccaagatgaatcttgaagatttctcaagagcggcattgtcgttctttggtatgccggattccaccccgtcgtttggcgggtggtctgatgcgttatcgtttgttgctgaacgtgctgcacagactgacgaacgtatggtgttcgtattcgatgagttcccttatgcagctgccgccgagccagcattaccctccatgttgcagatagcaattgaccatggattcctcgccacaaaagtgacgatgattctatccggtagtaacgagggattcatggaaaacgacgtattggggcgtaaaagcccgctatacgggcgtcgtacagcacagattcgactcctgccattcgactatgcggatgcggcaaaatttctaacgaacacatctccgcaagaactggtccaatactatgcgactttcggcggtacgccatattatctggcccgtatacaggaagccgatggctttgaatccaatgtgctgcgcttgatgttcgacaacttgggcgtactgcgtgaggaacctatgatgctgttgcgtcaggagcttcgtgaaccggcatcgtattattcgatattgcaatctattgcgggtggtaattcctcgccaaagcttatcgctgaacatgcgggtgtcggatctgattcgattggagcatatctgaaaacgctggtcgatttgcgcttaattgagcgaaaagtgccgtttggtgaagatccgagtaaatcgcgcaagggaatgtatgtggtgagcgatcccttctttgcatattggttccgctttgtggggcgcaacatgagcattttggatggtaatatcagcgaggaggttacgagcagactcgcttttggaccagcgtttgatacctatgttggtcaacaatttgagacgatttgcctgcaatggcttattcgaaacaacgctatgggcaacctcccctttgttgccactcagttcggcaaatggtggggcaatgatccgattgctcacgagcaaaccgatatcgatgtgattgctgcggattcgctcgatacaacgattctgttcggtgaatgcaaatggcgtaattcattcaacgaaacggaggctattgaaaagctccatcagcgtgctggcttagtccgcggctatcaggcaggtaatgcgtggcttatgctgttcaccaagaatccggtgagtgagtccacgcgaacccgctacatggatgatgaacgaatggtgttcgtttccgcggaagagttatacactgcgtgatgcattactgggtgattgtgacgcggtatctagagtcctgccgacagtcacgtggcaattacgccgaatcacgcaccaccaaatcggtgttcaggtgcatcacgcgcggtgaagagactccgttgatggctttgatgaccgcgtcggccatggtccagcgcgctgatccatgtgctgatcgacggtggtgagttccggggtcatggaggtggaagctaagttgttatcgggcttacgtatttggggatagtacttgttgctcgttgtacatatagcaatgcccttgcctcctcacgggaagcaagggcattacgctactgcttagtactgctcagaggcaagcgtcacagcacgccctgggcaaccatggcgttggcgaccttgacgaagccggcggcgttggcgccgagcatcaggtcaccctcgtgaccgtattccttggcggcggccagggagttggcgacgatctcttccatgatgga

SEQ ID NO: 3886 - DNA, 13562 bp, Unknown
  R22_24m  MAG No. k141_5400
cgtggtgctcgatgacgaattcgtgtcttcccaccatgcccgtgtctaccgtgacacgcgctccgggcagtgggccattgaagacctgaactccaccaatggcaccgtggtcaaccagcagcgcatcaaccgccccaccatcctgcccgctcgtattcctgtgcgcatcggtgccaccaccttcgaactgaggtagccgcatgccaaaatccgccgcttcacaaccgctgttcctgtattccaccacggtgtccgatgtgggcactgtgcgcgcgaacaatcaggattcctccttcgccggcgagcatctcatcgccatgtgcgacggcatgggcggtcacgccggcggcgatacggcatcctccatcgccatccggtcactggcccacatcgagcaggacgacaccggcggcaacgtcgagacgatctcccgcatgatggaaacctccgttatggccgcgcatgacgccatcgtcggcaaggccaagcgcgaacgcaagcttgccggcatgggcaccaccgttaccgcagtggcattggtggccggctactgggtcatcgcccatatcggcgattcgcgcgcctacctgctgcgcgacggacgcctgagccgcatcacgtgcgaccacagctacgtgcagcacctcatcaacaccggtcgtatcaccccgtccgaagccaagaaccacccgcagcgcaacgtcgtgatgcgcgtgcttggcgactttgacattgacccgcgcccggatatttcggttcgccgagcccaccccgccgaccgttggctgctgtgctcggacggcctgtgcggtgtgctggaagattccaccatcgaagagacgatgaccacgctgtccgatcagggcgaatgcgcgcagcgtctggtgcagatggcactgcgggcaggcagcaccgataatgtcacggccgttattgcggatgccacgttggcgttggatgccgatgcgttcgacctgccgcaccaaacgccgttggtcggcggtgccgccagccgtaatcttgagccgattgccgacatcgtcaacgagccggtggctaccgcgcccgcactgcgtgaggatgattcccccgcccagcgcgccgcagcattgattcagcccgccagcgcgcacgaggcggagaccgcgcaaaccacggccaaaccgtcgtccacacgcgtggtgcagccgtccaccgtccgcgaggagaccggtgaacgagccaatcccgataccggtgagattccggtggtgcaaaagccggatgggcgcctgtccgccgaccccaacgacccggatgtggccaaagccatccgcgatgagcaggtcgagcagaagaaggccacgcgcaccaagaagcgccgcaataagcttgcggtgattattacctgcattcttgccgtgctggcattggccggcgctggctggggcgcgtacacgtggagccagacgcactactacgtgggagatagcaacggcaccgtggccatttatcgtggcgtgccgaccaatctctttggacttgagctttcgcacgaagtgcagaccaccaatatcgccaccgcggacctgcctcagacatggcgtgaccagctgagccaaggcatcacagtcggttcgttggacgaagcgcagtcgcatgtgggtattatccgcaccgaaatgcgcaaactggccaagcagcaggaagccgacgccgccaagaaggccgaggcgtccaattccccggacagttccaaagacagctcccagagcgattccaaggacagcaccgaggattcgtccagccagtccggctcctcgtcagacaagtccggttcgtcaagctcatccgattcctcggataaatccggtatcggagcggccgacaacgcggccacgggagattctcaatgatcgttacccgtctacgtcagatttctttgttgctgattgccatggcaatcagtgcgttggcgttcatccagatgttccagcgcaccgccggcgaattccctatgcaatacgccggcatgctggcattggccgtagtgctgtttctggtgctgtgggggctgattgtgcgcttccagccgtacgccagccagtcgattctgccttgcgtgctactgctgaccgccaccggcgtgaccatgatcgctcgcatcgaccagagcgaaggttgggcggttgcccaacgtcagctgatctggctgtgcatcgccatcgtgctttccgcgctgctcatcatcttcctgaaggactaccgcgtgctgcggcgcttctcctacgtgtcgatggtggtgggcttggtgctgctgctcgccccgatgctgccgtttgtcggtcaggaagtgaacggcgcgcgcatttggatcaggattccgggactgggccagttccagccgggcgagttcgccaagctgttccttgcgttcttcttcgccgcctacctgttcgaccatcgcgaccagctggccgtgggcggtaagaagatgctcggtctgcagctgccgcgtatcaaggatctcggcccgatcatcgtggtgtggatcgcctcgatgggcgtgctcatcatgcagcatgatctgggcacctcgcttatgttcttcgccatgttcgtggccatgctgtacacggccaccggccgtaaaagctggatcatcatcggtctgatcgcgttcgccgcgggtgccgtgctggccgcaggcatgttcagccacgtgggtcagcgagtcgatgcctggctgcacccgttcagcaacgagcaatacaacaagacccccggcggctcctggcagctggtcaccggcattttcggcctggcatcaggcggcatgctcggcaccggtctcggccaaggccatccttcgctcgttacgtttgcgaactccgatttcatctacgcctctctgggcgaggaactcggtctgatgggcgtcctggccattttgatgctctacctgctcatcattgcctccggctttatcaccgccatgaaaatcaaggatggcttcggcaagctgctcgcttccggactggtgttcaccatggccttccaggtgttcaccgtggtcggcggcatcacgctggtgattcctctgaccggtctgaccctgccctatatggcggccggcggctccagtctgatcgccaactatattctcgcgaccctgctcatcatcatctcgaactcggccaatgcgcccgagccggagctgacctcggatacgttccagtacgaggctttggccgtgctgcgcaacaaggaacttgaggcccgagcccgcgccactgagccgatcgttcagcctcgcagcgcgtcggctacggcgtcgcagtccgaggcggaatcgtttgacgaccccattgtggatgccaccactccggcgtatgccggcgccgatgaaccgtacacgcctaccggtacgattcccccgcttcctcccgttaacggaggcactcgcgtatgaacaaatatcttcgtcagcttttcaccgccgtggtcgcgctgttcgtgattctcggcctgtcgtccaccatcatcatggcggtacgggccaacgcgctgaacaacgatccgcgcaacgcccgttcgctgtaccaccagctcggtgcctaccgcggtgccattctggcctcggacggcacggtcatggccaaatccgaaccggtcaacgacgcgttcaaatacctgcgcacctattccaacggtccgctgtatgctccggtcaccggcttcttctccatcaaccagaccgccgatcgcggcctggaagcctcccgcagcatgctgctcaacggtgaggccgattcattgatctggcagcgggccaaggccatgctcaccggcactacgaatcagggcgcgtccatcgaaacctccatcgaccccaagctgcagcaggttgcctacgatcagctcggtacgcgcgatggtgcggcggtggccatcgaagtcaacaccggccgtatcctcgccatggtgagcacgcccagctacgatccgaacaaactggcgacccatgacgccaaagccgcgtctcagtcctacaacgaactctctgcgggccaaaatcaaaatagcccgctaatcaaccgcgccacctcgcagctgtacccgccagggtccacgttcaagaccatcgtcgcctcggctgcgctggaaaccggcgattatcagacggacacgaagattcctgcaggctccagctataccttgccgggaaccgccacacagctgccgaacgacgaggcacagggcgatggcgtcaacggacagatctccctgcaagaggccgtcgcatggtcgtccaacaccgctttcgcccagcttggcgtgaaactcggcgcgagcaaggtttcggacatggccaccaagctcgggttcggcagcaccatcaccattgacggcaccgaatccacgggcaccccgatgacggccaccgcgtccacattcccctctgatccgaccgacgacaagcttgcgctggcatccatcggccaaggcgacaccacggccacgccgttgcagatggcgatggtcgcgcaggcaatcgccaacaatggcaaactgatgcagcccacgctggtcgatcgtgtgcgcgccgccgatctcaccgtactttcgcagaccaaaccgcaaaccatggccaacgcgttcagcaaggattccgcagacaagctcaccacgatgatggagagcgtggtgaccgaggccaatccgcagctggccatcgacggcatcaaggtggcggccaaaaccggtaccgcacaaatcggtatcgacaactctgccatcgacggctgggcgatcggtttcgcgccggcggacaatccgcaaatcgccgtcgcggtgttggtgcataacacagatgtacacggttcgctcgccgctggcccgatcatgcgcgcgatgatgcaggaggctttgcaacagtgaaacttatcgaaggacagcttattcaccgccgatatcgtcttgattcgcgtcttgcgcaaggcggtatgggcgaggtctggaaaggctacgatattcagctcggccgtgaagtggccatcaaggcgctgcgctcggacgtgaccaacgccgaggccaagttgcgccgcctgcgtgccgaagcccataattccgccaatctggcgcacccgaacatcgctgcgttgttcgaatactacgagcatgacggcatcggctttctgattatggaatacgtcccctcgaaatcgttggcggatctgttccatagcaagggcgcgatggatcccatcgaactgctgcccattctgattcagaccgcgcgaggcctattcgtggcccactcgcacggcgtgattcatcgtgacgtcaagccggccaacatcatggtttccgacaccggcgaagtgaagatcaccgatttcggcgtgagctactccaccggccaaggccagatcacccaggacggcatggtggtgggcaccgcacaatacatctcccccgagcaggcgcagggccagcaggccacgccgcaatcggacatctattcactgggcgtagtggcgtacgagggccttgccgggcatcgtccgttcaccggcaccactccggtcgatatcgccgcagcgcacgtgaacaatcccgtgcctccgctgccgaactcggtggacgtccagttacgcgaatttgtcatgtcgatgctggccaaggacccgttggatcgcccgaaagacgcgctggtggtgtcccgtacgctggcacgcatcgaacgccgtctgctggatcagcagaccgaaatggccgacaccaccatggccacgtccggcaatcgactgccgcgccgagtgaccagcacgccacgcattgttttggaggccccggcctcaagattgggagggaataagcaatgagcaccagtatgcccaccgcattggccggcggacgctaccagcttggccagctcatcggtcgtggcggcatggccgaggtccacgtggctcttgacacccgtctgggccgtaccgtggccgtgaaaatcatgcgcgccgatctggccaacgacgacatcttcctggcccgtttccgccgcgaagcacacgccgtggcccagatgaacaacccgaacatcgtgaacatctacgattcgggcgaagaactggtttcttccgaaagcggcgataccgagcgtttgccgtacatcgtcatggaatacgtcaagggccagaccctgcgcgacatcatcaaggtcaacggcgcactcagccagcgcgactgcgaacaggtgatgttgggcgtgcttaacgcgctcgactattcgcatcgcatgggcattatccaccgcgatatcaagcccggcaacatcatgatttccgagcagggcgcggtcaaggtcatggacttcggcatcgcccgcgctctggacgattccgcaaccaccatgacccagtcgcagggcgtggtgggcaccgcacagtacctttctcccgagcaggcgcgcggcgagaccgtcgacatgcgttccgacctgtattccgccggctgcgtgctctacgagatgcttaccgggcgcccgccgtttaccggcgattccgctgtggccatcgcctaccagcatgtctccgaagtcgccacgccgccatccgccgtggtgccggggctgccgaagatgtgggattcaatctgcgccaaggccatggccaaggaccgccagaaccgctacgccacggcctccgaattcaagaccgacatcctgacctacatgaacggcggcgtgccggtggcggccgcgttcaacccattgacggacctgtcgaatatgaaggcccgcaaggaagccgaacgtgatttgcccaccacgccggtggaaccgcagcagcagcccacccaggcattcaacccggtgaccggtcagttcgagcagattccaccggccaatggtgccaactcagcggcgttgcagtcccgtgcgcagcagcgtgcggcggcggccaaggccaagaagcgcaagaagatcatcatcggttcggcgatcgcggcgattgtcgcggtgctcgtcattgtgggcatcatgttcgccatgaacggctccggcaacaagtcctctgaagacaccgtcaccatccctgaagtgtgcaacgcttccacgtccaaggacaacatcaagctcaagcttgagagattgggcttgaagatgaccgaaaagcaagacaccgactccaccgagccggaaggcacctgcaccaagatgagcccggacgccggctccaaggtggccaggggatctgccgtgaaggtgtggttctccgcaggcccgcagtccactcaggttccggatgtcaaggagcgcagccaggaagaggcgcgcagcattctggaaagcgccgggttcaaggtgaacgccaccgtcaaaaccgaagacagcgccgacatcgccaaggatatggtgacgagaaccgatcctgccgccggtcagtcggttcccaagggcaccaccatcaccatatatgtttcttccggcatgaccaccgtaccgagcaatttggtcggtcagtcgaaggacagcgtgctacagcagtatgagggcaagttcagcttcaccgtggagcaggaaagctccgatacggtggaggccggtctgattacccgcgtaagccccgattcgggctcttccatcgcgcagggcgggtccatcaccatctgggtgtccacgggcaaggaaaaggtcgctgtaccgaatatcaccgctggcactgactacgccaccgccgaactcatgctcaaggccgtgggcctcaaggctcaggccagtggcccaaccgacagcaccgctgtggtagtcagcatcaatcctggcgctggcagccaagtagatgcgggatcgaccgtcaccattaccacgaaggccggcagcaccggaggcgacaccggtaccggagacggtggcaacggcaacggtgccaacaacggcaacggggggcggaacccgtgagtgagtgagcgccgggcgtgtgtgttgcgcatacgcaacgcacatagcgcaacacatgcgcaacacatgcgcaacgtaaacacgcaacgcaatcacacaacgcaaaggggaggggcttctgcacccctcccctttgctgtataaagagctatcccagcgcaacattcccgggaaagcgtcgccgcgcgcggaaaagctacttcgtaaccttgggctgaaggccggcggacttggccacggcgttgtcttggccgcagaccttaagccagttggccaatagacggtagccgtcctgggtcatcaccgactcgggatggaactggacggcatacatcggcttgtccttgaccttgatgccctgaatggtgtggtcatcctgcgtccacgcggtgaccaccagcgtatccggcaccgaatcgggctcaacggccaatgaatggtagcgggtggcggtcatgggattggccacgccctcgaaaatctcgtcatcggcatgctccaccgggctggtcttgccgtgcatgatggtgggcgcgtggcccaccgtgcagccgtacacctcggcgagcgcctgcaagcccaggcacacaccaaacatcggcacgccgctggccgcgcacaggcgaatcatatcctcactggcaccggattcggccggagcgccagggccgggagaaatcagcacgccatcgtaaccgtccagtacacccggcgcggctgggtcgatagcgtcgttacgcaccacatcaacagtggcgccaagggtttgcagatagcctacgatcgtgtagacgaaggaatcgtagttatccaccaccaaaatatgcgcggaatcggtcatagggctctccttgagggacgtgtactgcaagccatagtactaggctgccgtcagctcactgccacgaagttcgacatctgctgtaggaatgggatattggcggcggcccaagggaatccccactggaacagcgccgcggcggctgcgaacagcagcagagccagcagcagccatcgaatcggtgccacgccgggctgcagacgcaacagtccgccatagatgctggcatccgggcggcgacgctcacccgcgcgaatctcgcgcagcaccggccagcgccatgccaccgcagcggcgatgaacagaaccagccacactaccagcgcgccgaataccaccttgtccagcgagccaatgcgggaagcgatcgagggggtttcggtggtggagaacttcactgcaccggacgaatcagtagtagccagctctttgggcacgccatcagacactttggcccagtacgccaactcaccatagctgatccatcgatgggtgggggtggagtatttcggctcacaggtagtcagtgtgatcatgcgtttggtgggattggcagtggagtcttccggattgggcgcgatcacatacacgtccgtgggcagcacaatctcgtgccgggtgtagtggtagacgtaccagtaatccttggtacgaacgatgatgggatcgccttcctgcaacttgtccacatcgcccaacggctgcccgtagccgttgcggtggccggcgacggcgaagttgccgacctgccccggcatctgggtggtgtcgtaatggcccagaccgtggcgattgagctgctcgagcgtggtgccttccacgatgttgcgatgccattgggagccgaagcgcggaatgtagatctgcgcaatcaagtcgccatatttcgcgtctttcggctgtactggagcatcgccctcctgggctttggcgatggtgaccgttcccccgttgttgctggggtcgctccagtcgacggactgggtggtttcgttctgggctcgctccgcctcgacaccggtccaccacatctgccagacgatgtacagggcgcaaatcacggcagcggtaatcagcagttcggcgcagatgccgagtgcctgccagatcaggctccgctggggcgaagacgcgccgcgtactgcggcacgacgggaccttgccctgctggcattggccgggtctgccgccattcgtgcggcgtcgtcctcggggaagggctgtacgtccgacacggacgcgagatcaatgggcgccggtgcgccgctgttgtgcctgccgtgtctcattgctgagtctgctcctcatctgtggtctttgacgtatcgaccgtggcatatttcaactgctgcagcaaggcggcggtagcggggaactgaaggccctcggcattctccaccttgtagccaatgccaaacgcggtcacatattgcttaagaatggtaatggcttcggagtcgttcaacgctgcgcgaagtctttgcgggtcaccaatcgcggaaatggtgaatggcggcgagtatttcttaccgtgcaacgacagcacgttgccggaacagatgaccgccgaattgaacagcacccgctgatccataatcatcagcgcatcggcaccgccggcccacaaggcattcaccaccgattcgacgtcctgctgatgaatcacgtaatcgttgatattggcggtcgtgccattgttgttgacggcgttctcccataacggagaatcatccagcgttaccgttacgccgctgccgctgagcgcgggcagcatcaggctggaatccacattgctggagtccttgccttggttctgcgtgctgtcagtaccgtcggtgccatcggccttgagcgcgtccgtaagattggcgacctgtttggtcagatcgctgacgtcctgctgcagctggttggcctcgcccacgccttgctccaccagatcggccgtatcgttggtggcggcaaccgtacgattgaccctcacgttggtgctcagcagaaaaccggtcaaggcaatgacgacgaataccgcgacaccaccccatagggagtgccgtgcgccgtgcttacctacatgtctggccatgaatttcctgtcttcttgccgactctggtcgccgctttcgagtgtagccactattatgacttttagcctattgaatggagactatgctgatggctgacgaagagctgcacgagaccgactcgaacaaccagaaggactggcagagcgagacctcatccagcaccgctgctgacgagaccgccaacaaagacaccgagcagaacgcagagaacgcttctgccgaggaagacgcggcttacggcgtgaatatggagcaggtgcaggccgtgctcaacgccactgccgataaggccacgctgaccccgcagatgcagcgcatgatgaaccgtcaggcggagaacaccaagcgtgttgaagaaaccattaagggcaccaagtcgaacccgcgttggttcgtgccgctgttctgcgcgtttatgatcatcggcctgatttggtgtgtggtgtactacctctccccgtccggctcctggccgattccgaacatcggcgcgtggaacctgggcatcggcttcgccctgatcatgatcggattcctgatgacgatgggatggcgctgagttccgactcgttgcgcttatctatcggtagatcgttttttctatcgttaggttgttcttagttcttatgcgaaaggccgacctcccgtatgcggaggccggcctttttcgtgccttcacctgttcatccacagctatccaccacttatccacgacttatccacgacttatccactacgttatccacagcctgtggatgaatcacacccatgtagttttccaccgaatgtggaaaaccatgtggataagtggtggataagcggcgtttctcggtgtatatctcgtgcataactttggcttggcatatatcgccacagcgagggaacagttatacacccgagttatccactgcaacaaacccagtaataccgcggcattcctaacttatccacataagttatccacagtcttatgcacttttctacacacttgtgcacaagtcaccattgtggataactcgttatcgtggataactcgtcattgcgcgcatctcattactgtggatatcttcattactgtggatatcttcattactgtggataccttcatacagcgcatgcccactcaccgaatgacgatatccacatcgctaatatccacatcgccgctttccgtacatacactgatgccgggcactgcatgttccgcaatacccggcatcaatcgttttttgcggccgtatcaagccatatcagtgcagggagccgaaactcatccacccgtaagaattggccatattgcacaacagaatcaacacaatgaccagtaccaccatggcccagccgtaaacctgcatacgccatttcaggcttttacctcgccacgccggcacaccacccaccagcagccatgtgagtattccacccactacaaagccgccgacatgcgcctgccacgccacgcccccgaccacgaacggcaaggcgaagttcaccgccatccagatcaacatggagcggatatcggcgccgatacggcgatataccaccagcaatgatgcaaacaggccaaataaggctccagaagccccataggctgccatctgccagccgatgcctcccggagccaccgcagcccacaccataagtcccagagagccgccaaggccggaaatcacatacagtcccaagaaccgccagtggccgatcattcgttccagcactgggcccacggaatacagggcgatcatgttgaacaggatatgcaatagcgagttcggcgcatgcaggaacatcgaagtgatgagcgtccacggctcagccaccagtctgaccggagccgccatgccgaggtacatcaaccaagtcctcaggcccggggcaataaatcccagcaatacctccagtagccacactgccacgcacgcaccaatcagcgcccaggtcatcaccggaccaccgcgctcccactggtatcgaatctcccgctgtgtaggaatatgcatgcagtccactgtatcgaaggtctcggatgcgttccacgcgccgcgaagatgctgagccggccgagggcatgcgggcgtggatgaatcgcccacgaatgtcattccacccaatcgtcacaaacagcggcctagaatagggagcagagtcggtctgaatgggcataccgaccagacgatccctagggaaaggagccgtcatggagaacaagtcttctaacggttggaagttcttcgcgctgctgttcggcggattgctcgccgcgcttgttggcttgtacatctacaagcagcagaacccagattacgatccgtgggaggagccgtgggagaacagctcctcgccggtcgacctgggtctgaacaaggccgaggatgaggccgatggcgaggcggaagccgccccggccgaagcctgatagggcggtctttcaacgcaagaagccccgcaaccgatggatgtcggttgcggggcttcttatgttctggttcccctctccgaggggagccgccccaccgactcagtcagccagaggagcagtgtgccagatatgcggagccgttaagcgggaagcccggcgggcttcccgtaggcgacgccgagcggcgacagccgcgaggtagaaaccagcacgtagccggcgcgctgctccggcggccgtcaggccagaggagcagtgtgccagata

SEQ ID NO: 3887 - DNA, 9150 bp, Unknown
  R22_24m  MAG No. k141_5766
tgaagctgtggcttctggagcaagtcccaaggaactgcatcgcccggccttccgcgagaacgcgggggaggtgtacccggaccgcgaactcaacccgtacgagatcaaccacatcatctccacgcacttcaatgacgtacgtctgaagaacttcatcgagcttcgccactgggattccttgcctatcgagcgtgccgaacgtctgacggagattgtgtcctctctgttctacgtgcctgagcaccgtgaacgtctggaaagctacttcgagggcatcagcgaggaagaggtgttcgaagccaaggccaacatccaggcccacggccacgaagccacgccgtacggccagccgctcgacttctggaaggaattcctggggctggagggccttctgtccgacattcccggcgatctgaagcaccccgacgtgttccaggagtaagcgaagaagcatatacagaaaaatctattgcgcgatatcggtgtcgaaggcatgacagaatgttttgttttggcaccgttttgcatatccggccaaggatattggatgtggttgcgcatgggagtggggagaatgcggatagactggcggatatgacatctgggaattcattgcagcataagcgtgttcgcaagtcgccgggggaacgccggcaggaaattctcgatgccgccgtgcgactgatttccgagcgtggctacaacggtacttctgtgcaggatgtggccgatgcggtcggtgttaccaagcagggagttttgcgatattttcctagcaaagataacctgcttgccgcgatgtatcacgagaattacaacacgtttggcagtgtggaagacttcatggcctccggcctgcctggttcagtgcccgatgatttcagattacccgcgtatctgaggttcttggtacattgcaattccacgcgccccatgcttgttcagctgttctcgatattgcaggtcgaatcgttcaatcctgcgcatccgttacatgacgagtttgccaatcgtcgggattcaatatggcgatactattcgacatacaactggaacctgccttccgaattcacctcgtttgaggaggtccggcccacgttgcgccatgctctggagatcatggatggtgtgcaactgaggtggttacgggggccggccattgacttatgcgatgaatgggccgatctggagccggcgatatttccttcgccgatatgggacgggtatcgctgattcgctgtgtgccttgaactgaggcttgtgcttgatggcggcagtaagtatgcgggcgaacgaaggggtcgcatacatacggtcgttttggtgtatgtgatgcgcgcggcataagcgtgttgtatgctgtcaatagataaactaccaattggtaattaaaaagctgttcgatttcactgaggaaagcgacttcgtatgaccgacaacaccacgcctgccgcaactgctgaaaccttaccgtacaagaatcctgatttgcccgctggtgagcgaatcgccgacttgctctcccgtatgacacttgaggagaaggtcggccagatgatgcagcttgacgcccgcggcggcgatcttgaggatctcatcgtgaataagcatgtcggatccattctgcataccagccccgaggatttatctcgtgccgccaagaccgtcaatgagaagacgcgtctgggcatcccgttgattatcggagatgactgcatccatggatactccttctggccgggcgccacgatcttcccctcccagctcggcatggccgtcagctgggacgccgccaaagtcgaagccgctggccgcgccaccgccgaagaggtctcctgcaccggcgtgcactggacgttctccccggtgctgtgcatcgcccgcgacacccgttggggccgcgtggacgagactttcggcgaggacccgatgctgatcggcgaactcgcctccgccatggtcaagggctaccagggcggcgccaaggccggcgaggccctgccgaagaacgcgatcctggcctgcgccaagcatttcgccggttactccgagacccagggcggccgtgacgcctccgaagccgacctctcccaccgcaagctcgaatcctggttcctgccgccgttcgaacgcgtggccaaggaaggctgcggcacgttcatgctcggctacgagtccatcgaaggcgtgccggtcacgttcaacaaatggctgctgaccgacaagctgcgcggcgcatggcaatacaatggcacgctgatcaccgactgggacaacgtcggccgctcggtatgggaacagcatgtcaagcccgattacgtgcacgccgcagccgatgcggtcaaggccggcaacgacctggtcatgaccaccccacagttctatgagggagccatcgaagccgtaaaaaccggtctgctcgacgaatccctgattgacgatgcggtagcccgcatcctggccctgaaattccgcctcggcctgttcgaagacccgcgcctgccggatgccgaacgcatcaaggcggtcatcggctccgccgaacaccagcagaccaacctggaactcgcccgcgaatccgtcgccctgctgcgcaacgacggcgccctgccgttcgccgcagacaaggccaagcgcatcgctgtggtaggcccgcttgccgacgacgcccagaaccagctcggcgactggaccggcaactccggtcaggtctcttggatgccggatggccagcctcgaggcatgattaccaccgtgctcgacggcctgacccagctcacctccgacgattgcgaagtggtctactcgcgcggcgcgaacgtcatcgacctcgtgcctgaccctgccggcgagttctacccggacggccagcctcgcccgaaaatcggcgtttccgccgccgtcgatcgagcaatgatcgacgaagccgtggccaacgcccgccagtccgatctgatcgtggccgtggtcggcgacgtggtccagctggtcggcgaaacctgctccaccgccacgctcgaactgctcggtggccagaacgccctgctcgacgcgctcgccgccgtctcgcgcgaaaccggcaagccgatggtcaccgtgctcatcagctccaagccgcaggtgttgcccgcctccatcgtgggggagtacggcgtgttcgccaagcgcgtcagcgaccctgaaaccggcaccggctccatcctgtgggcgccgaacccgggcatgcgcggcggtcaggccatcgccgaaataatcctgggcctgaccagcccgtcgggccgactgccgatcaccttcccgcgccacgcgggccagctgccagtctactacaaccagattcgcggccagcacggcgaccggtacgccgacctcacccaggatccggcgttcgcgttcggcgaaggcctgagctacacgacgttcgcatacggcgaaccgaccattacgggcggcgcaagcaacgccgacggcacattcgccgaaaccgacaccgtacgtgccgaaatcaccctcaccaacaccggcgagcgcgccggcgtggagatcgtgcaggcctacatcggcgacatcgtgacctcctacagctggaccgaccgcgaattgaaggcgttccagcgcgtcgcactggaacccggcgagaccaagaccgtcaccttcgagatcccggtggcgaactgcacgatcgtggacccggacgccaaccgcatcgtcgagcccggcgaattcgaactgctcatcggccactcctcgcgccgtgaggacctgaagcgcaccacgttcaccgtggcgtgagtgagtctgacaatcgccggataataacaaagtgggatgaggctcgatgccccatcccacttgttggcttgttgtactgttgcgatgttgctggtcagcgtcagtcggacgtttcagtcggacgtggtgatgtgctccacatcccagcgcacgccgagcacttcgggcgcgcaactggcgttcgagccctatcagcgcgcccaatgccgtgccgagcacaatgcgtacggtgcagtcgagaatgatggccagagaaaacgtggtgaacatgaggattcacctcctgaaaagtagacgtcaggaacttcccgcacgccctacagcgccagcccgcctcccgcaactacgtcgccgcgttcgggtggttcgggctccgtgcggtgagtgggacgcggccgtatgatggaagcgcgggtggtccgggattggtccgggactgttggatgcggcgggaggtgtcatggttcctatcgagcacgtgtacgaccagattcgcgcgtttgccgctgatgccggcgctcgcaaggtcgtgctgttcggttctcgcgcaaagggcgtgaaccggcctaaaagcgatatcgatcttgccgtggccggttgtcccgatttcaatcgcttggagcagaaccttcaggacaatctgtggtcactgcttaaagttgatgtcatcaatctggatgagccgatttcttcatcgctgagggcggagattgagcgtagcggaaaggtgctgtatgaaaaagtatgagaattacgtttccgcattgaattcgctgcgcaaggctcccgaacaggatctcggcaatgatttcatccagagcggcattattgacaagttcgggttgcagttcgagcttggttggaaactgttcaaggcgctgctggcttatgagggagaccctgtttccgcttccggctctccgcgagatgtgctcaaaaccgcttttcaatactatgatttcatggacgaatcgttgtggctgcgcatgctgcgcgatcgcaatgattctgctcatatctatgatgaagaacgagctcggcgtcttgtggacgccatcatcgctgattacatccccgagtttgagcgtgcaaatcaggggttggtcgctcgctacggtgaagcattgaacgattagcgtgacaggtatggcatcgggcgcgctgggtgttggcgaacgaattaatggggtgaacctcggcaattggctggtgctggagcggtggatgaagccggggatttttgccgccagcggcgaggcggacgagatctggctgcatcgggctacgaagtcggctgagctggaggctttgctgacgcggcatcgcgacacgtatattaccgaggccgatttccggaacattgccgcacatggctgcaatctggtgcgtattccagtgccctatttcgtgttcggggatgtgcccggtcacccgggctgtaccgagtatctggacagagcgttcgactgggccgagcgggccgggctcaagattcttatcgacctgcacacggtgcccggctcgcagaacggattcgataacggcggcctcaccggcgtggtgcgctggcatcgtagcccgcgagtggtcgtctatgcgctggatgtgctggtccgtctggctcgccggtatcgcgaccacgcggcgctgttcggtatcgaagtgctgaatgagccgattgactggctgacgtatgccatgtcaccatcgagcaggcaggcgaaagaccggtccgaagcgcgaggaagcgggcctattccgatggcgttcctcaagcgtttctaccgcgagacataccaccggttgcgcccgattctggcagggaatcaagtcatcgtgttccatgacggcttccgactgggccgttggcgggactggttcgtgcgcgagggcatgcggggcgtcatgctcgatacgcatgtctatctggttatggccgagcaattcccgctgttccgtctgatcccggatcggtggctgatgggctggtatcgcttgttcgtgcgctggaacgaacgccgcatccgccgggccgcgcgctatacgccggtgatcgtaggggagtggtgcgtggccaacaatctggtgaaccgaaccccttcaacgaggaatgccgtctatcgcgaggtcgccgccatgcagcgcaaagcgtggagcgcatctgccgggcagatctactggagctaccaactgcgcggcaatcgcgctttcctgcctaccatcgacccgcaatccgacacgtcacgcctcgacccctgggatctcactcacgtttggcacgccggttggatggcctgcagccgcaccaattagcgatatccctcccaaaggggcaaaggcatcagaacatcctcgcaatcggcccacatggtattgagatcttggccgggggcgcgcagccagcgcagctggaggccgtccatcatcgagaatccggcctgcagcacatgtccgacattgacgccttccggcacggcccagttgatgttgagcgccgtggtgaccgtgcggcgctcgcggtcggcgaaataatcgtgcgcggggtgggccgggtcgagcgcctcggcgctcagcgtggagaacatatgcaccaacgcgggcctcttgttgttcacagccaccacctgacgccacatatccgcgataagcgggcgctcctgggcgaccatcgcggcgttgatcgattcggtgatccggtcgtatttctcggtcagcgccagcttgagcagtccctccttgctgcccacgtaatgcagcacgccggccttggtgagtcccacttcggtggcgatgcgttgcagagacgtgccgtaatagccaagtttgccaaacgattcgacggcggcgtcgagaatcgcggtacggcgatcggtgtctgtgggagaggggccgttcatacaggcaaccttacggtcggttagtagtgattccaaatgatttcggcgtgttgtgccgtagattttgataatctgcctaccaaccggttggtcgagagaaaacggcagtcgagattcgtggaggaacctcgaacaacagccaggcagcccggccgaatcggagccaacgcatatcggacaaccgcacaactcaagaaactcaaggaaagaggcaacatgagcgagtccacctacccgtccgtcaaggatttgaccctggaagagaaggcgtccctcacctccggcggcgacgcctggcacctgcagggcgtggaagccaaaggcatccccggctacatgatcaccgacggcccccacggcctgcgcaagtccctgacctccagcaccggcgagaccgatctcgacaactccgtgcccgccacctgcttcccgccggcggccggcctgtccagctcctggaacccggaactcatccacaaggtcggcgaggcgatggccgaggagtgcatccaggagaaggtggccgtgatcctgggccccggcgtcaacatcaagcgcaactcgctcggcggccgctgcttcgaatactggtccgaagacccgtacctggccggtcatgaagccatcggcatcgtcgccggcgtgcagtccaagggcgtgggcacctcgctcaagcacttcgccgccaacaaccaggagaccgaccgtctgcgcgtcgatgcccgcatcagccagcgcgccctgcgcgagatctacctgccggccttcgaacacatcgtcaagaccgcccagccgtggaccatcatgtgctcctacaaccgtatcaacggcgtgcactccgcccagaatcactggctgctgaccgacgtgctgcgcgacgaatggggcttcgagggcatcgtcatgtccgactggggcgccgaccatgaccgcgtggcctccctgaacgccggcctcaacctggaaatgccgccgagctacaccgacgaccagattgtctacgccgcccgcgatggccgcatcgcccccgcccagctcgaccgcatggcccagggcatgatcgacctcatcaacaaggcccgcgccgcgatgagcatcgacggctaccgtttcgacgtggacgcgcacgacgaagtggcccaccaggccgccatcgaatccatcgtcctgctcaagaacgacgatgcgattctgccgctgaacgccgaccctgccgcggcccggaagatcgccgtcatcggcgaattcgcccgcaccccgcgctaccagggcggcggctcctcccatatcacccccaccaagctgaccagcttcctcgacacgctcgccgaacgcggcatcaaggccgacttcgcccccggcttcacgctcgatctggaaccggccgacccggccctcgaatccgaagccgtggaaaccgccaagaacgccgacgtggtcctcatgttcctgggcctgccggaagccgcggaatccgagggcttcgaccgcgacaccctcgacatgcccgccaagcagatcgccctgctcgaacaggtcgccgccgcgaaccagaacgtcgtggtcgtgctgtccaacggctccgtggtctccgtggccccgtgggccaagaacgccaagggtatcctcgaatcctggctgctcggccagtccggtggcccggcgctcgccgatgtgatcttcggccaggtcagcccgtccggcaagctcgcccagtcgattccgctggacatcaacgatgacccgagcatgctgaactggccgggcgaggaaggccacgtcgactacggcgagggcgtgttcgtcggctaccgctactacgacacctacggcaaggttgtggactacccgttcggctacggcctgagctacgccacattcgagatcgctgacgtcgccgccgccaagaccggcgcgaacaccgccaccgtgaccgccaccgtgaccaacacctccgatgtggatgcctccgaaaccgtgcaggtgtacgtggctccgggcaaggccgacgtggcccgcccgaagcacgagctcaggggcttcaccaaggtgttcctcaaggccggcgaatccaagaccgtgaccatcgacctcgacgagcgcgcgttcgcctactggtccgaaaaatacaacgactggcacgtggaggccggcgaatatgccatcgaagtgggcgtgagctcccgcgacattgccggcaccgttgccgtggccctcgatggcgacggcaagacccagccgctcaccgaatggtccacctacggcgagtgggaggccgatccgttcggcgccaagatcgtggccgccgtggccgccgccagcgaggccggcgagctgacgaagctgcccgacaacgccatgatgcgcatgttcctcaactccatgccgatcaactcgctgcccaccctgctgggcgaaggcggcaagaagatcgcccagttcatggttgacgagtacgcca

SEQ ID NO: 3888 - DNA, 8754 bp, Unknown
  R22_24m  MAG No. k141_6141
atcggtggtcagcatggcgataaggttgcccttacctttgcccgcgagcttggccggcgccagtctgcgcaacgcggcgaacgccttggaacggaagagtgcgagcagatggaatgccacattgtggttcagatattgttcgacgtatcgggtgataccacgcagaagagcgcagataatcatcatgatgacggcgggcgcaacacccatgccccacaccggattaccggtaagtgcaaatgccgcgataatgccgaacacgggcaggaaggtggacgaaagatggccgatggtgccggcggtggaggccgctgccatcagtcctgccagaggtcgggcttccttaagcagtcgcctgagcacttggaatgtgctcattttggaagacgaatcgctatttgcagcaccagccggagtctcagccgaggcctgctcactcccgccagcggaagccgtcggcaaagctgactgcaggcggtcaaccgtcatacccgcctctgcgcttacgcgcgctgcgccaccctcagtccgactgtcgtcggacagctcctgcttgcgggaaccaacctgcagcacacgccgagcatggccttctccgaagttctcaatatctgcctgcgtggtaaacagcttggcgtagacgccgtccgccgtcatcagctcggtatgggtgcccctctcaaccgacttgccgtgttcgagcaccaccacttgatcagcgtgttcggcgttggccatgcgatgggtgatcataataaccgtcttgccgcgggattgcgccaattcgcgaattgtatccaggatcagctcttcggattccatgtcaacgctgctggtcgcctcatcgaacacaaataccggcgaatcatgcaggagcgcgcgggcgatggcgatgcgctggcgttggccgccggacaggttggcggcatcggactcaatcggcatgcccagtccgttcggctgtgcgtgcacgaagtcggcaatgcgcgcctgctcgagcgcggaccacagacgggagtccacggaatccggcgaatcaggaatctcgtcatcgggcaaggccatcagaagattctcgcgcaatgcgcccgcaaacagatggctgctggcaccaatcacagtgacggctccggccagtgtttcgcctgacaaatcggatacctcgacgccgttcagcgtgagcgaacctcggtaaccgaccagtgtaccggcgagcagcgaggcggccgtggacttgccggaaccggagatgccaacaatggcggtgaactgaccgggccgtgcggcgaaggtgatgttggtgagcgcaggagcgacggcggaattggggctggtttcaccttgcttatcggtctttgcggatgcggacttggagtcgccgtgcccggcatcatcataggaatagccgacgtggtcgaagcggaccgtcagaccgtcgtcagcggaatcggaatcgttggccggcagggtcgccgtgccatgctcgggctccggggtgtccagcagagcgaagatgcgcttggtggaggtcatgccgttcatcgccacgtggaagaacgagccaagctgacgcatgggaataaagaattcggcggacagcagcacaatcagcagcagtccggcgagggtgagcggaagcccgcaccgaacggcatcaggtattgcaggccgtaggccagataggcgaatgcgccgggcaggtgggcggcgagcatgatcggcgaccagccggcggtgctggctcctgcggcggctgcggtggtatgcgcatactgccatagagccacaccaatgccggccgccgcaccgccgtaggccacgatatccatggcggtcagcgagcgcagctggatctgcagcacgcgcatggtcatgaccctgcgctccacattccgcgcaatcccattcaccttaagcgaacgccctcgcacacgccagacttttaaagtgagagaggccacagaattatcgattgcggagtgcgcatgctagacgcgccaaccagaaaaaatatgcttcgatatcaggggctgaagcatccactacacccaatacgtgcatttatccgtttcgaggaggctaatttttgcgtttgccggaggcctacttccgtttcaaggggctgatttcgcatttgccggaagtctatctccgcttcgaggggctcctcatccatgtaatcggaagtataaacggctacacgtcaacgtcattccgccgttttagggccgtgtctacttgggcatcagcccctcgaagtggaagtagacttccagataaggcaaaatcagcccctcgaagccgagaaagcacgtttctacggtgtcagaagccgacggaacgcaaaagggtcgtctgcacgcagacgacccatatgatcaattcgccaatagacgcagcaaacgcggcctagtgctgctttttgcgcggcgaccagtgcttcggcggcgaccgtacttatcggacaggaagccggagaagccggcgccgatcacgccgccgatcatgatggagctgatgaccagaccctgcagggccgggctcagcgcgtacttgtcctgcaggaagtcgatggctcccgaaatggacacggtgtcataaccgtagagcaaaccggttagacacggcgttgtatacaatccacaaaaccagacagacaacttctccattgcccacaacgcgcgcaaccttacgccagcgtaacctaacttgtcagaatggctcgattttgtcaacagccatcacgcaacgcacgtaaggacacggcccgcttatgcttgaccactacaccacgcctggcgaatccatcgaaatccgcgacaaccagaccatctactccctacttaccgatcgccttgcccgcaccggcgcggacacggtaatcgccgccaagaaaatcggccccggccgctggcagaacgtcaccaccggcgaattccacgagcgcgtggtctcggccgccaagggcctgatcgcgctcggcatcgccaagggcgacgcggtgaccatcttttcctccacccgtctggaatggggcattctcgatttcgcactggccgcggtgggcgcggtaagcgtgccgatctatgacaccgactccgccccgcaggcccagcgcatcatgaacgattcggtggtcaagctggcctttgccgacaatcgcgagcgcttcgaccggctcgactcggtcaaggaccactgccctgccttgaagcagattctcatgctcgagggcaacgcactgggcgcgctcgaaggtctgggcgtggctgtttcggacgaggaactgaacgagcgcgtggccaccgtgcgcgccgacgatctggccaccatcgtctacacctcgggctccaccggcaacccgaagggtgccgaactgacccacaagaacttcgtgtccatcaccatcaccgcttcgcaggcgcttcatgaagtggtgcttgacgaccatccacgcctgctgctcttcctgccgctggcccactgcttcgcgcgattcatccagtacgcctccatcgcctccgacgacggcgtggtcggctacctgccggacaccaagtcgctgctgccggatctgcgttccgttgagccgacctacctgctgggtgtgccgcgtgtgttcgagaaggtgtacaacgccgcctcgcataaggccggtgccggctggaagggccgcctgtttgtcaaagccgccgaggccgcgcgcgtctggagccgcaaggagcaggccggcgagcagcacacatttgccgaaatcaccgagcgcgccaagtacgaaacgctcgtctaccgcacggtgcgcggcgctctgggcccgaagatcaagtacgtggcctgcggcggcgcaccactttcgcttgatctggcgcatttctacaacggcatcggactgccgatgatccagggctacggcatgaccgaaaccgccgccccattcgccgccacacgcgtgaccgacaatgtgatcggcaccgtaggccagcccgcgcccggctcctcgattcgcatttccgacgaaggcgaactgcaggtcaagggcccgaacgtgttccgcggctaccacaatctgccggagaaaacggccgaggcgttcaccgccgacggctggctcaggaccggcgacttggccgagatcgatgacgagggccgcatcatcatcaccggtcgaatcaaggacattattattaccgccggcggcaagaacgtctcccccattccgctggaggaggagatcgtcaagtgcccgatcgtggagcactgcgtggtggtgggcgaccagcgcccgttcatcggcgcgctggtgacgctcgacccggagtcgctggccatctggctgcccgcacacggactgtccacggagacgccggtcgaccggctcgccacgaacgccgcggtgcgcgaggagatccagcagtacgtggacaaggcgaatgcgacggtctcgcgtgccgaatccgtgcgcaagttcgccgtgctgggcacgcagttcacgcaggagaacaagtgcctgacgccgtcgctgaaggtagtgcgcccggccgtcaaccgcgtgttcgccgatgtgatcgacaacgagatctacaacggcaagcggtgaaacgcgcggttcgtaatccgacacaaaaaagggccttttgaaccgcacctccgatcatcgaatctgtattactccagtccaacaatcggggtgcggttcaacctcgccgggcacttcatcattcatcactggcatggttccattatcacgcacattatggcgcagagcgaatacggcaccccggcaacgcgagtgggtcgccggggtgccggagcgcgggggtgccagaatgccgaagggccgggataccggagtgcccggtcgcgggggtgccagaatgccgaagcggtgtatgggtgccgcccggcccaggtgggtcacgcccgggtcagtttcttgctcctgagacgcagcacgacatcggcggagtcggcgacacgcttggaatgcgtcaccacgattacgcatttgccgagctgatgggcggcatgctgcagcagatgaatcacctcgtcggtcatctccgggtcgaggctgcccgtcggctcgtccgcgaggatcgcgcggcccggggcgaccagcgcgcggccgaccgccacccgttgacgctggccgcccgacaggtgcatgatgttgcgcttggattcctcacggctcaaacccagttcctcgaggatcttcatatcggccttggtgctgaccagccgcaggttctcttcgggggtgaggtagtcgatcaggttatggtcctggaacaccagggacacgtgctcccgacggtgcttcgcatagcccgatgcggcgatgtcctccccctcgaagcggaccactccccgggagggggcgtccaggccggccagcagagacagcagcgtgctcttgccggcgccggacgggccggtgatcgcatacatcttcccggattcgaaatccgcgctgacatccgagagaacaaggatcttcgccgcgccgtaggcgtaatcgacatggtccagttgcagacagttagacatgattggtgactcctaacgcatagaggaaagaatggatttcggggatttggacagtacggcggcgcatgacacggcaagggccacggcgatgaccgcgcatccgagcagcaggatgagcaccgtctgctcaggcggcaaggcctccacgtgcaacgattccaacggcgcgacgcccgaatcgcgcaacagtcgggaagacacgtatcccgacagcatggcgccggtgcccagcgaacacagggcggcgaccgccgccatgagtccggtttcgatggcgagttgtgcgacgatccgcatcttgtcgatgccgagggccagaagcgtgcctatctcatggatgcgtgagcgaatccagaagaccagcgccatcgccagcaccagtacgtccgcgaggcagacggacagcagcaccatgcgcaccagatcacgcaccgtctgcacggattgcaggacgccggagagccgggccgaatcgtcggtgacgtcgtacttgccaccggccatggtcttggcctgactgaccgccgcggacaggtcctgcggattatccgacaggcatcggatcatgccgatccggtcgtttccggtcagagcggaggtcactcgcctgcccgaatagatgaggttctcggaagtgtccgagggcagggggctttgggcctgcacgttgccggagaagatcccggccacacgcaccgtggcgttgcgcccctcctgccggagacggaatgtcgagccgatcgataggccgttctgcagcgcgaagtcgcggtggaccagcacatcgtcgccgtcgcccgagatatggcggccctgctccaggcggtacaggccgctctggaattcctctgacaatgaggaatcggtggtgcccagcacgctgacctgcatggccagatcggagtccagccgggggccctgccggggcatgaccgggcgcgcgccatccacctgcgccaaggtcttcgtcgcataggcggtcttcgtcacaccggggatacgcgagaaccggctcgcctcctcggcgctgatgggattctcgccggcgctgacggtaaaccctatgcccatgcccgcgccgatgctgtcggacatggtacgcagggccgtcgagactccgacctgcgccaccaggctcgtgaagaccatcagcatcagcagaccgatgatgccgctgcgtaccggcttgcgtacgatcgccaacgtggcacgcttccacacattcatgctcatcatcgaatctccgacaggtctcgcggcgatttgcgcagcatcggcatgcacgccaccgcgacgcacaccagcatcaccgccaacaatccgagcgccacgtacagcatggcggtcccgtcgaccgacaccgtgagcgaatccagggtgcgcaccgacatgctggattcaagatcgccgccgacctgccccatgctgctcagctccttcgccgcggaggcgttcacggaatggagcgccgtggcgccgagccattgggccattccctgcgcgcacagccagccgagggcgagggacggcagaccgatcagcaccatctcggtgaggtattgggcgaccagggagggcttgccgacgccaagggacaccagtatgcccatctcctgacggcggtcgttcatccacagcagcagcatgagactgagcacgagcacggccgagacggtaacgccaatcagggcgccgcgcatcatggagcgcacgccgcgggcggcatgcagcatgctcgacgaatactggtcgttgcgcgtgatctgatagttgttccaatccaccgggagtttcttcgcggcgtccatggtcttctccacgtcaacgcccttggacagcacgaaggtggcgtcctggtatatttccttgccgtccttgtactggtacagatcgcgtgtggtatccagatcggtgtagatggtgttggcggtgagttccgctcggctggatacctttctggcgctgtcgcccttgaatatgcccacgatggtggtcttgacggtcgccgtcgaatgtgattcgttgtcggcgtcgtaggcgttggccttgagcgtgagcgtgtctccgactttgagcccgttggctttggcgagatcctcatggatcatcgacgtgtacttgtcggaggccttcagatgccgtccttcggccatgccgagcgtgcgcgacgtgaacacgttgagtttcgacgaatcattcgtgcctatgacgttggcggcgttgccgaattgctgctccttggtcgcatcgtaatcatcgccgccggggaccttcgccacattcgcccccacgagatcagcggtggcgttctgacggaccatatacgaatcgaccccgggcagttgggcgatcctgcgcacgtcggcgggacgcaccatgccacctccgcgaggcgtgagcatgctgccctgcaggttgctggccagcacgaacccgccgaccgcttccttctcgattcgtccggcggcctgttgagctgcccgagaaaccgcgatcgtggatagcatgctcgccgttatgatggtcaatactataaggagcactatggttcgtactcgttttctgagcacatagcgcaccgaccgtgcaacgaacgtcatcaatacctcctgtgggccttgggcttttcgcccaaaatgcgaaacatgccgcgtttcgccggttagttagccgcgacaatacatgatgcacctcaagatacgggaagagatacgccttgggcgaaaaacggaacagcggcaaatgtcgtttattctggattttggtccgtctcgggccgcgtcgatgcgtcggcccgagaggaatcagcgctcgcgcctcaccttcgaggcggcgaacacgaggagcggcagagcggcgaacgcatagttctcgcattggatgtacaggtatgcgaccaggacgagccagcagatgacggtcttgtgccagacgccggattcgcccgaacccgcgtcggcaacgccatcaccactattgcccccggcaacatcagtaacgtcggcaacgtcggtgacacaaacaccgtgcgccagcccgtcggacgatgcgccatccgcacctccacggcataccgtcctcccgcgcgtcatgcagaccatcgaggctccgaccagcatggccagcccgatcagcccgtattcggcgatgacgctggtatacgcgcacatcgtccacaccgtgtccgcgttcacgccggccgcg

SEQ ID NO: 3889 - DNA, 3135 bp, Unknown
  R22_24m  MAG No. k141_6634
gtccgaggccgacgaattggtccgcatcaccggtgccgtcaagacattgattccggccggtgccatattgtccatcgacaccacgcgcgcatccgtggccgccgctgcgctgagcgagggcgcccagatcatcaacgacgtttccggtggcacgctggatgccgaactgccgcatgtggtcgccgaccacgactgcctgtacatcgtgcagcattggcgcggttggctcgccggctccaagggcgcgaaccccgatcaggacacctccgtctacgagcacggtgtattgaccgacgtacacgacgaactcatgcgccaagtcgacggtgtgctggccgccggcgtaaagcctgagcgcattatcatcgacccgggcctgggtttctccaagcccggcatcgagcacaacctgccgctgctgaccggactcgagaccttccgcgccactggatatccggtgctgatcggccagtcccgtaaacgcttcatctcggcgatgcttaccgaggcgggcgctgccggtgctgatgggccgatcatggcccagcgcgatgacgtgaccgcagccttgtccgccctgtccgccgaacatggcgcatgggccgtgcgcgtacacgacgtggccaaaagccgcgccgccgtcatcgccggcaacacctggcgcgaatacgcatgattcccctggctccgttttttggttgcttctaggtcttggctcccctcggacgaggggagctggcgccgaaggcgactgaggggagcatttgagcagaaagccttaccaatggacaccatcactcttaccggcgtacatgccaacggcacccacggtgtgctcgccttcgaacacgaacggccacaaaccttcgtcgtggatgtcaccctgcaccttgatctggccgcagccggtcaatccgacgatctcaacgacaccatcgattacggccgtgtggccaaggacatcacggctgtcatcgaaggccctcatgtggacctgatcgagcgtctggcccaacgtatcgcggacgagatccttgccgatgcgccggccgtcgcctccatcgacgtcaccgtgcacaagcctcacgcacccatcgtcgtggcttttgcagatgtatcggtctccatctcgcgcgtgcgtgccaccgataatggacgtactgctgaagagcatgccatccataacgcggtggtggccttgggcggcaatgtgggcgaggtggaatccaccttgcgagccgccgttcgggagattgacgcgctgctcggcacacaggtgaccggtatttcgccgctttaccgcacggccgcgtggggcatggccgacggtacgccggatttcctgaacgccgtggtggagcttgaaaccacaatgggcagccacgaattgctcgccgcgttgcaaagcatcgaggcgaaccatgggcgaattcgtgagaatcattgggattccaggccgttggacttggacattatcgactttgatggcatcaccagcgcggatccggatctggcattgccccatccgcgtgcttggcagcgcgcgtttgtgctggctccctgggcggcgctgaatccgaacgccaaactcgccggagcccatgaggggcctgtagccgatttgctggccaccgcgccggaccgtaacgccgtgcagctcgagagcgaagactggatgctcggcgggcatgcagtcaagcaaaaatcagcgtcggagtcggcacccgtctcacgcaaggcgattatttcgctggattccacctcgcaggatgccgaacggctgttccgtgaaaccatcgtttccatcgacagtgttcctggcaatcaggtacagggcatctcgccgctctaccatgtcagccatttcgacggcccggacgcgatgagcgcggtcatccaaatcgaaaccaagttgccgcccgccgacctgattgccgtattgggcagcatcgaaagtgttcatgatctggcagtcgaccttgaccttgtcgacatggaaggcgtgacttccgacgagcccaactgcagcattccttggccgtcggcccgtaaccatgcgtcggtattggcaccttggctggatatggacccgaatgcttctctgggcggcgacccggtggccttccttttggccatggcaccggatgccggacaggtcggattgctatcggacaactggatactgtcgaacagttgagctgatggcagaaccagttacgaacggtaggctagaaaccagacggtgacggaccagtctccggcctcgaacagccgggcacggcagtgacgaaaaccaaatcaagatgaacagcccaggcgcgagggccgttcgcaaacagcaaacagcaacgcaacgataaggaggccggacatgaaaacacggcgaacaccatggtggcagtatgtgatcggtgccgtgctgggcctgttggcgggtatcggtctggcctcctacggcgaaagctcgggactgtcgctgattggtgcgccttggattgtgaccggattgctggccgtgctgggcgttatcgtgctgatcttggccctgcaagtgcataaatacgcgaataccgaccccaagaagcgtccgcatagcttcatcaatcccactatcgcggtgtatacgctggtgctggcaaaggcactgggattggcgggcgcaacgctcgccggctggtatggcggtcagattgtgatgagcctgagccatatcgaggcggatttctatgcacacgccgtcaccgagtgcgcaatcgtggccgtggtgtgcatcgccgacatgatcatcggcattatcggcgaatggttgtgccagctaccgccgaacgaaggccccgaaaacccgaaaatcaaggaagccaagcgccgtagcgacatagcccaagcctacaagcgataatccgtgataagccccctctggcgaggggccgtaggcgtagccgactgggggagagaagaaaaaaccacaccatcggccaagccgattcccactactcctgcggcacgcgaaccatagcttcctgagcgatggccgccaccaagtcgccattctgcgcatacactttggcgatgccgagtccgcgtccgtgcgcggcgataggcgtatcctgcacatataaatgccattcgttgata

SEQ ID NO: 3890 - DNA, 45326 bp, Unknown
  R22_24m  MAG No. k141_6639
taaccaaggccggactggtggaatcgaacacctatcatgcgcagggcggcatcgccgcggccatcttctccgacgacgacccgaagctgcacgccgccgacaccatggccgcgggccacggcctgtgcgacccgaaggctgtggacatcctcacccgtgagggtgcggagcgcgtccgcgagttcgccgcggccggcgtccacttcgaccgcgacgcgcagggacgcatgctgcgcggcctggaagcggctcattcgcgtgcccgcgtggtgcatgccgggggagatgccaccggcaaagtgctcgaactggacgtctccgccatggtgcgcaagaacccgcgcatccacatcatcgagaacgccttcctcaaagacctcatcgtgcgggacggccacatcgccggcgtccgcctgctgatcgacgggcaggacaaggatctggccgccggccgggtgatcttggccaccggtggcgcgggtcgtatgtacccatacaccaccaatccgccggtcgccaccgcggacggcctcgccgtcgcatggcgtgccggtgcccaggtcgccgatctggagttctaccagttccatcccaccgccatggccgtgggcgagcacttcctcgtctccgaagccgtgcgcggcgaaggcgcggtgctgctggacgaacacggccaccggtatatgaaggacatcgatccgcgcgccgaactcgcaccgcgcgacgtcgtggcccgcgagaacttccgcgtgatgcaggcgcaaggcggcaagcccgtgatgctcgacgtgtcgccgatgacccgcgagaaccccgacctggccagcttcctggcccaccgattcccgaccatcgatgcctatacgcgttcgcttggcttcgactggagcaaggagccgatcccggtggcgcccgccgcgcactactacatgggaggcattcgcaccgatctggacgcccggacctccattcccggcctgtacgcggccggcgaatgcgctcgtaccggtgtcatgggctccaaccgccttgcctccaactcgctgctcgaaggacttgtctacggacgccgcgccggtcttgccgccgtcgcggacggtgacgacgcggtctgggcacccgaaccgttcctgaactccgccaccggtgccgtgttcgaccatgcgccgatcgcgctggccgctcctgccactacggctgctgctgacgataccgccgccgacaaggtctgggaccgtacccgcatccagaacaccatgtggcatggcgtcggcgtgctgcgcgacgaggccggactgaaaaccgccatcgccgaactcggccaaggcctcgccgccgcaaacgcccaggctgatgtaaacgccgatggcgctgcaagcagcgttgaggctttggagaaccgcaacatgctcaccgtaggctatgtggccgccaccgccgcgctcgcccgcaccgagtcgagaggcgcccacgcccgcaccgactacagcgagccagtcgacaactgggcccactccgtcgcctacatcaaggactgacccatgctcacatcacacatcatccgcaccgccgtcgaagcggcgctcgccgaagacgcgccctacggcgacatcacctgcgagaccaccatccccgcggacgaaaccggctcggcccacctcaccgcgcgcgaaaacggtgtgatgagcggcatcgacgtgttcgccgcagccttcgccgcacagaacccggccgtcaccgtcaccgtcaccgtcaaggacggtgagcgattccagcgcggccagatactcgccaccgtggaaggcccggtacgcgacctgctcaccgccgagcgcatcgccctcaacttcacccagcgcatgagcggcatcgccaccatgaccgccgccttcgtggacgcggtgaacgccatctacggcgacgactatgacggacccgtcacccggccacgccgctacgagcgcacccgcatcgtcgatacgcgcaaaaccacgcccggcctgcgcccgttcgagaaatatggcgtggtctgtggcggtggccacaaccatcgctacggactgtccgacgcggtcatgatgaaggacaaccatctggcggcgctcgccgcgcgcggcatcgacctggccggcgcgatccgccacgtgcgcgaacaggtgggccacaccacgcatatcgaagtggaagtcgaccgccttgaccagattcccgccgtgctcgccggcggagcggacaccatcatgctggacaatttctcgctcgacgacacccgtcgcggcgtggagctcatcgacggcaaggccatcgtggaagccagcggcaacatgagcctggagcgagtgccagccgtggccgccaccggcgtggacgtgatctccgtgggcgcgctcacccactcggtgcgcagcatcgaccttggattggattggaactagtcatggccgatacccccaacgcatccggtgaacccggtgaactgtacctggacgccgccgccaccgaaccagtgagcccggcagtcatcgaggccatgaccccgttcctgactgaggcctacgccaatccggccagtgtgcaccagcccggtaaaaccgcggcccgcgcgctggacgcggcccgcgcatcattcgccgcggcgttgggcgcccggccggatgacgtgatcttcacctcaggcggcaccgaatcggacaatctggccatcaaaggcatcgccatggcgcgcatgcgcaaactgggcctgcggccggtctacggactcgacgaaaccgatggcaaacaactggcaagcagccgcccgcgcattatcatttccgctatcgagcacccggccgtggcccaatcggcggcatggctgcacgaatggttcggcttcgaagtcgtgcgcattcccgtggatgcgcaggcgcatctcgatcttgacgcgctcgaacgcgagcttgacggcgaggccggcgaacgtaccacgctggtctccaccatgctggccaacaacgaggtcggcaccgtggaacccgtggaggaactggtccgcatcgcccacgcgcacggcgtgcccatccatgtggacgccgtacaggccgccggccagattccgattcgttttcgtgactgggatgtggacgccctgtccgtatccggacacaaattcggcacgcccaaaggactgggcgcactgctggtacgcggccgcacacccatcgaaccggtgctgtccggcggagggcaggaacgcggcctgcgctccggcacacagaacgtggccggcgccgtggcgcttgccatcggactcaacgaatcgaatgcgcgcatgcaggtgcagtgccgtgagttggtcgcgtcccgagacacgctcatcgacgcggttcgccgggtcgcgcctcgcgccgacctgaccggcgaccccgaacgccgtctgcccggtcacgcctccttcatcttccccggcgtcaccggggaagcgctgctcgtcgacctggacgcgcgtggcatcgctgcctcatccggctcggcctgcgccatcgggcgccacgagattcctgccacgttgctggcgatgggcctcgaaccgtccatcgccaaatcggcattacgcatgaccttccgcaagccgctgacccgcgaacaagtcgaacgcatcagcttggccatcgaagagtcctacaccgacctgacccgacactaaatctgacgccacttaccagaaaggaaacgccgtgagcaccaccactccagcgcaacccgcgcagctcacccgcaacgagcgcctcgaccggctgcccttcaacaaggcgcaccgtaaactcctcgtcgcctccggcatcggctgggcattcgacgccatggacgtcggcctcgtttccttcgtggtcgccgccatcgcagccgacccgcacttcaacctcaccccgaccgaaaagtcgtgggtgctgtccatcggcttcgtcggcatggccatcggcgcggcggtgggcggcttcatcgccgaccgcgtgggccgcaaaaccgtgttcaccgccacgctgatcatcttcggcatcgccaacggcgccatggcgctgtcctggtcgctcggcatgctgctcggcgcccgactgatcatcggactgggcttgggcgcggaactaccggtcgcctccacgctggtctccgagttttcgccgaccaaacagcgcggccgcatgaccgtgctgctggaatcgttctgggccgtcggctggatcatcgccgccataatcggctacttcgtgatcccgaacaccggtgactggggctggcgctgggcgctggccatcggcgcgctgccactgctctacgcgatcgtcacccgtgtgcacatcccagaatccgtgcgattcctcgaagccaagggtcgcgaagacgaagccgaaaaggccgtgcgctacttcgaggaagccgggggagtggccccggtaacctctcccaagggcaagccgctgccgaagatcaagacgcgcgagctgttcggctccaagtacctggcccgcaccatcgccatctgggccacgtggttcttcgtgaacttctcctactacggcgcgttcacatggatgccgtcgctgctcgccgaccagttcggctccctgaccaagtcattcggctacacgctcgccatctccatcgcccagctgcccggttacttcctggccgcctggctggtggaggtctggggccgccgcaagacgctgagcatcttcctggccgtctccgccgtggccgccttcgcgttctcgcaggccggatcagcggccctcgtgctcgtgttcggcatgctgctgtccgcctccaacctcggtgcgtggggcgtgttgtacgccgtgaccccggaaatctacccgacccgcctgcgtggcgtggccgccggtgccgccgccgcggtgggccgcatcgccgccatcatcgcgccgctcctcatgccgtggttcctgaccctgtccggcggcaacaaggccgtggccttcatcatcttcgccgccgccttcatcctcgcctgcatagcagccctctgcttgcccgagcgcaaaggcctcaatctcgaagactgattacacttcagccttcgctactaaagtggcccacaccaatgtgtgggccactttttgtcttatagctcccgaatgacacggcaagggttgccgtatgtcactgatcaatcgagggaacgacgggtgagattgcgcggtggttttgtgaccagccacgccaccagcagtccggttaccactacgccgaatgccagcgccgcctgcaatccccagatcggcacggtttccagccaatgaccgtccacaccgatcctgcggttccatgccacatgcagccatcccaacgccacgccggataccacgcccactggcgcgccggccagcagaatcaccgcagcctgcgtcaggccgtaacgtctgaggaatcggggtggcgcgcccacggcgaccatcgtggccatgtcgcgctgggcctgcgtgcgggccagcagcagtgaaacgagcgtggccatcagtgccagcaatgccaacaggccaatgggcaccaatgccatattgtcaccccacggcaggcgattcccgtcagtgctcgtggatgccagcggcagattttcgattgcataagctgaggccttctttacggtaacgggggagttgccaccggcgaagtctagatactcacccagatactgcaattgtttgatgccgagcgcctgtgctgttgccgggctcatcaccagcgggtacgcgccgcgcacgtagatggccttgcgcttctcgatatgtgtggcctgagattcgtttgcaattgccggattcggcgaaatggccacacgcaccatacctcccgcgtcgattgtgccggcatcgccgaccaccacaccgcccgcatcaagcacctgtgccgcctcatccgcgttcgggaagccggacaaacgcatcgcattgccatccataatgagattcacgccgcggaaactcggcagtatattcgaatacgttggctgatgggatcggtctatcggcacacaacgtatcggaacgtttgggtacagggccgaagcggcatcctggcccacccatgtggacgtgtccggttgctcttggatcgttgggttatcacaagtgtgaccggccgggagcaatgcagcggcatacatgtagccgtgttcggcgttcaacttgtcggaatcgacttcggtcgtatcattgagctttgaccatcgcttgacatcctcggtgtacaccgggtaatgagcgcgtatcggcgtctctttgccaagccggtgtatcgcatccgacaccacagcacggtcgaactcattgctgacatgcacgtcggccccaatggccatccccgacggtccatacgtcatcgtcatcgtggaatttcgctggtccgccaccatggagccggtgattaccagtgtgtacgaggcgatgcacatggtaatcagcaccgcgcatgccgccggaacgaaccgtcgatgatgctcggctgcatccctgagtgccaggcgtgcgccgatgttcagttgggaacccgctttgccgcaccaccgtgcaaaagtgcgaatcgacaacgcaagccctatgacagccaacaaaatcgtggcaacaagcagagccatatgcgtttcggttccggccggaaccgcgcccggattgtgatcggccagcgtgggcaatggcaatgtcagactgagcgcggcgcatacgatggagaccaagaccagaatcggaccaaccgcaacacggagcagtctcaaaggattacggcgaagcttcgtatccacgccattcgcggattcaccgtagccgatttcctctcttgtcgggcaatccttcaacgcatcgactggatgcatacgcgccacatgccgagccggcgcaatcgtcgcggcaaatccaatgatgattgccgtggcaatacccatcggcagcgagccccacgagaatccgtgcaggatctccagcggcgtggatccacgcaatgcgcctatcgcagggccggccgccaaggtaagcgcgaatcccaatgccgagcccagcacgccaccgatggcgccgataacgagaccttgcgaggaaatgattcgactgaggtcacgtggtgcagcaccggatgcggccgcgagcccaagcacacgacgtgactgatctgccgacaccgtaaacgcgggcgtgaccagaaacagtaccagcaacatacccaccagcatggtgatgaccacagtgaccatgtggttcaacatggtagccgcatcgatctgcatcgggtagagctgcgatgcgggcggatagccgtcagtcagtacatggcgggaaatgacgatggcctgcaacaggttcatgctgcgggtgtgcgcccacgtgaccggctctggaccgaccaccaaataatggccatccacaccgacgccatcagattccaatatggctgacatccagccttccaagccccatgccgcggcttcggattcatcggtcagcccgctgactgtccaagcacgctgagtgtcggccaccgcctcgccgatgcgcccgtccaggctcatccagccatcgaacggcggagcgacgaacgtcaccgtgctaccgagagaagcgccgagattatccgccaatgtgcggctgatgacaatctgcgtattattctgcggcgccgaacccttgaccagcttcggcaacattcgttgcaatgcctcaggtgaagcctcggtcatggtcgcggtggaggccgcgttcagatcaatgtcgttcccgcttttcacgtcgatcccagccttggtctgttcgccgggttgcaacgcggtgccggtgatggcgatgagttcgggcgactgccaatacgggagcagccgatcctgttgcggcagaatcttcgcaagctcggcggccgaggccggctgctgggagggatcgtcctgccacgtgccgccgctttcgggtgactgccggaacggttggccggtgcggggcctggcggtggcggtgatgaccgcctgcgtatcagccgggattgtcgccagcgcacgcgatctggtgggcggtatggtggtggtcataccgatggaggccaccattgcggcgattggcagcattaccagcagcaaggacagtagggtgcgggccttgtgccgtagtgcgtcgcgccagccgagtcgcagcgcggcccgataccggttgcaacgtgcgccaaggcttggcctagcggcatggggaatttgggcagagcgaccgacggtggcattggcaagattattgagggctgcgcgtgccatcatgctcccctttcctcaaggttgagcaaatcatccatattgctggagccggtttcatcgatgatacggccgtccttcaaaaacaccgtgcggtcggcccaggcggcgaagcgaggctcatgagtgaccagcagtacggccgcgccgcgatctgcgcgggtgcgcaacacttcgagaatcgtcatgccggcattggaatccagagctccggtcggctcgtcggccagtagtagacggcgtgggccgaccagtgcgcgggcaatcgccacacgttgcgcctggccgccggacatgtcttcaggtcggcgatcagccatatcggctacccccacttcattgagggattgcatcgcggcctcacgtgccttgcggggattccagccatccaattccaaggggaacgacacgttctcggctgcgctcagggaaggcagcagattgaaatcctgaaacacgtagcctatcgatttgcggcggatggccgcgcgttcggccactgacagtgtggccagatcgcggccttcgaccagcacgtgcccctgcgtgggcacatcgagcccgcccgcaagattgagcaaagtggatttgccggaaccactggggcccatgatggccacgaattcacccgggcgaagcgtgagattggcgtgactgagcgcggtgacacgacgtgcatctttgccgtgaacgcgagtgacgtcgtgtaattccagcgcgcatggggaggattgcgggagagaagaaagaacgggagaagtcatgatgtgctcctatgcactattgaatggtggcggtgagtgcggctgagcttgccgtgagaggtgccgaaacggggtgctgcgccagttgtgctcgcagctgggtctcatccacggtatcgagccagcgcaattccgcttcagtgatgaaaatatggtggtcgagtactagacgtgtggcgagttcggtgggcggtgtttgccggcgcagtcgggtgatgtcgtgcagcagttgctgcaaagcgtggcgttggtgttggatgagttcggaaacatcgaggccgggtatttccacggcgacggccagcttcatcaccagttcgtcgcgtccgcgttgttccggggtaataggggagcgccaccatcggtcaagctcttgggcgccggaattggtcaatcgccataatggtgcggccgctgcggtgccgacatcattggatccgctagtagtcggcgcggtctcttcaatcagtccgtcgcggttcaaccgctgcagtgtagtggaaacttgccccatattgagcggccaagtcagaccgatggtgcggtcgaagtccttcttaagctgataggcgctggccgggcctcgctccaacagtgctaatagcgcttctctgattgccataccgcatcccctttgcatagacggtttgccttgggcgaaggttactgagtaactatcgttggatatcaggttactcagtaactacccatgacggtgctgtactcagggatgattcaggggagattcaggggatacacttggcgcccctcagttgcccacggcgacagctcccctcagggaggggagtcgagagtgtggaatacaaaaagtctcgcaagccagatgacatgtgactaattctcagaaagccgggcccgttgtgtgtcaaggtgtgccagtaacatcgtgacggtttgtgtgtaggtacaggttgatatccaagagcaagtactcgagaacgcaagtaccgaacgattacgcaagaaaatcagtattaagagaggtttcgatggcggttcgtggagatatccgtaatgtggcgattgtggctcacgtcgatcacggcaagaccaccctggtcaatgccatgcttcagcagtcgcacgtgttttccgagcgtgaggaagtgccggatcgtgtgatggattccaacgatctggaacgcgagaagggcatcaccatcctcgccaagaacacggccgtggaatacaccggtccgctggccgccaagtacggccacccggagggcatcaccctcaacatcatcgacacccccggccacgccgacttcggcggcgaggtcgagcgcggcatctccatggtcgacggcgtcgtgctgctcgtggacgcctccgaaggcccgctgccgcagacccgcttcgtgctgcgcaaggccctcgaagccaagctgccggtcatcctgtgcgtgaacaaggtcgaccgccccgacgcccgtatcgaagaggtcgtcggcgaaacctccgacctgctgctcggcctggccgacgacgtgcagcacgagggcatcgacctgaaccttgaccagctgctggagatgccggtcatctactgcgccgccaaggccggctacgcctccgtgaaccagcccgccgacggtggcctgccggacaacgacaacctcgagccgctgttcgaggccatcatctccaccatcccggcccccgaatacgaggaaggcgccccgctgcaggctcacgtggccaacatcgactcctccgacttcctcggccgactcggtctggtccgtatctacaacggcacccttgagaagggcaagacctacggcctgtcccgtgtggacggctccctcgagaacttccgcgtctccgaactgctgcgcacgcagggcctcgagcgcaccccggtcgagtccgcgggccccggcgacatcgtggccgtcgccggcgtcaacgacatcatgatcggcgagaccatcgtcgaccccaacgacccgaagccgctgccgctcatccatgtggacgatccggccatctccatgaccttcggcaccaacgactccccgctggccggcaccgagggcaaggaccacaagctcaccgcccgcatgatcaaggaccgtctggaccgcgagctcatcggcaacgtgtccatcaaggtgctgcccaccgaccgccccgacgcttgggaagtccagggccgtggcgagctggcgctggccgtgctcgccgagcagatgcgccgcgaaggctacgagctgaccgtcggccgcccgcaggtggtcaccaagaagatcgacggtgtggtcaacgagccgatggaaaacaccaccatcgacgtgccggaagagtacatgggtaccgtcacccagctcatggccgaccgtaagggccgtatggacggcatgaccaaccacggctccggttgggtccgcctgcagttcaccgtgccgtcccgtggtctgatcggcttccgcacggctctgctgtccgccactcgcggcaccggcatttcctcctccatctccgctggctatgctccgtgggctggtgccatcaccattcgtcagaacggttccatggtttccgatcgtcagggtgtggccactccgtatgccatgcagcgtctgcaggcccgtggcaacttcttcgtcgaaccgcagtccccggtgtacgagggtcaggtcgtgggcgtgaacaacaagcccgacgagctggatgtgaacatcacgctggccaagcacatgaccaacatgcgttcctccaccgctgacgtgctcgaaaccctgaccccgccgatcaagatgagccttgaggagtccctggacttcgccaacgaggacgagtgcgtggaagtcaccccggagtccatccgcgtgcgcaagatcatcctcggccgtgaggactggtacaagtggcgcgccaagcagcgccgccagaacgccgcccagcagggcaagtgatcttccctttggctcccctcgacgaggggagccaagtcatatccccacctatactgaaacgcatgactgtgaagagcactgctgaattgcgtccgtggtcgtatcgccagaacgcgctggtcaaatcgttgatcacgattgcggcgggcgtggcgtccgcctttgtgggcacgttcgcccaccgtatgggtgcagaactgagtattccgtatggtctggtgctggcatttctgctgatcggcctatcgacatggtgcgcccgttcgcgcatgggtgcggtcggactggccctgcacctcatcgcctcctcgctgaccgcatggggcatggcactgaccaccacatccggcaaggcggtcatcgtcgccggattccaaggcgacatgccgttcttctcccagcatgccggctacatctggctgtacggcctgatgctggtccaagtcgtcctgctcattcttcccgcccgctggttcgttattcccactcattctgaatcgcgcgcgtaactatatatggcggcacatttccgcgaatgcgtcgcgtatcggcgggcgtaggggattacggccgctaccatagaaccttatggcacgcatgaaactgttttacttgggcccggaaggcaccttcacccatcaggcggcaatgacggccgccgaccagttcgccacactcggcgacttcgacctcaccgccctgcccgacgtgcccgcgatcatgcaggccgtacagtcgcgccaaggctggggcgtcatcgcatgggaaaacaacgtcgaaggctatgtggtcccgaatctcgacgcgctgatcgacgcccccgacgcggccggcttcgcccggatcagtgtggacgtggccttcaacgccttcaccgtgcgcggccacagcatctgcgactgcaccggcaaccccgtcagcgcccacccgcacggcctggcccaatgcacccggttcatcgccgaacaccatttgcagcccgaacccgcatcctccaacgccgccgcctgccgcgacctgaagcccggccgcgtggcgctcggccccagcatctgcggcgaactctacgatctcgacaccctcgccgaacatgtgcaggatttcgatggcgcgcacaccgaattccttgtcatcgccccgcgtgatgtggtccaggaattcaacgcccgcgcccaccgcaatgacgccggcgacttcgaaaccatcatcaccttcatcccgctggtcaccggccccggcgtgctcgccgacctgctggacgtcctgcgtgatgcggggctgaacatgaccagcttcatctcgcgcccgatcaaaggccacgacggaacctacagcttcatcgccacccttgacgccgccccctgggagccaagattccgcaccgcactggaagagatcgccggacacggcgactgggcaaaaaccctggccgtctacccacgccgcgaacgcccgaacccgccggtcgacgcctggatgctgcccgagggcggcgtccacatcaccaatcgcgcgtcggaaggctggcagtacgccgagggagcaaggaaggaactgctgtggtagacacagtcggaatcgtcggactcggattgattggcggctcgctcgcacgccgcctgaccgagcgcggcgtacgcgtcatcgcgtggaaccatcgctcgcacccctacgcccaggccgaagccgatggcattttctgcaagagcacgctctccgaactcatggatgccgagccggatgtggtcgtgctgtgcaatccgctcaaggcgatgccctcaatcctcgccgccctagccccgcttatgggcgaccatccgaacaccacgctcaccgacgtgggctcagtcaagggcatggtccgcgatcaggtcaaggctgccgcgctggggaagtgctacgtcggcgcccatccgatggccggcaacgaactgtccggctggcaggccgccgacccgcatctgtacgacggtgccctatgggccatcaccgtggacgagtccacggactaccgccgcttcctcgacgtcgccacgatgatcaccaaggacgtcggcaaccgcgtcatcgtcgtggacgacgaaacgcatgacaaggccgcggcgatgatctcccacatgccgcatgtggtgtccaccgcgctgatcaacgaactggttgccaacccggaccgcaacatcgccgccgcgctggctgccggctgctggagggacatgacccgcgtgtccctgaccgacccggaccgcacgcgcgcgatggtcgaggaagactcgctgaacgtcgaagtgctgctgcgccgcatggcggcacgtctgaccgatatggccgaccaactgcacgctggtgccgacggcgagcaggatgtgatgggattcttcgccgaaggcgaccccttccgccggtacaaggccgccgtgacgcgagccggcatcaccgctgcacaagctggtacggccaccgcgcagcaagccggcacaactgccgccggattcccggaacgcgagctcgccgtccccgaagccggctggcagcagaccttgctgttctccgcacgccggggagaagccatcaccggtttcatccatccgcgtcaggccatcgtccaactgcgccccgccatgtaactgcgccccgccatgcagcccgtgtgcaggttcccctcgccgcccgtcacgaagaaggctgcgcgagggggatgaagttcccgcttgttttcgtgagaagaccgtgtggctccgctgttcgaaagacccaaaggagtaaggtagtctgtaccgtttttcgggaaacgcatagaagttgatgcggcggatggttaaggggatgatgacgtatgacgttaccaaggcagattccggccggtgcccgcgtggtggtgcgcatcaccgacggcattgacccggtcgaccaccgtatgaagttccgcgactatgtgggtcacgtggtttcctgggacggatacacgttggagatggtgcgtgacgccgccgccaatggttcgcgcccggcccagaacgtgaccatccatcaggaacagattgccacattgaaacccgtgccggagcggcgtaacacgccaccccggccgtaacccaaggccataaagaattcggaggagaacgagagtgtcatctacgcagttcgacggcgatatcgactccttcgtctcctatctgaagtccaaccgcggcctgtcagcgaatacgctcaaagcgtatcgcgcggatctcacggcatgcctgcatctgttcgagctgcgcggcgtgaccgatctgaacgagatcacgctggatgatctgcgcagctggatggcggtggaatcgcgcgatcacgcccgcagcagcatggcccgcaaaaccgtggccgtgcgcgggttcttcgcgtgggcctatgagcatgggctgaccaccaccgacccggccgccacactgatgactccctcgattcccagcacgctgcccgcggtgctcaccgaatcccaggccgagcaattattggatgtcgctgaacatgccgttgcaacaaaccagtacaaggacgatgggggagcggcagccgcgtccggcagcggcaagacagctgataagtcggccgataccgtaaaccgcagtgaggcacccgcccgtgcagacaagcgcgacaacgcccgagtcaccgccgaatcgcagcgcaacgccgcgattctcgaactgctgtatgccaccggcatccgtgtcgccgaactggtgtcgatggatatcgccgacatcgacttctccactcgcaccatcaaagtcaccggcaaaggcaacaagcaacgcgtggtgccgttcggactacccgcccagcgtgcgctggagacttggctggaacaggggcggccggtactggcccgtacggcaacggatgcagtcaagtcccgtgctgccaacgccctgttcctcggcgcacgaggcggccgtatcgaccaacgcatagcccgtgacatcgtgcacagagcggcccgagaggccggcgtgccggacatcagcccccatgcgttgcgtcattccgccgccacgcacatactggacggcggtgccgatttgagggaggtgcaggagatgctcgggcattcctccttgaaaactacacaacgctatacgcacgtctccatcgagcagctcaagaaccgttacggacaggcctttccgcgggcgtgaccactatgtggacattggttaacaaactcagcaaagactgaacctagccggcaagaacccctgaattttacatgggtgtaacaaaaaatacactgcttgtctcccaagtgcgcaaaaatgacaggtaatcagcaacggggttggattgttcgagacatcgtgagatgcaagtctcacggtgacggggaatccagccccgtttgcatgaggcggggctgagacgtcctgcaacctaatgaataggagaaatcatatgaagaagaaagctcttgctttcgctgccatggcttgctccgtggccatgctgctgagcgcctgcggcggctctaacagcaacgctgcctccggtaacaccgctggctccaacatcatcactgcgtacaactccgaaccgcagaacccgctgatcccgggcaacaccaacgaaaccggcggcggcaagccggtcgacctgctgttctcccgtctggtctccttcgacaaggacggcaaggcttccaacgaagtggccgagtccatcaccccgaacgatgacgccacccagtacaccatcaagatcaagtctggctggaagttcaccgacggcactccggtgaccgctgagtccttcaccaaggcctggtcctacgtggccaacgccaagaacgcccagaagtgctcctccttcttctccaccatcgccggctatgacgatctgcagaaggatggcctcaagggtgacgagcagctctccggcctcaaggtcgtggacgacaccaccttcaccgtcgacctgagccagtccgactccgtgttcccgattaaggtcggctactcggccttcgccccgctgcccgagtccttctacaaggatccgaaggccttcggcgagaagcctgtctccaacggcccgtacaagctggaccactgggatcacaacaaggaaatcgccctcgtcaagaaccctgactacaagggtaacgagcagcccaagaacgacggcgtgaccttcaaggtctacaccgacgactccgccgcttaccgtgacattcaggccggcaacctcgacgtgatggaatccgtcccggccgccttcaccaagaccttcaagaccgacaagaaggttcaggcttactccgaggtcggctccgtcatccagaccttcaccatcccgtcctcccttgatcacttcaagaacgacgaggaaggtcagctgcgtcgtcaggccatctccatggccatcaaccgtgaccagctcatcgacaaggtgctcaacggcaacgccgccgccgccaccgagttcacctccccgaagaccccgggctactccgactccctcaagggtgccgacaacctgaagttcaacgcctccaaggccaaggaactgtgggccaaggctgacgccatctccaagtacgacggccagctcaccttctcctacaacgccgatggtggtgccaagccgctttacgacgccgtcgtgaaccagctcaagaacaacttgggcatcgacgcggccaccaacccgatcccgaccttccaggagttccgtgacgccgtcaccaaccgtcagatgaagggcgccttccgtaccggctggcagcctgactacccgtccgccgagaactacctgtggcagctatactccaccgctgctgctgacggcaacggctccaacgacggtgactacaagaacccggccttcgacgacatgtgcaagcaggccgctgccgtttccagcaccgatgacgccaacaagctgtaccagcaggctgaggaaatcctcctcaacgaccttccggccatcccgctgtactactccaacgcctccggtgtggcttccctcaacgtgaagtccggctacgccttcgattggcagaacctcccgacctacaccgagatgtccaagaagtgagtctgactcactgaacggataccgttaggtagttcggaaataaagggcgaggatcgcaagatccccgccctttttgttgtgtgaggggtgcttgctcacgccatcgggaaccaagttaaagtatccactatccgaccgcaaccatggacatatccaccagcattgcccaatctcaaaccttgcgttaacgcaaatttacatatcacagtccgggcatgcggtaaactgtcggagtatttatcgaccggcgggggcgtactataccctttctggccggtctaggaaataaggagcaaccgtatgggtaagtatcttctgcgacgcattctgcagatgattcccgtggttctcggtacgactcttctggtatatgcccttgtattcgccctgccgggcgaccccgtcaaggccatgttcggagacaagcctgtcaatgaggccgtcgcagcccagatccgcgcagaataccatctcgaccagccgttcatcgttcagtacttcatctacctgaagaatgcactgaccctgaacttcggcgataccttcgccggccagcccgttctcgacgaaatcacccgcgccttcccggtcaccatcaggctcggcttgatggcgttcgtgttcgaggcgattttcggtgtggtcttcggcattatctcgggcctcaagaagggcaagtggtacgacaccgttatcctgatcgtctctctgctgcttatttccgtgccgaccttcgtcaccggcttcgtcatgcaatatgtctttggtattcagtgggcgatattgccggtgacggcaggcgccgaccccggcttccttgatctgctcatgccggccatggtgctcggttcggtgtcgatggcctatatcatccgactgacccgctccgaaatctcctccaacatcgccgaggattacgtgcgcaccgcacgtgccaaaggtatgtcgaacggtcaggtcatgctgcgccacgtgttacgtaactccctgattccagtcgtcacttacctcggccaggacatcggcgccctgatgggtggtgccatgatcaccgagcagatcttcaacatccacggcatcggcttcctcacctaccagtccattctgaagggcgaggcaaacctggtggtgtccatcgtcacgttgctcatgctgattttcgtagtgtgcaacctcgttgtcgacatgctgtacgcggccctcgatccgcgtatccgttacgcgtgatagggaggagtgagtcacatggcaaacgaaaccactgaaaacgagctcaaccagaccggcgagccaggaaccgaatacttcatggaaaccctgcccggtcaggaccgttacgtagctcctctcgacgagaccccgttgcaggacgtcgattccgtcgacgaatccgcaccggccaccagcatgtgggccgacgcatggcgaaccctgcgccgcaacccgctgttcatcatctccggcttgctgatcctgttcatcatcgtggtggccatcgcccccggtctgttcaccaagcagaatccgaacgcctgcgatctgggcaactccttgagccccgcctccgccggacaccccttcggctacgacctgcagggctgcgacgtgtacacccgcgtggtctacggcacccgtacctcactgtccgtcggcgtgctctccacgctactggtcgtgatcgtcggcaccctgatcggcgccgtcgccggcttcttcggcggctgggtcgacgcggtgctgagccgcatcaccgacatcttcttcgcgctgcccatgctgctcggcgccatcgtggtgctccagatgttcaagacctccaagtccatctggaagatcgtgctggtgctgacgctcttcggctgggtcggcgtatgccgcatcgcccgaagcgccgtgctggaatcgaagaacctcgaattcaacaccgcttccacggccctcggctccacgcctgccagaaacctgttccgccacatcctgccgaactccctggccccgatcatcgtcatcgccaccacctcgctggcctcctacatcgtggccgaagccacgctgagcttcctcggcgtgggcctgcctaccaccacggtgagctggggcggcgacatctccagcgcgcagaccaacctgcagaccgatccgatggtgctgttctacccgtccgccgcactggccatcaccgtgcttgcgttcatcatgatgggcgacgccgtcaaggacgccctcgatccgaagagccgtacggcctgagcgaggggagtggagaaacattatgactgacaataccaacgccaagatgctggccatgcagaaagaacatggtccgctgctcgaggtcaaggatctggccatcgacttcaccaccgacaccggcaagccggtgcatgcggtgcgagacgccaacttcaccgtctatcccggccagtgggtggccatcgtgggtgaatccggatccggcaaatccacctccgccatggctgtgctgggtctgctgcccggcaccggtcacgtggtcaacggctccatcaagctcgacggcgaggaaatcgccggcgccaagcagagcgagttcgacaagctgcgcggcaccaagatgggtctcgtgcctcaggacccgatgagcaacctcaacccggtgtggcgtatcggatcccaggtcaaggaggcgctgaaggccaacaacatggacgtggcccacgagaagcgctccgccctcgccaaggccctggccggcgacgaggtcgaagtcaagggcaacgacgacgagaccttcctcggcaccaaggaactgcccgagctcatgaccgaggccaagaaggccctgaccgaagccggcgtgtccggcgaggccttcgacaaggccgtcgcccgcttcaccaacgaatgggttccgggctccgaaacccgttggcgcgtggccgacgacctcatcaaggccggtgtggccgatgatcaggcctggtacctcgccaagaagtacgtcatcggctccacaatggatgaccgcatcgcgggtctgctgtccgaggccggtctgcccgacgccgctacccgtgcccgtcagttcccgcacgagttctccggtggtatgcgccagcgtgcgctcatcgccatcggtctggcctgcagacccgacctactgatcgccgacgagccgacctccgccctcgacgtgaccgtgcagaagaagatcctcgaccatctgcacatgctcaccgactcgttgggcaccgccgtgctgttcatcacccacgatctgggtcttgccgccgagcgcgcccagcacattgtcgtgatgtacaagggtcaggtcgtcgaatccggtccgtccctcgaggtgctgcagcacccgcagcacccgtacaccaagcgactcgtggccgccgccccgtcgctggcctcccagcgcatcatctccgccaaggagcgcggtgagaacgcggacgccctgcttgaccaccacatcgccggcgaaagcacgcttgagaaaagcgagcacatcatcaccgtcgaccacctgaccaaggaattcaagctgccccgcaagaaggagatgttcaaggccgtcgacgacgtgtccttctccgtcaagcgcggcaccaccctggccatcgtgggcgaatccggttccggcaagtccaccgtggcgaacatggtgcttcacctgctgaagcccacttccggcaaagtgttctacgaaggacgcgacacctccacgttcaaggccaaggatctgctcggtttccgccgccatgtgcagccggtgttccagaacccgtacggttcgctcgacccgatgtactccatcttccgttccattgaggagccgctgcgaatccacaagattggcgataagaagtcgcgtgccaatcgtgtcaaggaactgctggacatggtcgagatgccggcttccgtgatgggtcgttacccgaacgagctttccggcggccagcgtcagcgcatcgccatcgcacgagccatggctctggatccggacgtcatcgtgtgcgatgaggccgtctccgccttggacgtgctggtgcaggatcaggtgctgcgtctgctcaacgacctgcaggccgagaagggcctgagctatctgttcatcacccacgatctggccgtggttcgccagatcgccgacgaggttgtggtgatgcagcacggcaagctcgtggagcacgccaccaccgacgaggtcttcgaccacccgcagaagcagtacacccgagacctgctcgacgccatccccggcggcaagctccaactcggtctggactgataatctgcgtttgagcgcattgtattgggttctttccatccgtggaaagaacccaatattcgtatgcgcaggtttgcatgatggttcgcgtgggacgaaaacgcaaaaatcggtgttttcccgatgttgtcccacaatttgtgggacaacatcaacatcaatcgatagacatgagtgttgtcccacagcagatttctcacgaagcccggaattacgccattcttagtgtggtcgatgattactcatgctgtgaggcgtgggacgacccgcgaaaatcgtcgattttcggatgttgtcccacggaatacgtcatacctcgtatgtgatcgtgagtggggcgtgatcggaccagcgtttgtcatacgtgggagccttgtcgatgacgaatccgcgtgcggtctccgccaactcgggcgtggcgaactggtagtcgattctccagccgacattgttgtcgaaggcgcgccctcgctggctccaccaggtgtacggcccctgaatatcaccggccaacgaacgcatcacatccacgaactcgtattcgtccagccatttgtccacgtaggcacgttcttcgggcaggaatccggcgtgcttctcattggccttggcgttcttgatatcaagcggcgtgtgcgcgatgttgaaatcgccgcagagcacggcctgtttgccgccatgcgcagcctcgtcccgcaacgcgcccatgcgcttcagcatcgtgtccagaaaacgatacttctgttccattttggtcggatcgtcagtgttgccggcatgcacatacacggatgccacggtgatcgtatagccctcaggcgttttgacatcggtttcgatccaacgccctgaatccacatcctcgctcagacctggcagaccatatcgcttgtcaagcacttccaagtcggtgagcagtccgactcccgcgcggcctttcacccggcagacctcgttcatggcatggaggttggccggtgcctcgattttgccggcggtggcgtattcgaaaccaaattcatcgaaaatagaatcgacatcgtcttgaggcgcgcgaacttcctgtatgcaccagacatccggcgcatgcttgccggcccaatcctcgatgcccttgcgtttggccgcacgaatgccgttgacgttagacgtggtaatggtgatggtcatgcggccatactattttggcctccctacgaatcgaaccggacaccggcggccgcgatgctcagctttctctaagcctgagtgctagtgttagcaaggttgcaaccgttatacgaaacgaggaatcatgggactgttcggattcggcaagaagaagagcaagaaggaagccgagccggccattgagcctgtcgatgaagacaaggtggccgccgcagaagcgaacgctgccgcaaaggccgagagcgcggagaccgtgctcgccgagccggccagcgaataccagggccgcggcgaagagcgaggcccgtgggatgtcaacgatgaggacgtgcccgattatgacgattatctggatctcggcgcctactacctgcccttcctccagggcatccagctgcgcatcaaggccaaccgcgccacccagcaagtgcttggttccaccatcaccttcggctcctccagcctggagatcgaagcctttgccgcacccaagaccctgggactgtgggatgacgttcgcggtgacctgcttgaagccaacaaggccgcttctgaagtggacggtgtgttcggcaccgaactgaagctgccggtcaatgtcaagggcggcaaaaccgtgaacacgcgcatcgttggtgtggacggcccgcgctggatgctgcgtggcatcttctccggcaaggctgctatcgatccggacagcccggagaccgaggcgctgaacaagttcttcgccgacatcgtcgtcgagcgtggcgaggagcctttggcgccgcgcgatctgatcccgatgcatccgccggtcgcccccgctgagcgtaaggccgccaaggccgcggccgaagccggcgaggagaacggcaaggaacacttcaaggacattccggacaacaagccgaagggtccgctgagccaggaccagcagaccgaagtgaagaccacgctgtctcgcggcccgatgttctccgaagttcgctgatttataggaagagacttggcagacaacaaacgcaccggcctgtccgctctagccgacgccggcaatgaaggcgaggatttctccgtcatcgacgccatcggtggcccgcgtggcgtcatcgaatccatgctgcctggcgtggtgttcgtcgtactgttcgtggccacgagcaatctgaatctcaccattgcggtttcggccgtgttggcggtattgcaggttattgtgcgactgattcagcgccagtcggtaatgggcgcggtctctggtctggtggcggtaggcatctgcctgatttgggcatggcagactcatgaggcccgcaattactacatcttcggattcattaccaatgctggctatgccgcgttgcttgccgtgtcgctgattgcgcgcgtgcccggactgggtttggtcgtcgaattcatccgtagcctgcccaccgagcatttcaaggcatggttccatgactggatggacgacaaggccctgaaacgcgcctatatgattgtcaccggcctgtgggtcggtctgttcctgctgcggctggtggtgcaggtgccgctgtatctgaccaaccatgtggctgcactcggcgtgacccgcctgctcatgggcattccgttctgggcattggcgatttgggtgagttacctcattattgccacgccgatgcaccggcataaggtcgcggctaggaagatacagactgaagtcgctgttgatgccgaacttgaaccgagcgcaaccggaaaggacgatgatgcaagctgaagttcgtatcgaacgatacgccgaccaaggccgctgcgtggcccatatcgacggtcgtgtggtgttcgtccgcttcgccttgcccgacgaactcgtgcgagtcgaacttgacgagccccacgaccgggacgaccggttctggaccggcgaagtcgtcgaggttctcgagccgtccgaagaccgagtcaccccggcatggccacttgccggtcccttggcgatgggcgggggagtgggcggcgcggatctcgtgcacgtctctttgcccggccagctcaagtggaaggccatcaccgtctccgaacagatgagccgactcggccatatcgacgtggccgttcccatcgagcgcatgcccggcgacaaggcagccggcggcctcaattggcgtacccgcatcgaaatgattgccgacgacaacggcatgccatccatgcgccggcgcggcacacacaaccgcgtggccatcgacaccatgccgcttgccacgcgcacgctgctggacgtcgccaagcgcgaacacgtgtgggaaggcggctttgaacccggctcccagattcgtctttccgtgcccgaaccgcgcggcgagatcgtcgataccgcggcagcagacgacaattacgccgtacttgtggacggcgaactgcgcgccggctcccagctgctcaccgaacaggtgaccatcaacggcacgaccttcgactatcaggttgacgccaacggtttctggcaagtgcatcgccaagcgccgatcgccctcggtacgcacgtgatcaacctggtcaacgggcagctgcagtcagcggcggacgccgtaatctgggatttgtattccggttccggcctgttcaccctgccgctggccacaatgaccggtgaacgcacccgcatgctcagcgttgaaggcgcgcgtgtggccgtcaagaacgcccagcgcaatctgcgcgccatgaacctgaacgacgtggacgcccgcgcgggtgacgtctcgcgcacgctggaccatgtgccggcgcatctggccaagccgaatgtcgtagtgcttgatccgccgcgtgccggtgctcgtgccaaggtctgccgccagattgccgcggccggcgcatccagcgtggtctacatcgcctgtgatcccaccagcctcgcacgcgacaccgcgacactcatcggcgaaggctacgagctcaaagacatccgtgccttcgatatctacccgatgacccaccatgttgagacggtggccctgtttacccgctgacaggtgagcatatgacacgacgaattctcggattgctggcctgcatggcggctgtgttgtccctggtctcctgcacgccggccggtagggcggtcggcgatacccaagacagcatgccggaagtcgcccacgattccacacatcccacggatgtcacagtcggctttgtggggtcgactgacaccgccgcagacgagttcgtcatcaatgcgctgtctgatgacaaactcaatgtctactatgcctcgctcgaaacatccgcaagctcggcaaacgcaactgatggtgtatccggtgaaaccgaatcttctgacgccggcactaccagtgaaaacggtgccgatagtatggatgctcatactggcgtcgacaagaatgcggccaccgcacagcagggtgttgccgatttcgtagctcgcgcggtcaaaatcgtggttatcagcggcatcgacgttaccgacgccaaccgggagagctggaaccagacgttgaccaatgcgcgtgaagccggtattccagtcgctctcattgatccaaagcatgcgcccgaagatgaactgctgtacgccgtcatccttcacctcaacaccaacagtgccgattctggcgacactgccgataccaagccaatgactattactgacgccgtgctcaccatcacgcgcgatgaaccccacgaacgcgagatcaaagtcaccgtctcctgagccgaatcagccccttgaagctgagaaagcaccctgaatcatccctgagccttagcggattgcgaaacaagacgcggtaggctggggaatatgagtgcaacaacagccgtggaaatgcctgagatcggagcaaccggtcttacctccaaagaagtggtgcaacgtatcgaaagtggccaatcgaatgcggtgaaaacctccacctcgcgttcggttcaagatatcgtgcgagccaacgtgttcacgctgttcaacggcatcatcttcgccgcgatggtactggtgctgatcaccggttcctggagggacgcggtgttcggtttcgtcatcatcatcaacacgggcatcggcatcgtcaccgaactcagggccaagcgcacgttggataagctttccatccttgtggcctccgaattcctcgtgcatcgtgacggcagggacgtggaggtgccccacaacgagatcgtgctcgacgacctgctgtggatccgtgccggcgaacaggtgccggccgacgggcagatcatccagacctggggactggaactcgacgaatccatgctcaccggcgaatctcgtaccgtgcgccacaaggtgggggagcaggtgtattccggtgccaccgcggtctccggcatggcattggtcaaggtcaatgcggtcggcagccattcctacgccgccacgctcaccgcgcaggccaaggtatacaagaaaaccgtgtccgacctgaacaagggcatcaacacgattctgaaattcatgaccttcctcgtggtaccgctgtgtattctgctgattctttcgcagattcatacggtcggcggttggggcacggcactctccaccggcgaatggcggcaagccgtggtttccgcggtcgccggcgtagtaggcatgattcccgaaggcttggtgctgctgacttcgctgaacttcgcggtggccgccatgcgtctcgcccgtcacaatacgctggtgcaggagcttgaatccgtggagacactggctcgcgtggacgcgctgaacctcgataaaaccggcacgatcaccgatggcggtatcgccttcaaccggctcgtgatgctcgattccgccaatgcggctgcggaacaggcagccacgcaggccctctacgactgctgcaacgaagagcagcccaacggcaccggccaagccgtactcgccgggctcaaggcccaaggatatggggcaggtgcggttgagtctcgtgtcccgttctcttcggcgcgcaaatggagtgcggtgcgtaaatccggcgagacctggtacatgggagcgccggaggtgattatttctgcgcttgagggtgactattcgtcggtgttgcagcaggttaacgagtatgccaatgacggcaaccgtgtgttgcttgttgcgcggtctacagctcccctcagtccgcgaagcggactgagggacgcagttgagggagccaatgtctcggacggcccgcaactggatgtgcaggctgagccggtggcgttggtgttgtgctctgagaagattcgcgaggacgccgagcggacgctcgcttggttccgtgagcagggtgtgcgctgtcgtgtgatttccggtgacaatccagtgaccgtgggtgccatcgcccgcagagtgaaactgacaggcgaccatgagccggtggcgatggacgcgcgcgaactgcccgaggacgtgaacgaactggcccgcgtgctcgaaaacgtcgatgtgctcggccgcgtgctgcctgaccagaagaaggccatcgtgcaggcgttgcacacgcagaaccacgtggtggccatgaccggcgacggcgtcaacgacgcgctcgccatcaaggaggcggacctcggcatcgccatgggcaacgcggcacccgccaccaaggccgtggcccaggtggtgctggtggattcgaagttctcgcacctgccggacgtcgtggcgcggggccgtcaggtcatggccaatatggagcgcgtggccagcctgttcctcgtcaaaaccgtgtactccgcgctgatctcgctcggtgtagtgctgacgcaaatcccatacccatacctgccgcgccatatcacgtatatcggcgctctcaccatcggcatgcccgcgttcatcctggcgctcgcgccgaacacgcgccgctatattccgggattcctcaagcgcgtggtcacgttcgcgctgccgggcggcatcgccactgcgctgtcggtgctgctggccgcttgggtgctgccgccggtcatgggctggaacgtgaccggcgatgccgcggacctgtccgccctgcgcgccaccagcgccatcatcctgttcgcgatgggcgtgttcgtgctggcccgcgtggccagaccactcaacggttggcgtggcgtgctggtggcggtgttcgcggcggcgggcgtgatcggcgcgttcgtcccgttcgtggcgaacttcttcgccctgattctgccgaccggcgccacgatggtggccacgctgatcgcgttggccggttccgcgctgatcttcgcgctgtgcctgtggctggcgccgttcgtgcgcggactgacgggcaagctctcgcgtcggcattgagacggcggcgcgattgtctcatacttcaagccgacacgccagagcctcggtaacgtgcccgtaccatgtgtagcggataatcagcggcatcataagccgattcatgatttcggaggaagcatgtccttacgcgacgaccagctggctaccctcaaggcagccggcaaggacttcgattactacaacatcgccaatctcgacggcatcgatcatctgccgtactcgctgaaggtactggtcgagaatctggtgcgcaacatcgacggtgccaacatcaccgacgagcacgtcaagaccctgctcgactgggatccgaacgccgaacccagccacgaaatccagttcacgccgtcccgcgtgatcatgcaggacttcaccggcgtgccctgcatcgtggacctcgccaccatgcgtgacgcggtcaaggacctcggcggcgacccggaggtcatcaacccgcaggtccagtccgatatggtcatcgaccactccgtgcagatcgacaagtacggcatcgccgacgcggtccagcaaaacatggacatcgagtaccagcgcaacggcgaacgctaccagttcctgcgctggggtcagcaggcattcaagaacttccgcgtggtgccgccgggaaccggcattatccaccaggtcaacatcgaatacttggccaaggtggtcatgagcaaggccgaggccaacggcaacacgctcgcctacctcgactcctgcgtgggcaccgactcgcacaccaccaccgaaaacggtctgggcgtgctcggctggggcgtcggcggcattgaagccgaggccgccatgctcggccagccgatctccatgctcgtgccgcgcgtggtcggcttcaagctcaccggctccatcccggagggcgttaccgccaccgatgtggtcctgaccatcaccgacatgctccgcaagcacggcgtggtcggtaagttcgtggaattctacggcgaaggcatcgcctccgtgccgctggccaaccgcgccaccatcggcaacatgggccccgagttcggctccacctgcggcatcttcccgattgacaatgtcacgctcgactacctgcgcctgaccggccgctccgaagagcaggtcgccctggtcgaagcctacgccaaggccaacaagctgtggggcgacgcttccgacccggattacgtggaaccgcagtactccgaatacgaggaactcgacctcggtaccgtggtgccgtccatcgctggcccgaagcgcccgcaggaccgcattctgctctccgaagccaaggagatgttcgagaagaccgctcccgcctacgagaccgagaaaaccgtcaaggatccggtggccgtgtccaccgacttccgcggcgatttcgacatcgaaaacggcgacgtggccatcgcctcgatcacctcatgcaccaacacctccaacccgtccgtgatgatcgccgccggcctgatcgcccgcaacgcacatgccaggggccttaagcccaagccctgggtcaagacctcgctggctcccggctcgcaggtcgtggccgactacctcaaggccgcggggctgcaggacgacctcgatgcactcggctaccagcttgtcggcttcggctgcgccacctgcatcggcaactccggcccgctgctgcccgagatttccgaggcgatcaacgccaacgacctgaccgtcaccgccgtgctttccggcaaccgcaacttcgaaggccgcatcagcccggacgtcaagatgaactacctggcctccccgccgctggtcatcgcctacgcgctcgccggcacgatggacttcgacttcgagacccagccgctcggcaccgacgcggacggcaacgacgtgtacttgaaggacatctggcccaccaatgccgaggtcgccgccgtggtcgacggcagcgtgagccgcgagatgttcctcaaggactacgcctccgtgttcgacggcgaccaccgctggaagggcctcgacgtgccggaaggcgagctgttcgcgtggaacgacaagtccacctatgtgcgcaagcagaccttcttcgacggcatgaaggccacgccggacccggtcgccgatattcacggcgcccgtgtgctggccctcctgggcgactcggtcaccaccgaccacatctccccggcaggcgcgttcaaggcctccagcccggccggcaagtacctgaccgagcgcggcgtggagccgaagaacttcaactcctacggttctcgccgaggcaaccacgagatcatggtgcgtggtacgttcggcaacatccgccttcgcaaccagctgctcgcctccgtgggcgaggaggtgacgcccggcggcttcacctacgacttcctcgccaagaagccgaccacgatcttcgaagcctcccgcgactacatcgacaacaaggtgccgctcgtggtgctcgccggcaaggaatacggcaccggctcctcgcgcgactgggccgccaagggcacggtgatgctcggcgtcaaggccgtgatcaccgaaagcttcgagcgcatccaccgctccaacctgatcggcatgggcgtgctgccgctgcagttcccggcaggcgaatcctatgagtccctgggcctcaacggcaccgagacctacgatatcgccggcgtcgagaagctcaacgagggcgtgacccccaagacggtccacgtcaccgccacccacgaggacggctccaagaccgagttcgacgcggtggtccgcatcgacacgcccggtgaggccgactactaccgtaacggcggcatcctccagtacgtgctgcgcaacctcatgaagtgacttattctggctcccctctctgaggggagctgtcagcgaagctgactgagggggagtaaaggccggtatccaccaacggatgccggcctttttcatgcacgtcagtatgctatactgtatagcatctttggaatggaggttgccatgaccatggtccaaatgaacgttcgcattgatgcgaaactgaagaacgaggtcgaagaagtcctcaagggcaaaggcgtatcggtgagtgacgtaatccggtcgctgtggttgtacatcgccgaccgcaaggaagtgccggcattggaaacgaccgccgaagagcaagcccgcgaggaggaaaagcagcgcaagctgaaactgattcgagaaggtgccggatacgtgcacaaggaactggtcaaggccggactgatctcagaagacaccgacctcatggaaggccttacctacaagcagttccgcgacaaaatgtacgacgagcaacttgatacgtattacaacatgaagagggccgattgatgaccgacgtttccatgcagcgtattttgcttgataccaatgtactgttggactatttgttccatcgcgatgatcacgccaagatggcggaagcggttatggaacttggcgcgaagaacaacgttacgttgttgtgcgcgtcattgtcgctgaaggatatcgcatacctatcatcatcggcgattcgtagcgaattcaaaccgaatgaatcggaagtggagaatttcactcgcagctttctgtcgtcacgggtgccatggcgttgtatcgagcaggtgaaggagatgtgtgacatcgtcgctgtcgatgagtcgacatgtgataaggctttttccctgcaaaaacggcatcgggattttgaagatgatctgatcatcgttgccgcgcaacaatccggtgccaactgtgtggtcacatcggatgccgaattaatcagtcattttcccgaatattgcaaaacaccggctgaaatcgtggcggcgctggaataaatgagcgtgtggctcccctcatggaggggagccaccaatgatgtgccggctactgtagcctacttcgcctgtagacggaactgcttccagatgtcgctgagcttctgaccgttgcgtgtgcgcttccacacgtccagaccgccgccgcgacgtcctccggcggcggcacgggccgcggcggtcggagtcggatattcggagccgtcatccagacggagacgaccgttttcggtgaccgtggcgaaccagcgctcgcccttgcgcggccgctcccacaccagacgctcgcccggcaccagcagaccagcgtcaatcacctgccggatcgtgacgcgccgcgaactatgagacggccgtggagaggtcttcgacaactcatcgacattctgcttggtcagatcacgggcgtccttgtcataccggatgccccagtattccacgatgagtcggaccgactcttcctgccgcgcctccagcagggcaggtgtgcagtcagcgaaatccttcaactgattggtcagcgggaaacgacgtgaatccgcgcgcaacagcatgcggtcgcgacgtgccggatattcactcaacctgtccaactgatcctcagggccctgcaccagcgccatattgccgagtcggtacatccagaaatcatgctgatcctgcggccagtccgcaaacgatttcgaccgttcgatatccaacggcataatcggcagcgcactgaaccggcgtggtcgatccaactgcatgccggccttctgctcgttggcgcgaatcagcagcagacggaccaaatcgccgtcaccctgcatctcgccatgcaaacggaccaatgcgccttcacggtcgccgtccgagacatgcaacccgttcacgcgttggaccaaatagcccttgtcaagatcacggatggcggcgttcgcataaccgcgccgctccaacgctccagcgcgattcagcgtgcggatgccggtcacctgttccaatgcggtcagaatttccagcagccgacgctcgtcatgggcacccaacgattccaacgtggccgtggttctggcgatacgcgaggcacgaaccacgaacggcgacaaatcggcgtcgcccagcccgcgatacgaattgaccaacgcccacatggccacgggcttccactcgtggctgcggtaatcgtccaatccctcaagccggctacgcacctcggcaggcagtacggtatcgctggggcgtgcgatgatccgccacgccatcgcgtagggtgccagcacctggttgatgaacgtgggcaccgtgcctttgtcgatgtacggttgcagcacgtcggctaggaaatcctcgatgagcttgtcggtggccggcttgtgcgtgagcacgagatgcagataggcgaagaattcctcacagtcatgcggatcgtcgccaagcgggtcaatgatgtcatcccagcgggcggcgtacacgtcaagttcggcggtcgacaggctggccgtggcgcgcgccttgaacacgtcggacggggtgagcggcaggccgcgcatgttcatcacgtcgaagatgcgatgcgcgccgtcgagatcgtcggtggtcacgatgacgagcgtcacctcgttgaccagatactgcgcgaattgctggcgttcggatgccgaccaattggagatctcgtcgtacgtcttgcggatgttggcgacgatgttgcgttgcgcagcagtcgccagatcgtcgtcgttcatgtcgaacacggattcgaggttgtcctcctgcacgtgttcgcggaagaacgccgcgtcgcgctcgcgcaacgtgaggcgaggctcggtgacgatgccgcgcagcttgtcgccgggctccaccagcagcgcgtcgagttggcacatgaggtccgggtctcgctccagatcgcgcagcacggcgatgatgatcgacagggataccagccgctgctgcccgtcgatcacgtcataacggttgtcgccctcgcgcaccagaatcagcgagccgaggaaatacggggtaccgggtgacttgcaggcgtcgtccaagtcgcttaccagttgcaggatgttctcggccttccatatgtaggcccgctggaatgaggggattgtgaaccggaaatccggggtgaacactttcccgagtggtagttccttcgcgctgattgccatgtcaatcccttcgtcgccggcctctggacggtatgccgacgtgccgactgtgctcaagcctaccagtgttcgcccgacggcgggcacatcacgccggctcgggcaccgacccctcatacaagtagaacgaagacgggttttctcccggcacggatgcgggcagtgactgctcgcacacctgcgtcaggccgcgatgtacatagaatccgacatcgcacgtggtatccgtgaataggaagtactgacgtatgccggctgcgcggaatgcgctcatcatcgtctcgaacatgcgccggcccagaccgtgaccgcgcgccgccggatcaagtacgaacagcaccacttcagccgaatactcatggccaatgttcgccgcctgcttacgcagttgcctatcgacatgaagcgtcccgagaatctcgctcgcagctgccatgccgtcgtgggcaaacgccagttgcaatagcttgcgcaacgaatgacgccggtgcatgttcagcgggctgcgatggtcgagctcgtcgatacgccccacaatcaatgcgacgggtttatcttccagctccgcgacaaaggccgtggtcacacgtgccagacagttctcccaatcggcctcggctgccagcaagccggtccgctcatcatattcggcgtaccaagtgcggcgcaccaggtcgatcagcgccggataatcgtctttacgtaacgttcgaataatcgcttcactcatgttctccattatgactgatatggctcgataaccggacgtgttacagtcgcgccggcaaatcggcccgctccaccagcctcgccatctgtacgcggcccatattgagcttgtccgccgcgtaggagagatgcgccttggccgtacgctccgagataaacatacgggaggcgatttcggcgttgggctatgtgctgcaagacgattcgccgattacggtgtatgtcacgcgcatggtggaaacgcccgttacgctttgcgatgagcagaacgagccgatcgatcctattcatggaatgttcagctttgttcctctaagattggtactggaacaaacgctaaaggagcgattatgacattcggtcagcagccccagaacaacgggcaatacaacccgcaatacaacacgcctgattacaacgccgcccaacagtctggatatggccagcaatacgcacagtccggttacggccagaactactatgcccagccgcagggcgcccccacctaccagtacgcgccgcaggatgcggccggtgccggcgcgggtgccgccaccatcaacacgacgatgacctacaactacgaggaggcccgccgcgtctccgtagccaaggtgtacggcgagatgaccatcggcatcctcgtcaccgccgtggtcgccgtgctcggccagatcaccggagcctactacagcttcctcatggccaccggcatggtgggcctcatcggcctgtgcgtggtgcagattgccctggccgtggtgctcggcatgcgcgtcaccaagatgaagtcggccactgcgcgcgtcatgttctatgtgtacgccgcattgatgggcttcaccttgagctcgatcttcatggtctacgacctcggctcgatcggcgtggcactcggtgtcaccgcagcgttcttcttcgcgctgaccatgttcggcatgactaccaagttcgacatgctcaaggccggcccgatcctgatgatcggcctgatcgtgctcatcatctcgcagatcgtgctcgccttcgtgcaggtcgacggcatgaccaagatcgtctgcgccatcggcctgatcctgttcgccggcatggccatctacgacgcgcagtccacgcgcgcgctgctgaccgaatacgaggcccagggcccggaaatggtcaagaagatctccatcctgtgtgccctgaacctgtacctcgacttcgtgaacatgttcctgtacatcctgcagctgctcggcaacagggactagcctcgccagccgattggtgggcggcatgtagcctgctcgtcaaacgtcacagcccgaccacattgtggccgggctttttcatgtctgtcacattcgcacgttaggctgtctccccgtgaaaagacaagaactcgtaggcatgctgagcctgttgttgaccgcgctgatctggggttttgcgttcgtggcgcaggtccagggcatggatttgatgtcgccgatgttcttcaacgccacgcgcttcacgctgggagcactgtctttggtgccgattctgctgtggcagcgtggccgggggagcgcagataagggcgatacagccggggtcgatgtcgttgggaccgaggcatccagggccgtctccacagatgccgcatcgaacggtgcatccgacgtcgttaccatcaccggtgccaagctgaatgcgaacaagcccgattcggccgtggcgcgattgctcgccaacccggtggtcatttccgtgatctgcggcatcgtgctgttcaccgccagcaccctgcagcagtatggcattctgtacggcaaatcggccggccgcgcgggattcctgaccgccatgtacatcgtgatggtgccgttgctggcctgcgtgttcctgcgccggcgcatcggcatgctggtgttcgtggccgtggtgctgtccatcgccggcttctatctgctgtgcatcaccgatggtttcggttcgatcggcctggcggatatcctgctcgtgttcacggccgtgctgttcgccgtgcatattctggtgatcgatactttgggcggcaccgtggacgccatcaagctttcattcggccagttctgcaccaccgccgtgctgagctgggcgggttcgctgatcgaaggctcggtcgactgggccggcgctgctcattcctggattccgattctgtacgccggcatcggctcggtgggcatcgcgtacaccttgcaggtggtcggccagcaatgggtgccgccgacgcgagccagcctgctgatgagcctcgaatcgttcttctcggcggtaggcggtgcgttgcttctcggtgaagtgatgaccccgcgcggttacctcggctgcgccctcatcttcctcggcaccctgctggcccaagcgccggccaggctgccgaagtggctgcaacggtgaatgaatcggacgcaggccgattccatagcacctcagtccgtggtcttaggcgcttcacccacttgcggcgcgccgttgatgtcgcggtggatgttctgcatttgcacttcgatgttctgcagcgaacgggcgcagtcgagcagtgtctgtgaatgctcgctgagcttgttgtccggcaaatcggtcttgtagcgcagcgcatgctccagcgacgcccaataatccatggcgatggtacggaactgcacctccaccggcgtgtaatgcgcgcccgaggagagaaacacgggcaccgcgtagattacgtgcaatgaacgatacccgttctgtttcgggttcttgatgtaatccttgacgcgcagcacctgaatatcggactgcgacgacagatagttggacacggaatacacgtcgtcgcggtaattacagatcacgcggatgccggccacatcgaacagattgtccttaatcgaattgacactgattggcagattcttgcgctccagcttgccaatgatcgaactcaccgacttcagacggcgttccatatgatgtatcgggtcatggctgaaccgcacctggaactcgtcgtcgagaatctccagcttggtgctgatctcgtacatcgcgccttcatacacctgcatgaggtcaacgaatttaacgacctgttcgggagtaaaggtgcctcccggaagatccaacgctttgagacgggcctgtagatcggaggttttgagtcggctatgtcggtcaagtatcacgtccaccaatatactcggcggattccagacaatctggatgttcgcggggaatctttccaagaacccatatttaagatcgtgacaaccaatggcatacgtgaccggagcatgacgaaccccgccgatagaatcggtcgttatgaatgaagacatgatgaccgaggcggagcgtgcctcgattgcagccgatggaaccgatagcttgctgggggagcgcggcaagggcgtattccatatccacacgctcggctgccagatgaacgtgcacgattccgagcgcatcgccggcgtgctggaggccaatggctacgtccctgcaaccgaggaccagatcaatgacaatgacctcgatctgctggtgctcaatacctgtgcggtacgcgagaacgcagccgaacgcatgtatggcaccatcggccgattcaatcgcgtcaaactggttcggccgaacctgcagatcgccgttggcggctgcatggcccagcttgaccgcaagaagatcgcggatactgcgccatgggtttccgcggtgttcggtaccaagaacatcgaagatctgcccaagctattggatcagaatcgtgcgaccggcaaggcgcaggtccaggtcactgaacaattgcggcagttcccgagccagcttcccgccgcccgcgcctcccgcatcagctcgtgggtggcgatttccgtgggctgcaataacacctgcacgttctgtattgtgcccaccacgcgaggcaaggaaaaggaccgccgccccggtgacattcttgatgagattcgccaatgtgtggccgatggtgccaaggaggtcacgcttctcggccagaacgtgaactcgtttggttatggtattggcgatcgatacgctttcagcaagctgttgcgcgcctgcggaaccatcgacggtctcgaacgtgtgcgcttcacttcgccgcacccggccgccttcaccgatgatgtgattgcagccatggccgaaacgccgaatatcatgcatcaactgcacttcccgctgcagtccggttccgaccgcatcctgcgcgcgatgcgccgctcctacaggtccgccaagttcctcgatatcctcggtcgtatccgcgaggccatgcccgacgcccaaatttccaccgatatcatcgttggattccccggcgaaactgaggaggacttccagcagaccatggacgtggtgcgccaggcgcgcttctcctcggcgttcacgttcatctactcgccacgccccggcacgccggccgccgcaatggaacagattccgcgcgacgtggtgcaggaccggttcgaccgactggtggcgttgcaggagcagatcaccgaagagaacctcgccacattcgagggccgcgacgtcgaagtgatgatcaccggcaaactcggcaagaaggacaccgacacccaccgtgtcaccggccgcgagaaaactggcgtgctggtgcacatcggcgtgcctgaaggcgaaccggtacctgaaatcggcgatttcgtcacggtcaccgtcacacacgccggccgccataatctgcttgccgaccccgatgtggccgctggacagacctattccgtgcgacactgagggggcgtatatgacgcaacgagtcgtctccatcgtcggtcccaccgcgtcaggcaagacggggttgggcatcgccatcgcccggcgtctggccgaagcgggggagcgggccgaaatcgtgaacgcggacgcctaccagatgtaccgtggcatggatatcggcaccgccaaacccaccgccgaagaacaggcggccgtgccgcatcatctcatcgacatcatcgaccccgaagacacgatgagcgtggcccgattccagcagcttgcgcgcgagaccatcgccgacctgcaatcacgtggcatccggccgattctcgtcggcggctccggcttgtacgccagagcggccatcgatgacatcaccttccccggcaccgatcccgacgtgcgcacacgtcttgaggaacgcgagaaaaccgagggtgccggtgctttgttcgacgagctgcgggccaaagaccccgaggccgccgcgcgcatggacccgcgcaatccacgccgcaccatccgtgcactggaagtcatcgagcttaccggcaaaccgtattcggccagtctgccgcgctaccggtacgtgattccgtccgtacagatcggactcgacctggaccgcccggatttggaccatcgcatcgacctgcgcaccaagcagatgtatgacgatggattcatcgaagaagtcgaacggctgcgcccgcatctgggtgccaccgccgtacgcgcgctcggctatcagcagatcatcgacctgctggacggtatctgggatgtgaacgacgccttcgcggacatcgcacagaaaaccaagcgactcgcccgcaaacagatgggatggttcggccgtgacccgcgcatccactggctgcaggccctgaacccgaaactggtcgacaacgcgatggccattatcgcgcacgccgacgccggcgactacgacccgatcgacgcccgagccgacgaatacacccagcatcatctgggcgatatcacggcgtaggaatcagccaaaggccggtgcaatcacccgcaatcagtgtgcaggcccctgattccagccggcgatcaagaacacgcgcgtcggattcgccgggcgtagtatcgcgtcgaacatcgtctccagtgcagacgtgtcgccccgatatgccgagtgcttggcggagcgatactcctcgcgcgtcactgagccccagtcgagatcccagccggcgtcatgcgccaagcgtgaaccgaatatacgcagcaccatcgcattgccgccacggaacggatgcagataaccgagctcatcataaatagaagcgaacgcgtgaacgaacacgtcgcgatccaacgcatgcaggttgcgcttgtccgccaactccatcgcgatgttgtgcgcgccggtctcaatgagcccagccgggaagaacgcctccggattcgcggcccgagcccggtcgttcgtcacctcgcgtgtggtgtttgaggtacgcaacttgcccgcatcctcgaacacgccttcgaacagccccttatgaatggcggtcaactcgtccaagtcgccagacggattccaccgacgttccgccaacaacacggtacgtgcgaacaccgcatccgcgcgatccgtggcatgatcatccagactgccggcagccagacgatcctttccggcagggtcggcggcggcgcgcagacgcatggcggtctgctcgtccgccacgtcgatgagatgggtcacgggctccaagccacgttcgtaggcaaccgcggcgcgcatcgttgcctcgcccggcgtcatcgcttccagtgcgcagttcttgagtgcaaatgcgactgcgctcgcacgctctgcgggtgtcatgcaacccatgataaggcatattcgcgctccagcggggaatcgactcggacgaacctcgacgaaccgcggcgaatcggctgtcgggattcgtcaatcgaccatatcgtcacggtgtcgtcaccaaccatgcacccccgtactagtagaatcagacccgatatggcacgaacagcatcctccaacagcaccaaaccccgtaaatccaaagacaacgggtctacccatgatggcgaaaccaaggtccagcccgagcttgacctcgaacctgagccgttgtggaagaagatcctgctcgcgattccgcgcgcgttcggctccggcgtacgcgccgtcaccggcgtcggcgaatacgacccagcctaccgtcgtgacggtttgtgtttcctgctgctcgtgctcgccgtactgttctgcgcgtccgaatggttccgtgtcagcggtccattcggccagctgcttcacgccatcgcggccggtgtgcttggtctgatgagcgtcgtgctgccggtgttgctcgccgccgtggccttccgactcatgcgcaattccggtaaagggtccaataacccgcgtgtggtcaccggttgggtgctgttcatgtggtcgatttgttcgatcatcgacgtggcgatcgccgccgaccacaccggattcgacatcacgattctgcaatccgccggcggcctgttcggcttcttcctcggctcaccgctcgcctggggcctttccaacgtgttcgccatcatcattttcgtggtcgtcggcctgttctccttgctgatgattaccggcacccacgtcaccgatttgccggaggatgcgcgcaaaatcgcagctaaaatccaacgcaaaccgtatgtgccgatgggccaggaggccgacggaagcgccagccagttccccaacgaggtccgtgtgggagataccacactcgcctttgccgacggtgttccctcgcatgacggcaacgacgacggcaacgacaacgatcaggccggcgatgcacggcccagcctgttcgcacgactgttcggccgcaaatccaagaccgaagacgacaaaacccttgacaagtatgctgccgacgatccgttcgaccgtgccgccagccagcatggtgccaccgccgaaaccccggtggtcgatccgatgaccggcgagattaccggtgcgcgaaccattgcatcgtcttcgtacgacggtcgtccgcacctatccagccctgcgcctgctgccgatgcggatgatggcgacgcttcccgaacccgcgtcatcaccagtggccagaccatcgccatgcccggtgggggagcggtagacgatccgtgggcacccagtgccgcccaggccggtactgtcgcgctcgcaggggcagccggggcgatgggagcggccggggccgccggtgccgcggccgcggcagccgcgaccggagcctacgcaggcgccgatgcggatggcagcggagtcggccagggcgtgcccaatacggacggacagccgaatgccgccgccggcaacggtacagacgacgacgccaataggccgtatcagttgcccgacctgaacctgctgaccaaaggtcagccccatgcgatgcgcaccccggccaacgatcgcgtgatccgggcactgacttccaccttcgaacagttcaacgtggacgccaaagtcgtcggcttcctgcgtggcccttcggtcacccaatatgaggtcgagcttggccccggcgtcaaggtggagaaagtcaccaacctgcagcgcaacatcgcctacgcggtggccagttcggatgtgcgcatcctttcaccgattcccggcaagtccgccatcggcatcgaaatcccgaacgaggatcgcgaaatcgtgcacttgggcgacgtattgcgctccgacaaggccgtgggcgacccgaacccgatgctctccggcatcggcaaggacgtcgaaggccacttcgtgaccgccgacctgaccaagatgccgcacctgctggtggcaggtgccaccggttccggtaagtcgagttttatcaactcgatgctcacttcgatcatcatgcgtgccacgcccgaacaggtgcgtctgatcatggtggatcccaagcgcgtggaactgtccgcctacgcaggcatcccgcacctgctgaccccgatcatcaccgatccgaagaa

SEQ ID NO: 3891 - DNA, 2582 bp, Unknown
  R22_24m  MAG No. k141_6960
accccgtaatgacaccaatggaaaacgacgcgaccgtttacgggggtgtcccggacggcccgttgtgcgtcattcgctgttgtggttgtcccgtgtcatcgccggcgccttggtcctacgcaaaagcaccttgcggattattccatatcccgtctacacgatgcaatggggttctggcgggcgggaattagcgattcggtcatcgggaggagacgtggaaggtggcggcgatgccgtcattgccgacgccggtaaatgggcgctgggcatgccctgtttcctgagcgagagcccggccctgtatcgtctggcgatttgtcgatcgttgcgattccggcgttctgccgggctttcatttcgaaatgacgcatctggaatagtgcggccgtctttggtgctcctctcttcggtgatccgccgaggttacgcccatggctgaacgcccggaatgtcccgcgaaatccggcgagacggtctaggccgcggatgtaccgtgaatggcgcataggcgtgtcggtcgccgcaatcatggcaatgagaggaaaccccgttatggatcatgcatcccgatctcagcatcagactcaggccgatgcgtcttcgatctcttcaacgaatccgacggcctcgtcgccgctgcccacccaggcgccgccgtggggcgcgctgtgggtgatggccctgggattggccatgatcgtgctcgacagctcgatcgtcaacgtctccatccccaccatcatcgatgatatcggcattaacctgaccgacgcccagtgggtcacctcgctctacaacatcgtgcttgccgcgttgttgctgcctttcggcaagttgggcgacgccagagggcgcaaactggtgtttcaagccggtaccgtgatcttcgtggcgagttcggcgctcgccgccgcctcgcagggtgcggggatgctgcttgccgcccgtgtgctgcagggcatcggaggcgcgatgatcatgccgaacaccctgtccacggtgtccgccacgttccgtggcaagtatcgcgctgcggctttcggagtctggggcgcggtaatgagttcagccgccgctctcggaccgttgctcggcggcgtgcttaccgagaccttggggtggcggtggattttcctagtgaaccttccgctaggcatcatcatctttgtggccaccattcctttggtgccaaagactggtggacatacctcgaacatcacttcctcaaccacttcttctaccattcgattccaaagcattgatgtggacattccaggcgtggtgctgtccgcactgacttctgccttgctcgtattcggacttatcgaaggcgagacctacggctggtggaagcagacttccactcagttgaagatgggcggtctgacatgggaccacggctggctgtcgccggttccgatttgcctggtcgccggtatgctcctgctggtcgtcttcatagccgtagaacttgcacgaggcaaagccggacgtccggtgatgctggacatgaccctgttccgcatcaaaacgttttcgtggggcaatctgtcggctgcggccatcgccgccggcgagttcgcgctggtgttcgcgctaccgctgtacctcatcaacgcgcgcggactcgacacgctacaagccggtgcgatgctggccgtgatgggattgggctctattatcgccggtagcagggcgcacatgctggccgccaaactcactccggtcggcgtggtccaacttggcttggtgattgagatcatcgcggtagccgtgattgcagtcctcatgccggtgggattcgcagtgtggtggcagcttcttcctctgaccgcctacggctgcggcttaggactcgcctccgcgcagctgaccagcgtggtgctgtccgaagtgccgattccccagtccggtgaaggatcggccacccagtccaccatccgtcagcttggcaccgccatgggttcggccatctcaggcgcggcattgaccatggccatcaatggaacgttgccggcacgacttgaatcccttggactgcccgctaaagtcggcgatggactggccaaggcggtcagcagctcggctggcggtgtaattggctcgttccgcagcggagatggaccggcggcccaattcggtgacgaagcgccgaaaatcgccgatgcgatgacttccgggttcattgagggcaaccgttggacactcttggtggcaggatgcatgctgctcatcggtttgctggcttcggtcgctgtgcgacgcgcggcatcatcgcacagcacacactgacaaacatgaggcagggcgatctgctgaatggttttggtgggccagcagctcaacggcgaaaagctctactgaagccggctgataccaagacgaaactgatcgcgcggtaaggtggggtttatgaaagtagtagtgcaacgagtgagccaagccagtgttgacgttgttaacgaactgggcaccgtagaccccacctttgaaccgcagcagattggaccgggattcatgctgctggtcggtgtaaccgatgaggatggtgaggagcagatttcttggcttgcccacaaaat

SEQ ID NO: 3892 - DNA, 9555 bp, Unknown
  R22_24m  MAG No. k141_7120
aatctcctcgcgcggcacgttgaggttttcgcagccgaaggccgcgtcatcgcccagtcgttcaagaatgatctgcgagtccgggtcctgaagcaccagtcccacgcggcctcgcgcctcgcgcgcatcgacgccatcgatggtgagcgagccctcctgctcgccttcctcatcgccgccaagtacgcctgcgagaccggccatcatcgtgcttttgcccgcccccgaagcaccgagcagcaacacacgttcacctggccggatggtgaaatcgacggcacgcaacgcgaagtccttacgcgtggcgtgccgccatccccagccgctggcctctaccgcagccggattaacctgcatcagacgcgcgccttgctgcggccggattcaaagcgttccagagcgccggtggcggcgagcgcacgagacaagtaccagaccaccacgccggcgatcacgacgccggagatgatggagccaaccagataccaagtgacgcgcaggccgttccagcccgggttggtggcccagtagtaggcccagcagcccacgccggcgagcgcaccggacaggatggtggtgccgatgttccacttcttccaggcgaagacggcgaaggcgatttcggcacccagaccctggaggatgccgacgatcagcgagccgccgacgccccactggttgcccagcgtaagctcgaggaaggcggcgagggtttcggcaaacagtgcggcaccgggcttgcgcacgatgattgcggcgagcgggccggcgaacagccagaatccgttgagcagaccctcgaaaccgggggtcacgccctcgaacagggccagcggggcggagcagacaatgtcccagccccagaaaatgacgccggatgcgacggcgatgattgcggcgacgacgatatcgacgacgcgccacttgtaattggctttggccacagcttcagtcatgaatgtgcctttcttctgctcgtacgcaggccgaacatacatggatatatgtacgcacatgatgcacatgttcgtggccacgcgcgggttggttcaggcacgggtgggtaagagcgacatttccgtgcgccggcattatccggtcacgttccatcggtcgagactatgaatctcctctcagccgcctaacggcagctcccgtgtcaactccccgactataaagcaagccgccgtcaaaggcaatagccacatccgtgacctaccggacggcggctcgccaccattaccgatgcggttcggttacttgccgaacttgtccagcagcaaagcctcggtgatcacgttgttcttgaggccgggcagggagatggactcattggggctgtgggcgttggccttcgggtcttcggggccggtgaccagcacctgagcgttggggaaaatgcgctgcagttcggggatgaacggaatggagccgccttcgcccttgttgatgggctcaacgccgaaggcctcggtcatggcttccagcgcgtccttggtggccacggcggtcgggtccatggcccagcccatgccgttttcgccgcgttcgacagtgaccttggcaccgaacggcgcgtgggattcgaggaatgcagccagtgcttcctgcgcttcttcagggcgctgggtgggcgcggtgcgcagcgacagacggaagcgggtctccggggcgatcacgttgaaggatccctcgaccgggtgggcgtcgaagccgatcacggtcacggacggcttggtccacaggcgtgaggccagcgaaccggtgccggcgaactcgtaaccggccaccacgccggaatcctcgcgcacggtggtttcgtcaaggtcgcgttgcaaaccgccgattggctcttccgcggccacgccgggcacggccagatcgccgttctcgtcgtacatggaagcgatgagcatggcggccaacgtgttggagtcaagaatcgggccgccgtactgaccggagtgcaccgggtgctcaaggccctgcacggtcacgtccacgcaggtgttgccgcgcagcgaggtggtcaaagaaggaatgtccgccgaccagttgccggaatcggccacgataatcacgtcggcggcgaattcgtcgcggtgagcctcgatgaagggaatgaagcttggcgagcccatctcctcttcgccttcgatgaacactttgatattgacgttgaggtcgtcgcccaaagccttcagcgcaccggagtggatggcgatgccgccgccgtcatcggcggagccacggccgtaaaggcggccgtcgatttcggtggccacgaacgggtcggtgttccactcggccgggtccggaacaggctgcacatcgtgatgggcgtagagcagcacggtgggggcgtccggagaaacgatatgcgagccgatgacctcccatgcgcccggagtgccgtcggcattggaagcctggaccaccttggcatccacacccacgaggcgcagttcgtctgccacgaattcagcggagcgcttcatatgttcggcggtgatgcccttggcggagatcgactgcagcgcaaccttttcggccagcaccttgacgatgcggttccaatcggtttcgacgcgcgaacgaatctcgtcagcggtgagcgttgccatgatggtcctcctttatatgtgtgtaagcggcgtcattgcaatggctgcgccagtatacaagtgtctgaacgtcaccgtaacctcaaagcatgacatggaatccgtttaggaaaaaagaagaggctcaagttcccgttgagcaggccccgaagaagaccgccgatccttctgagaaaaaaggccgtcctaccccgaagatgaagcaggctcaggccgccggtatccgtccgctggttccggtggaccgcaaggccagcgccaaggccgccaaagcccgtctgcgcgagagggagaacgccgagtacgaggcgatgcagaagggcgacatcaaccacatgcccaagtcggaacgcctgccttggcgtatctacatccgtgattatgtggatgcccgtttcaaccttggcgaatggttcatcccggtggccttcgcgattctgatcgtctccatgttcgtcacttctttgatgcagaaccagtgggcttccatcatcatgatggcgcttatgtacggttacctgattgccgtgatcatcgacgtatggctgatgtggcgcaagctcaaggccaagctcatcgccaagtacggcgaacagtccgtgtccaagggctcccgctccttctcctacgcttggagccgttcgattcagatgcgtcgttggaggcttcccaagccgcgttacccgaagcgcggtcactggccggcagactgatgtccatatatactctggctcccctcgttgaggggctgagccgtaaagaaaacagtccagtggactgtttttaggcgaagtggcggcgatagccgcatatggctccctagcatgggagccatacttatatgcaccaaggaggcaatcatgagcgaacagtttgatctggtcatcatcggggccggccccggcggctattccacagccctgcgcgccgccgaactcggcatgaaagtggcactcgtcgagcgtgacgccaccgtgggcggcacctgtctcaaccgtggctgcatcccctccaaggcgctcatcaccgccacccacaccatcgacaccgtgcaccgtgcggccgaactcggcgtcaacgcctcggtgaatgacatcgacttcggcacgctgcgcgactatcgcctgcgcgtggtcaagacgatggtgggaggactggccggactgctggcccatcgcggcatcaccgtgttccgagccaatgccgcgttccatgcggatgagatcgctccagcaacttccaaccacatcgtccacctcgttccctcccccgaccaaagcgacatcctcacctatcacaaggccgatgtccccgaacccagcggccccacgatggacctcacggccacgaacatcgtcatcgccaccggtgccaagccacacccattgcccggtaacccgttcgccggcgccctcatcgactccacacaggcgctggaagtcaacgaatttccctcttcggcggtgattatcggcgccggggccatcgcccttgaattcgcctcgatgtggaacgccgccggttcgaaggtgaccctgctgattcgcaaggaccgcgtgctctcagcctgggaccggagagccggcaccacgctgacccgtgagctcaaacgtcatggcgtgaacatcatcacccgcgccagcgtcacccatgtggacaccggcgcgaaccttggtgccaccgtgcactacacgcgcgaaggccaggacggcgaacagagcgtttggggcgaaatcgcccttgtcgccatcgggcgtgacccgatcaccgacccagcatggggcgtgacgattgatgaccacggacatgtcgccacggatgcgtacggtcgcaccgacaaaccgggcgtatgggcggtgggcgacgtgacggccggtcacgcactggcgcatcgtgcttttgagcaaggcatcgtcatcgcggagaccatcgccggactcaatcccaagccggtggacgaagccgctgtgccgcagatcgtgttctccttccccgaagcggcgtcggtcgggctcaccgtcgaacaggcgcaggcgagagaggacctcgtcgaaatcaaggagaccaactatccgatgctggcgaacgcgcgcatgctgatgagcggcacggccggctcattgaccatcgtctccggctgcgacgcggccaacccggacaccccgcgcgtgctcggcgtgcacatggtctccccgatggcctccgacatcatcgccgaagccgaacagctggtcggcaaccatgtgccgctcgccgacgcagcccgcctcgttcacccgcatcccacattcagtgaaacgctcggcgaggcgctgctcaaggccgacggacgaccgttgcacacacgctgagaccaaccagcacaagcaagttcggaccagcgcacctgataagatattgcccagtgtgtttcgtcccaacaaaggaagaagtgatggcggaaaaggacgcgaagccgaagaagcagagcacaatcaagcagatcatccagatctacaagtacacggctaaggaagacaaggccctgccgtggcttgaggccggtgctttcctgctgcctgtagtcgtgatgatcatcatcggtctgattgtcaagtggacctggctgacctggatcttcaccatgattaccgccatcatgctcggcattctgctggccaccatgatgctcacccgccgcgcggatgcagtcggctacaagcagattgatggcaagcctggtgccgccatcggcgtgctgagcaacatgcagaaagccggctttgacttcccgcaggaaccggtgtggatcgacccgaagaccaaggatgccatctggcgcggcacttcgatgaacggcatctacctgatcggcgaaggcgaatacggtcgcgtcatgaaggcgatggatcgtcaggaacgcgatatcaagggcgtcaccgccggctcctccattccgatataccgcatcgccgtgggccacggccccaagcaggtgccgctgaccaagctgcgtagcacggtgatcaagtccaagagctatgagcccacggaccacaagaacgcactgatcgccaagattcatccgcgccgtcgcttcctgctgaccaaggccgagatggaaacgctgaacgatcgtctgcgcacgctgcaggccaagaagggctatgccatccccaagggcatggatccgaaccgcccgcagaagatctcccgccgcgcgatgcgcggtcgctgatcggcagcacacaaccaaatcgcacagaagccccggaatccgttcaatcggttccggggcttcgtcatatgtctcataatcgcgtccacttacatccacctacgtcacctgtcaatacccactgtccacgttgcggacatctctacctactcccccgatagtctccgtttccattctgtaatgatgtttcgttgaaataacgcgcctgcgcgattgtcggccacagtcacgaaacattctcgtaacccaagtttcgagccggcgaaacgcgctattttacgatatataccgttatatctcatacgaaaggagcggtcccgtgaccgaactcaagtccaaggaagacgtcgaggcccttatcaacaaggaaggcatcgagtatgtctccgtccgtttcaccgatcttatcggcgttcagcagcacttcaccgtgccggctagcgaattcctgaaggacgctttcaccgacggcatgccgttcgatggttcctccgttcagggcttccaggccatcaacgagtccgacatgaagctggtcccggacgttgagacctctttcgttgacccgttccgcaagcacaagacccttgacgtggccttctccatcgtcgacccgctgaccgacgagccgtactcccgcgacccgcgtcaggtcgccggcaaggccgaggcctacctgaagtccaccggcatcgccgacaccgcatccttcgctcctgaggccgagttcttcatcttcgacaaggtgcgtttcgagaactccatgcagcgctccttctacgaggtcgactccatcgaagctccgtggaactccggcgttgactccgaagaggacggcaccccgaacatcggtttcaagaatcgcgtcaagaagggctacttcccggttccgccgattgaccacacccaggatctgcgcgacgatatggtcgccaacctgcagaaggtcggtctgattctcgagcgttcccaccacgaggtcgccggcgctggccagcaggagatcaactaccgcttcaacaccctgcagcacgcaggcgatgacctgatgaagtacaagtacgtcgtccacgagaccgccgctctggccggcaaggctgcgaccttcatgccgaagccgatcgccgacgacaacggcactggtatgcactgccaccagtccctgtggaaggacggcaagccgctgttctacgacgagaagggctacgctggtctgtccgatctggctcgctggtacatcggcggtctgatcaagcactcctcctccgtgctggccttcaccaacccgtccctgaactcctaccaccgtctggtcccgggcttcgaggctccggtcaacctggtgtactccgctcgtaaccgttctgccgccatccgtattccgctggccggcacctccccggctgccaagcgcatcgagttccgcgctccggatccgtcctgcaacccgttcctggccttctccgcccagctgatggctggcctggacggcatcctgaaccacatcgagcctccggagccggtcgacaaggacctctacgaactgccgccggaagagcacgctggcatcaagcaggtgccgagctccctggccgaggctatggacgccctggaagaggaccacgacttcctcaccgccggcgacgtgttcaccgacgacctgatcgagacctggattggcctcaagcgcgacgagatcgaccaggctcgcctggccccgaccccgctcgagtacgagctctacttccacatctgagtttgagagcttagcaacgttgggatttcgccattgctcttctcttgtgggagtctaatgggagtcattcagcgtaactagaaagaacctcgtgaaattcgtttcacgaggttcttttttgtatgttgcgttgtatgttatgcgatgtgtgttgctcctggaatattccaggggcgggccgctacttagtctcccaacgctccttgagtacataggcggcggctttgggctgacggtcgcgagtgaagacgcccttcttgttgccgtcgacgcgcatgataccttcaccggtttggaagtcgcagaggttccatacctgctcgcccaccactgcctcgaacatgtcgaacacttcgtgctgcatggtgaggtactcgcattggtactcttcactccattgcgcgctcggcagcttgtgcgcaccggcatcggtgtccgcaccgtattcggtgaacagaaacggcttgttgggttcggtgttcatccattggttcatctcgttgatgaaggccttcttggctccgatgagctgatacccatcttgcacataccagccgtaataccggttcaggcagatgacatccgcgaactgatggcacttgtctttgcctccggcggccatcagcagattggtgtaggtcagcgggcgatgctgcggatcgagcgtgcgcgcgtaatcgaatatctccttgaaatacggcacggccgcctcggatgccgagtcgttggcggcgtcgatgagattccaagcgccggaggcccccggcattcttttcgtcgaaggggacaattcagaacacaactgccgacacaatcgtcagggaggccagcgagaacagcgtgcttacaagcacgaagccgaccgcatactcgggcatgttgttcttgcgaccggtgaacatggcaatggtggtcatggtcggcagtccggcgatgaccgtgatcatcagcaccatgtcatgggtgatcggcagttgcggcaatgcgccggtcagcgcggtcagtagcgcgtagaaggcgagcgggaatgcgatcatcttggcgactaggccagcatagagttcgtagcgtttgaggacgccccaccacttggtcagcgcgaacaggccgcccaagtagattagcgacatcggcgtggccatattgccgatggtgtgcagcggcttcaggatgatgtccggcaccttgacgccgagcagaatcagaatcagggcgagcatcacgccgacgaaggcgggattgacgaatcgtttaagcaggccgaggacgcgggtgcctggcgaggggcggacgacggccggagaaccaccgtttgcggcattgctcgccgaaccagcattgcccaccgaaccggcgccgttcaccgaaccgttcacgaccgcacctcgcgcgccaatcgcgttgccgccagtcgtttcgtcgaccggctcgcacagccatacgccgtacgtccagagcagcgtctggtcgatgatcgacatcagcgccacgtaaatcgcgccgttctgcggccaaagtgccataatcaacggaatgccgatgaatccggcgttgccgaaaataagcgacgcctgaaatacatggctacgcgaacctttgagccgcaacagtttggcgaccagccagaacaccaggatgagcagcgcgtacatcacggcggtcagcagcatcacaccccagttggcggcgagctgcgcgcggtccgcgccgtcgacggcgttcgagaacacgagcacagggatgagcacgttgagcagcagcgaacacatgccgtccagcgccgtctgaccatagaaccggagccttacacatccgtatccgaccatcagcatgatcagaaatccgaccaactggccaatcatgacaccgaactgccccatgcacactcctctcgtttgctctcccgcgatttcctgtcactggttcatataggcagccatctggacaggctcggcggc

SEQ ID NO: 3893 - DNA, 5287 bp, Unknown
  R22_24m  MAG No. k141_7902
ctacccgggatattcaaccgcagctggatggctcggctattccgacgagaagatggtccgcctggccaagcaggagaccgaggtcatgggcttcaagcagatcaagctcaaggtcggccagaacctcgaggacgacctgcgcaggctcaagctcgcccgcgaagcggtcggcccggacatcgccatcgccgtagacgccaatcaggtctgggatgtgccacaggccattgaatggatcggcaaattcaatgactacgatctcgcgtgggttgaggaaccgacctgcccggatgacgtgcttggacatgccgcaatccagaaggccatcgatccgattccggtggccaccggcgaacagatgcagaaccgagtcatgtacaagcagtacctgcaggccggcagcttcaaggtcatgcagattgacgcgacccgagtcgccggcccccaggaaatcgtcctcgaatacctgctcgccaagaagttcggcgtcaaggtctgccctcacgcgggcggtgtcggcctgtgtgaagccatcagccagcttgcgatgttcgattacgtgtccgtctctggcgagatggaggaccgcgtcgtcgaatacgtggacaaccagcatgagtacttcgtacatccgaccgtcatcaagaacggacgatacgtcgcgccgctcgctccgggcaacggcacggagatgaagctcgacgaatgcatgaagtacctgcacaaggactgaccggtcgggaggacctgagatggacctgcatcttaaagacaaggtgatcattgtcaccggaggcttcaaaggcatcggcaagggcataacgctgcgactggccgaagaaggcgccattcctgtggtgctgaaccgtgatgacggtgccggcgacgaattccgacaggacattgaacgaatcaccgactcgtatgacacgtatctgatcgacctgaacaacaccgacgacatcgcccccatcgtcaagtcggtcatggagaagcacggccatatcgatggcgtggtcaacaacgccggaaggaacgacaatctcgcgctcgagaccacgtcgtggcgtcagttcgaggagtcgattcacggcaacctgacccactactacgagctggtccatcagtgcgtgccggcgctcaaggccagcaagggctcggtggtcaatatcggttccaagaccgcattgaccggtcagggcaagaccagcgcctacgccgccgcgaagggcgcgattctgggactgacccgcgaatgggccgccgccctcgccccggacgaggtccgggtcaatgccgtcgttgtggccgaagcatggacaccgctgtacgcgcaatggatcaagacgttcggcgatgagcaggcacagcgcgcgcagcttgagaagatcaccagcaagatcccgctcggccaccgcatgaccgagacgtcggagatcgccgacaccgtggcgttcctgctgtccgacaggtcgtcgcacaccaccggacaatgggtcttccccgacggcggatacgtccacctcgatcgggcactcggctaggagataccgcacgggggatcatcggttcgcgttcgcgtgtccggatcccctgttttcgattcatcgctccaacaccgctcggcccgcggacatattcgccaccgcacgcggaacgcctaccatatcgtcgaaaggaaaaaatcatgacttgcaacgcccaattcgaaggcgtgttctgcccttccatcaccatcacgaacgcggatgggaccattgactacgataattggggcaagcacctcgatcatctcatcgacgcaggcatcgacggtgtgttgctgttcggcagtatcggagaattctacgccatcgacgtcaagacgaaggcagaagcggtgcgtttcgccgtctcgaaagtcgctggacgcatgaaggtgctcgttggcgtgggagacaccaacttggacaatgtgagaacattggcggcggaaagcgaaacagccggagccgatgcattggttgcagtatccccgtactatttcggaccatcaccggattgcgcgaagcgctacttctctgcggtggccaaggcgacgacgctgccggtcattctgtacaacttcccagccaggacgggcaacgacctcacccctgagctggtggcggatctcgcagcggagaaccagaacatcatcggcatcaaagacaccgtcgacaccatcagccacaccaggaaggtcatcgctgccgttcgtaaggtgaatccatcgttcagcgtgctgtccggattcgacgagtactacaccgtcaaccgaatcagcggcggcaatggcgtgctgtgcggattgaccaatgtggagccggagactttcgtcagcctgcatcgtgcatggcagtccggtgattacgccacggccatcaagtcggctgagcgcatttcctatctgatgcgcctgtacgacactgccgacctgttcatcagcgccatcaagggcgcggtcaaggcgaagggactgccaatcgacacgtccatccatgaacccgccgtgcagctgaccgatgaacagtaccgcaatatccagagcattctaggcaagtaacaatcaaataagtctgaagacaagcaggagcagctatgctgaaagggataccgtcgatcatacagcccgatttattgaagattctcagtgaaatgggccatggcgatactatagttctcgcggacgcccactttcccgctgaatcattggggattcattcccatgtgatcagatatgacggtcagcccatcgaaccacttctcgatgcagtgatgcagcttataccgttggatcaatatgcggagcatccggtgtttttgatggataaggttcctggagacgccgtcgacaccccgatatgggatcggtatcgtcaggtaatcgccaagcatgagcctgacaggcaaacggctattggcatgctggaacggttcgccttttatgatgaggccgaaaaagcctactgcatcgttgcaacaggtgagcagtcacagtatgcgaacatcatcatcagaaaaggcgtcattcgctaataaccgaataggagcaatataatgagcaatcctgcagatgcgggcatcaacctgaactatctcgcaaacgtgcgcccatcgtcgcgccagcttgcctggcagcgcatggaaatgtatgccttcatacacttcggcatgaataccatgacagacagggaatggggtcttgggcatgaggatccggcgctgttcgatccacagaatgtagatgtggaacagtggatggatgcgctggtggctggtggaatgactggtgtcatcttgacatgcaagcatcatgatggattctgcctgtggccatcgcgttacacgcagcataccattgccgcctcgccatggaggggcgggaaaggggatctcgttcgtgaggtcagtgagtcagccagacgtcatggactgaagttcggcgtatacctgtctccgtgggatcgaaccgaagattcctatggcaaaggcaaggcatatgacgatttctacgttggacaattgactgagttgctcacccagtacggaccgattttctctgtatggctggatggtgccaatggtgagggcaagaacggcaagactcagtattacgactgggatcgttactacaacgtcattcgttcgcttcaacccaatgcggtgatatccgtatgcggtcccgacgttcgttgggctggaaatgaagccggacatgtgcgtgacaacgaatggagcgtcgtgccccgacgactgcgctcggcggagctgactatggaaaattcacagcaggaggacgatgcgtcctttgcctctacggttcgctctcaagatgacgaccttggaagccgtgaggcggtttccggatacggggatgacgtctgttggtatccggctgaggtcgatacctccattcgccctggatggttctaccacaagtatgaagacgacaaggtcatgaacgcagatcagctttttgacctctggctttccgcagtcggcggcaattcgtcgcttctgctcaatattcctccttccccagaaggactgttcgcagaaccggatgtggagtcactcaaggggttgggaagccgtatcaatgaattccgcaaagcattggcttcggcttgttgcgaagtcaagaccagtagcgcgaacgaagctgcaatgcgacttattgatgggaatcaagatacgtattggtctcctagcaccgatgacgtggcccctgctgtcacgctcactttcccgcaactgacgacgatcaatgccgttgtggtcgaagaggccatagagtgtgggcagcgcatcgaacatatgcgcgtcactggcgtgctatctgacggcactgagtgtgtactcggacagtccggcacagtgggataccgcaggatactccgtttcgacgatgtcgaagtatcttcggttacccttcatgtggatgattcaaggctcacgccaatgatcagccgtgcggctgcggtgcggatataaggcgggtatatcaccatgaaactcacattcgatggaatctcttcgtgctgggaagaaggcatcccgctcggcaacggacgcatgggagcggtcctgtgttccgaaccggaaaccgacgtgctgtatctcaacgatgacaccctttggtctggatatccacacgcggaaacctcaccagtgacgccggaaattgtggccaaggcacgtcaggcggcatccggcgacgattacaccgccgccacgcgaatcatcaaggaagccacactgcaggagaaggacgaacagatttacgagccgttcggaacggcccgtattcagtactcgacccctgcagacggccgtgagagcatgaaacgccagctggatcttgcaagggcgctcgccggtgaaacattccagatgggtgatgccaacgttcatgtcgacgcatggtgcagcgagcccgacgacctgttggtctacaggatgtcatcggatgcgccgattgatgtgaacgtcagtgtctccggcactttcctcaagcaatcacgcgcctcgttggaaacggtatccgacggccatcgggccacactcgtcgtcatgggccggatgcctggactcaacatcgggctcctccctcgtccttccgaacatccttgggaagatgagcaggacggaaccggaatggcgtacgccggtgcgttctcccttaccgtcacaggtggcgacatcaacgtggacgacaacagtctgcaatgttcgcacatcaccggattatcgctccgcttccgca

SEQ ID NO: 3894 - DNA, 13257 bp, Unknown
  R22_24m  MAG No. k141_8677
ggaaatgggacgcctgtgcttcgaactgggcaaccgccacctgagtctcaaggtcgagaacgaccgcgtgctggtgccgtacgaccatccgaccatggaatacacgaagaagatcggttatgaaccgcatatcatcgagggtgggtttgacggcttcctgatcgtcaaggcccacgccggcaccggcacactgattccgggcaccaacaagaccacgggcgacgtggccgaggaggagcaggaagccaaggccgacaaggaattcccggccgaggaggccgccggccatctggatgtgcatacacacgacgcaggtgagggtgagcccggcgaatatgagatgaacggcgtgctgcaccgcccggacggctcccacagccacgacggcggccgcacctggcacacccactgatagccccatgaacatcaacgaaaccgaatcgcgacgtctggccatgctgcaggtgtgcgacagcgtcttccccgtgggcgcgttcgcgctgtccaacggcatggagaccttcgtacagcgcgacttcttgcgccgtggcgccgatttcgaggagtatatgaagaactacctcgaagtcgcaccgtacaaggaaatcgggcagatggtgctggccggcaagtacgccaccgattcgcgagtctcccgcaaagggctggccgagcgactcatcgaacttgacgagctggcctcggccctgcaatccgcacgtgaaatccgtgaaggcagcgagcgcatgtgtacccgcctggtcaagctggccgagcagatggatgccggccaggcgcagacctcggatgggcatcgtgggttcgccaagccaagtcctgccgacaatgccaccgcatccgctgcggattcgtgcgaaaacagcatcatcgccgtgcacgagcatcacaccgaacgccaccagctgcacgatgccgccgacggcctgtacggctcgccgtcgctcgacctgtatgccgggctgattcgcgagcgccgctgccgtggcctgcattcgatcgcgatgggcctgtacgcggctgaccatgcgaacgacgtgcgcgacgcggccatcatgtatggatattcgctgttgagcgcgcttaccatgtgcgccgcgaaggcgattccgctcagccagtacgctggccaagtcgccctgcatgattcgttcccgcgcctcgtgcgcgcggtgaatatcgcgatgacgttgaagcccgaggatctcggcatctccggagcttacctcgacatcgccgccatgcagcatgaaatcttgtactcgaggctctacatgagctaattatcctggctcccctcaaggaggggagccaggataacctcacccgcaaaccacatacctaaccaattcccacataaaggagaaaccccatgtcatacgtacgcatcggcgtcgccggaccggtcggttccggcaaaaccgcgcttatcgaacgcctgacccgcaagatggctgacgaatacagcatctgcgtggtcaccaacgatatctacaccaaggaagacgccgagttccttatcgagcactcacgcctcgcgccggaccgtatcgtcggcgtggagaccggtggctgcccccacaccgccatccgcgaggactgctcgatgaacctcgaggcctgtgaggaaatggcccgcacccacccggacgtgcagatcatgttcgtggagtccggcggcgacaatctgtccgccacgttcagcccggacctggccgacgccacaatctacgtcatcgccaccgatgagggcgacaagatcccacgcaagggcggccccggcgtcacccgctccgacctgctggtgatcaacaaggccgacctggccccgttggttcacgccgatctagacgtgatggcccgcgactccaagaagatgcgcggcgaccgcccgttcatcttcaccgacctgatgggcggtgccggagtggacgacgtcatcgcatggatcaagaagagcgtgctgttcgaggacatgtgatgttttggcccgcccgtatccaaaaacggacgggccgaaacataccgttgcaccaagtgcggcataattgcccatgtcatcgtcaggcaccaatcataagaaggcagcgattcgtccatgggcagtagcacttttcgtctatccactgcattccgccacggacgtaccaaaatcgacgatatttatttcgaggcgccgttcaaactgatgaccccgttcaccaacggacgtcattcggatttcgtcgtgatgctcgcctcccctggcttcctgaggggcgatgaagcccatatcgatatcgacttcggcccaggcaccgattcgaccatcaaaacgcaaagctacgagaaggtgttcgacaccgcggacggctcggccgaacgcaccatcgaactcagggcgcgtggcaatgccaaagccgtgttcctgccgttcccagtgattccgttcaagaacagctcattcatgaacctgaccaccgcgcatatttccgccgagtcagcattcgtgtatgcggatgtggcgacatgtggccgcgttgggatggatgagcgttgggccatgaaacgttttacgaatcgtatgcgcgtatatgtggccgaacccgaagccgtgaccaaggccgccgcagccgaattggcgcaacagcacgcacatcgccgaggccggccttccaaggcggaagccgccgctgcccaaccgcgcgaacatctggcctttgctgaccgcatgctgttggaacctgatgcttttgactacaccgaactcggcatgtggcgcgaattcacccactgcggcgttctctacgctcacctgcccgaactcgaccctagcgacgctgtacaagatgccgcaactaaagaagcatcctccgccgccatccgcgagcgcatcgagactgcccgcatcgccgccgaagacgcgctcatcactcgcatccacgaacacgcagacgccatcggcttcaccggcgagctcggcgtgagccgcgtaatcaatggcatctgcttgcgtgtactgaccacccgaggcgacgacgccttcgacctcattcgagatgtggccgatttcgtgaccgatttcgtggccgaaggctaaaaccaagtggctctcccctttgaggagagccaccagttctctcagaacaggaagtaccgctgggtaagcggcaactcgtacgccgggtcagagtggaccggttcgccgtccaccgtcacttggaaggtttcgggattgacctgaatgtcggcgagcacgtcgttgaacttcagatccttcttgcctaccgtgcggcagccatgcactggtaacacctggcgctgcagctccagcttgcccttgatatcgtcatccacggcggcctgcgaaacaaacgtggcgcaggacttgccaagcgcacggccgagcgcgccgaacatatcgcggtagtagacaggttccggggtcgggatagaagcattcgcgtcacccatacgagagtaggcgatggagccacccttgatgaccatttccggcttcgcgccgaacatggacggctgccaaagcacgagatccgccatcttaccgacttcgatggagcccacgtattcggaaatgccgtgggtgatggccgggttgatggtgaacttggagacgtagcgcttgacacggaagttgtcgttgcggttgttgtcgtgttcgtcttcggggagcggaccgcgctgcttcttcattttgtcggcggtctggatggtgcgggtgatgacctcgcccacgcggcccatggcctgcgagtcggagctcatcatggagatgatgcccatgtcgtgtagcacgtcttcggcaccgatggtctcggggcggatgcgcgagtcggcgaaagagatgtcttcgggcacattgcggtcgaggtggtggcagaccatcatcatgtcgagatgctcgtcgatggtgttgcgcgtgaacggcatggtcgggttcgtggaactcggcagcacgtttgggaagccagcggcacgaatgatgtccggagcgtggccgcctccagcgccttcggtgtggtaggtgtggatggtgcggcccttgaacgcggcgatggtgtcttccacacaaccgccttcgttcagagtatcggtgtggatagccacctgcgtgtcggtttcgtcggccacgccgagtgcagtgtcgatgacggccggggtggcaccccagtcctcgtggatcttcaggcctgcggcaccggcgcgaatctgctcacgcaacggttcggggctggagtcgttgcccttgccaaggtaggcgatgttgatgggcagcgcttcggcggcctcgatcatgcgggtcaggtggaaggctcccgggttgcaggtggtggcgttggtgccgtcggccggaccggtgccgccgccgaccatcgtggtcacgccaccggcgagggcagtgcgaatctgctgcggggagatgaagtggatgtgggtgtcgagtccgcctgcggtgacgatgaggccttcgccggcgagagcttcagtgccggagcccgcttcgagaccgggggtgataccgctcatggtctgcgggctgccggccttgccgatggcgctgattttgccgtctttgatgccgatgtccgccttgtagatgccggtgtagtccacgatgagggcgttggtgatgatggtatccggcgattcaacgtcgagctgcacggagctttggcccatgccgtcgcggaatgatttgcctccaccgaacttcagttcatcaccgtagtgcgtgtagtccttttccacctcgatgatgaggttcgtgtcaccgagtcgcacgcggtctcccgtggtcggcccgaacattcccgcataatccttgcgcgtaataatcttcatgtcaaaagtccttgctgtttttcagctccccttgtcaggggagctggctcgcgaagcgagactgagaggtagtccgctccccgctggcgggagctgtcagcgaagctgactgagggtggcccttagctcagattcccgagaatccaagctcatgcgccttcttaaacgcggcctcccgcacctcagggtcatccaacttcccctcaaccagtgcgctgaagccgtgaatctcacgcgtgccaccaatatcaatcaaccgcactcgatgcgtttcacccggctcgaacctcacagccgtaccagccgcgatatccaaccgcttgccatacgccgccttacggtcgaacttcaggtacttattaacttcaaagaagtggaagtgcgaaccaatctgaatcggtcgatccgcagtgttcaccacgtccagctcgatgtcttcggaaccttcattgagttccaaatcatcgtcagccagcagatattcccccggcaccaacttctcggtggattcgatggggttatgaatagagacgagcttggtgccgtccgggaacgtggcctcgacctccaccacttccagcatctcggccacgccatccatcacatcttcaggcttgagcagcgtgcgaccgtatgccatgagctccgccacagtgcttccctcacgcgcccgctcaacgcattcggcggaaatcaacgcaatcgcctccacatagttgagcttcacgcctctggctttgcggtctttggcaagctgccccgccaagtacagcatcaacttgtcagtctctcgtggtgtaagtctcataacatcctctgttgttgactggagtttttcaggcacaccaatgtgagccctaacatcgcccaataataagagcgttataagaacgggacgtttctcataacgctctatggccataaacgggggtcgaatcaatcacactctcatggattccttggcggcttctacttggtcggggccgccttcgccggtggcgatgaaacggccggaggccaggacgtagtagcggtcggcgcgctcgacggcgaattggaccttctgctcaaccaagaccacaccgatacccttgtcttcggccatcatgcgaatggccttctggatttcggcgacgatattgggctggatgccttcggtcggctcatcgagaatcatgagcttggggcgagtgatcagcgcgcgggcaatcgaaagctgctgacgctggccaccggacagcagaccggcacgtcggccagcaaattccttcaagaccgggaacatttccacggcttcgtcgtaacgggccttggcctctgaaccgtagcggtcggcgaccacgtgcaggttttcgtccacggtcatggtgccaaaggactgctggccctgcggcacgaacgccatgcccttgcggatgcgttggttcggtgcagccttggtaatgtccttgccctcgaaactaatcgaaccggacgaaacgggcagcaagcccagaatcgccttcaacagcgtggtcttaccggcaccgttgttgccgacgatgctcacccattcgccggcggccacgtcgaaactgatgtcgttgacgacggtcactttgccgtaaccggtgttcaaatcctttacttcaagcattgccatgattattcactttctgcggcgtcgtgcatattgatgttgaggcgcgttgtatcaccctcaatatgcactgaaaaagcgcattccgggatgcgatggttgttgtcagtgcggtccatattgcgcttcttcctcttacctactcccctcagtcaccttcggtgacagctcgtccgcaattaaggacgggccttgcctgcaacctgctggttcgactatcgtctcgccttcggctacaaacagcccactgggctgtttgcttaacgcctcggcctcagggaggggagacagggagttagttttctccgccgcccaggtagatgcggactacttcttcgttgttttggatgtcttcgaccgaaccctcggcaaggatttcgccctggttgagcaccgtgaccgaatcggcgaactgacgcatgaaatccatgtcgtgttccacgatgatgaccgtgcggttcttgctgcatcgcttgagcagctcaccggtctgcacacgctcggccggagtcatgccggccaccggctcgtcgagcagcagcaggtgcgcgtcctgcacgagcagcataccgatttccagccactgtttcttgccgtgcggcaggatgcctgcgggcttgtttgcatccacagtcagattgcacacgtccatcatgtattcgatgttctgcgaaacgccgcccatcggctggaacagctcacgacccttcttgcggaagccctcggccagctgcagattctccaacacggacagctcttcaaccaccgatgcggtctggaaggtacgcccgacgcccagcttgacgatgtcgttcggcttgcggcccaacagctgctcgccacggaattccgcggaaccagtggccggcaccagtccggtaatcgcgtcgatgatggtcgttttaccagcaccgttcgggccgatcaggaatcgcaaatcgccgtgctgcacagtcaaatcaagattcttgacggccacgaatccatcgaactcaacgtgcagtccacgaacttccagataatcgctccactggccgccgcgatcatccagcaccgcaagctgatcgtgcagcttcgtacgctcttcaacgatttcggccttcatctgggccgcttcgtcgcgcatacgcttggcttcgtcgcgcatctcaatcatttcggcgcgcaactgctccaaatcggcctgcgatgcaggtgcgggagccgatggattcgagctcatgttcttctcctcactcatgcgttcaccgcctttgcagtagcagtaccggtaccggcaacggcaccagcaccagcaccagcaccagcaccagccgaagctccaaccgaactctttccgagcccgatcttctccttaatccaaggccatacgcccttgaactgtcccaagcccttcggcacaaaggcaatcaccagaatgaagatcaggccttcgatgtacgtccacgcggacggatacgcctcagacagctgcgtttccgcaaagcgcaccagcagcgtgccgaccaccgggccgagcaaagtggcacgtccgccgatcaccacgccggcgagcatcaggatggacggcgtcacgccgatatcggacggcgaaatgatgccgaccactggcacgaacattgcgccaccaatgccggcgaacattgcagccaccgagaaggcgaacaccttgatggaggcggggttatagcccaagaacttcatgcggttctcttggtcgcgcacgccgataatcaggtcgcccataaacgatttgcgaatccagtagacgataagcaccatggccagcgtcaggaacgcgcagatgtagaagatcatctgcttgttggcgttatcagtcaagtcgtaaccaaagaatcccttgaaatcgttgagaccgttggtgccaccggtggttttcgactggccgataagcagcacggcgaacgcggcaaccagcgcctgcgaaagaattgcgaagtaggcgccacgcacgccacggccgaacacagccagaccgaggattgcggcgataatgcccggtaccgcagccacgccaatcacggcgatgaccggattgcggaagagttcccagaatccaggaaccttggtgatgccgtactgggacatgaagtccggcacttggcccacgccaatgtcctcaagcttcatgtggatagccatcacgtacgcgccgagaccaaagaacaggccttggcccagcgtcagcataccgccttggccccaagccaggccgatgccgaccgcgaccatcgcgtagcacaggtatttggacagcaggccgaggttgtacacgctcagcacagtcggagaaaggaagatcagcgccacggcaatgaccacaccgatcaaagccttatatttcgtggcgtattcgctcaaagtcatcttcattgtcgtttccttacccttctgaagcactcacgcgaggttcctggagcggatggagaccaagccctgcggcctgaactgcaggaacaccaccacaatcaggaacacggcaacctgaccaatcgaggcagaggtcggcagttcgatggacgactggcacaagcccagcacgaacgaggcgataaccgcgcccttgagctggccaacgccgccggccacaacaaccagaaaggcctgcacgatgaaggtcgtaccgaagttgaagctaatcgagttcagcaggctcagcgccacgccagcgataccggcgatgccggagcccaggaagaacgtcacatggtcgaccatcttggtggagatgccggaaacctcagcgaggtcgcggttctcggaagtggcgcgaatctggcgacccagcggcgtgagcttcaggatcgcgtacagcgcagccacgcagataatcgacagaataaagatgaacagtcggcctgcagagaagctgtagccaaagatggtcaccggattggtcagcgcttcaggagccgaagcgtagaccggagtggcaccgaaaatatcgcgtgcgagctgctgcaataccagcgatacaccgaaggtaaccagcagcgtatcaagcggacgattgcgcatacgctccagcagcaacacgtccagcagtaaaccaagcaaaccggctactacgaaaccgaccaccagcgccacggccagggacactgttttattgccgatgaccatgctcatgacgtatgcggtgtatgcgccggccatcatgaattcgccgtgggcgttgttgataacgcccatctggccgaaggtcaacgacaacccgagggctgcgagcagcagaatcgatccgttggacagacctgccacaatttgtggaaataacatacccatgttgttgtgtcctcttctctcagttgctctcgacgctggcgctcaggctcttggcccagctgtaggtcttcaggtacgggtccggcttgatgggaccgtccgacttccagacggtgtggatgagcttgtctgagccgatcttgccgatgtatgaggtcttgtagatgtggtggttttcgccgtccaccttgaccttgccttccggtgcattgaaggtgacaccgtctgctgcagccttgaccttgtccacatcgaacgacttggccttctcgaccatgcccttccacaggtacacagatgtgtacgccgattccatcgggtcggaggtggggcgattggctccgtagcgcgccttgaagttcttcacgaacgtcttgttttgcgcattgttcagcgtctggtagtagttccaagcagtgagctggtccttgacgttgtcaacgccgatagcggaaacctcttcctcggcgatagacatggaaatcaccggcgtggtggcggctttcaggccggaagccttgtattccttgaagaatgcgacgttggaatcaccgttcagcgtgttcaccaccgcatccgcgccggagaacttgagcttgttgacgatggtggtgaagtcggtggagcccattggggtatattcctcgccgaccacttccatgccattgccctcggcgtacgccttgaccacgcgatttgcggtctgcgggaacacataatcggagccaaccaagaacagcttcttgtagccttgctccttaaggtaatcaagcgcaggcacaatctgctggttcggtgcagcacccgagtagaagatgttcgggctggcttccatgccctcgtattgcagcgggtagaacagcagcgcgttatccgcctcgaacacaggcagcatggccttacgcgaagaggacgtccagccgccgaacaccgcggccacgcattccttttcgatgagggtcttggctttttcggcgaacacagccggctcggacttgccgtcctgctgcactaccttgagctgcttgcccagcacgccgccctttgcgttaatctcatcaacggccatgtgcagcgaatcactcaccgtctgttcggaaatggccatcgtgccagacagcgaattcacgaaaccgattttgatggtgttgcctgaggtgtccacacatgatgaggtgtcgcttgccgcagtcgcgttgttctcttgggcctctttctcggccacggtgcgaccccagccacaaccgctggtggcaagcactgcggcaacaatgcacaccgcagcacccatcttcagtctttgcaatcgagtcatatgactcttcctccccacatacgactacattccgcgaacgttgcccgcccgcggaatgtctacgctgattgccgtaccgtgccctgatgcctgatatcgtgctgaaccacttgccgtatatcgacggctggcttccggccgactgcactatacgatggcagtgcctgcgtgaatttccgttgcctgaatatttcatatgcgtctcatacataacgctcacgttacaaaatcaacggtgttacgcggcccgccgtcgaacgctgtttacattggtgtgcgatacgcgcgcgactgccgcccaagtgacttccccgcgaactacgggtaggctggggagtatggaacttcacgttttgaatcatccgctggtcgagcacaagctcaccgtgctgcgcgacaagaacactccttcctccactttccgcgagctcgtctcggagcttgtgatgctcgaggcctatgaggccacccgcaacctgtccgtagttgccgcaccaatcgaaacaccggtcgctccgatgaccggtaagaagctggccaaaccgcgtccgatcattgtgccggtgctgcgtgcaggtctgggtatgctcgacggcatgacccgtcttatgccgaccgccgaagtcggcttccttggtatgaagcgcgacgaggaacaccccactcagcaggtcacctatgcgaaccgtctaccggaggatctgtccggtcgtcagtgcttcctgatcgacccgatgctcgccaccggtggcacgctggttgctgccacgcactatctggccgagcgcggtgccaaggacgtgaccgcgatcaacatcatcgcggcgcctgaaggcatcaagttcgtggaagagcacatcgatccgtccatcgacttcaaggtcgtagtgtgcgcggtcgacgagaagctcaacgacaagtgctacatcgtgccggggttgggcgatgccggcgaccgtctctatggcgtaattgactgattttcctggctcccctcagagaggggagccaatgtgatgggctttttatgcaaatcgacattattgcgctgggacgcgtgaaggaacaatatcttcgcgacgccatcgacgagtattccaagcgactttcgcgctactgcaggctcaacatcattgaagtggcagatgagaaaacgcctgaccacgcctccgaaggcgttgaccgacagatcaaggccaaagaaggcgaacgcatcgccaagcatctgaaggacggcgcgtttgttattgcccttgccatcaatggcaagcagctgtccagcgaagaattggccgccaaaatcaacgaccttggattgcgtggcaccagccatattcagctggtcatcggcggctcaatcggccttgacgacgcgattctgcgtcgtgctgattttctgctgagtttctcgaagatgacgttcccgcatcagctcatgcgcgtgattctgctggagcagatttatcgcgcttataagatcaacgctggcgagccgtatcacaagtaaaacaccatacctcatggggcggtaaaaccctcatggggcggtatgccaaaatggcttaattccgcggtttcacatattcttcaaaccgccccatgggcaagttaccgccccatgggcacatcaataacgccctcaacctcacactgcgtcggggacgaacgcttcgaagatgtggcggtcgaagtagggcgcgcactgggcgagttcatcgctgctgcgcacggtccatgaaaccggcatcgcacccatcgaacgagcgagcctgacttgcggcgaagcgccaccggtccagtcataggccacgaaatcaggacgagacagccagtcgaacgccagtaagccggcggcccattcagccgcaccattcttgctcagcttcgccggccagctcagctgaccgcggcacacctcagggtgatgctccttgtaccaattcaccgcgcccggatggaaggattcgatcacgtacgggccgtcatacgcctcaagcaaggcgtggcccttttccatgagctcttcgctacgctcatcccaagccttgttgtcgctgaacttgtattccacaatcagcggagcctggccggccaccacgtccagcacatcggagaacagcggcacatgctggtagta

SEQ ID NO: 3895 - DNA, 32665 bp, Unknown
  R22_24m  MAG No. k141_8785
atcggccgcacctggcaggtctcgaccatccagctcgacttcaacctgcccgagcgtttccagctcgagtacatcgcgaaggacggtacccaccagcgtccggtgatgattcaccgcgccctgttcggctccatcgaacgcttcttcgccgtgctgctcgagcactacgcaggcgccttcccggcgtggctggcccccgtgcaggtgctcggcgtgccggttgccgacgagttcgccccgcatctggccggtttcgtcaagtcccttgaggacgagatggtccgttgcgagatcgactactccgacgatcgcttcggcaagaagattcgcaacgcctccaagtccaaggtgccgttcatcctcatcgtcggtgaggaagacatgaacaacaacgcggtcagcttccgcttccgtgacggcagccagctcaacggcgttccggtggacaaggcccgcgagcagatcctcaccgtcatcaagaagcgcgtccaggtgaactccgccgacgacttcaacgccgctgtggctgagtgatgtgaatggtactggctcccctctctgaggggagctggctccgtaggcgactgaggggagtcctgcatggctcgcactccccccagtccgtttcacggacagctcccctcagagaggggagccaagaaagggtgcgaaaatgactgacgtgcgtgtcgataatccggcggactttccgcctcaggaggacacggtcgaacgactgtggactccgcagcgcatgacctatgtgctgcgcaacagcgaggatcgcccaaccaagcccaagacgaaggaatgcccgttctgcgccggacccaagaaatccgacgaagacggcctcatcgcctggcgtggcacgcacgtgttcgccatcatgaacctctacccatacaatgtcgggcatctcatgatctgcccgtaccgtcacgtcggattcatcaccgaactcgacgatgccgaactgttcgaattcgagaaggccaccaccctcgccatgaaggtgatggaaaccgtctcccgtccgcacggttacaatatcggcattaatcagggcgaagtagcaggcgcaggagtcgccgctcacctccatcagcatgtagtgcctcgctggaatggtgacgcgaacttcatgcccatcgtcgcccagacacgcaccatgcctattctgctgtccgaccagcgagaagcctatgcccaggcattcgaacagctggctccgcagtatcatctgccgcttgcctaacacaggtgcggcaccccgcgtgaccggtcttatcggtacgcataacaagacaatcatcggaaacatcacgggtatgtctgattaacggcctacaatcgtttcgtttgacatcatccgtttcaataattgctaggagcattatgtcaggtcattccaagtgggcgaccaccaagcacaagaaggccgccatcgacgccaagcgcggcaagctcttcgccaagctcatcaagaacatcgaaatcgccgcccgcctcggcggtggcgacccggacggcaacccgtccctgtacgatgccatctacaaggccaagaaggcctccatgccggccgacaacatcgctcgtgccgtcaagcgtggtgccggtgctgaagacggcgccgccaactacgaagacatcgtctacgagggctacgctcctgccggcgttggcctcatcatcgaatgccttaccgacaaccgcaaccgtgcggccgccgaagtccgttccaccctgaccaagggcaacggctccctggccacctccggctccgtgtccttcaacttcgagcgcaagggccagatcgtggtgccgtccgagggcgtggacttcgacaagctgttcgaaaccgccgccgaagccggtgccgaggacgttaccgatgacggtgaggtgttcaccgttgtgaccggtccgtccgacctgttcaccgtgcgcaaggctctgcaggacgccggcttcgactacgattccgccgaccaggtcatgcagccgaagaacgaggtcgagttgagcctcgacgatgcccgcaaggtgtccaagctcatcgacaacctcgatgacctcgacgatgtgcagaacatctactccaactggaccgcttccgacgaggtgatggcccagctcgacgaggagtaatcctcgtgattatccttggcgtcgaccccgggctcacacgttgcggggtcggcgtgatcgaagccggcgagcaccgccggctttcgtttattcacgtggacgtggtgcggtcctcaccggatatcacccaggatctgcgtctactggccatctacaacggcctgtccgagaaaatggatcgcttcgcacccgatgccgtatccatcgaacgagtgttcgcacaatccaaccgcaacaccgtactcggtaccgcacaggccgccggcctcgccatgctcgccgccgcgcaacgcaatattcccgtggcgttgcatacgcctaccgaagccaagctggctatcaccggtaacgggcaggcgcagaagattcaggtggagcgtatggtgacacgtattttgaacctcaccaaaatgccgactcccgccgatgccgccgatgccttggctttggccatttgccatgcgctgcgcccggcaggcgcattgcagggcggcgaacgcgaacaacatctgaccgccgcgcaacgccagtgggctgaggccgcacagaaatccacgcgccgccgcatcaaccacgaccgaggcatgtagtatactttcgaacagttgttcgagtcttgaatcctggagccctgaaggagtacctgtatgatcggcatgctgaccgggcgggttgaatcggtcgaaaccgataccgcattgattgatgttgggggagtgggctacgaagtgcgcatgtccgccaccgacctgagccgtctgcacgccgggcaagacacccgcgtcttcacctatatgaacctctctcaggatgccattaccctgcatggattcctggatcgggacgccaagaaaacctttctgcaactcatcaaggtctccggcattggacctaaagtggcccaatcgttactctccacactgacgccgagtcagctggcccacgccatcgccgacaacgacgccaccgcgctggccaaggctccggggctgggcaagaagggcgcacagaaaatcatcctcgagcttaagggctctattgatttgagtcagatcgagggtgcttccgctcaggcggcaatatccgagtctccggtggataccggtacggaacaggttgtcgaaggactgatttcacttggctggcgtcagcaggacgcccagcaggccgttgccgaggcttgcgccgaaaacgatattcccacgccgcttgccaccgacgatgtgccgcgtgtgctacgtctggctttggcgctgatggataggggccgctgatgagcgagacaacggattacggtacctcaaacaccggtgccaacgaagagtcgttacgcatggtctcctcccagccgatcggcaacgagccggtcagcgacgaggagctgcgcccccatgttctcgaaggctttatcggacagccacggctcaaggcccagctgcaactgttcctggacgcggcccgcaaacgcgatgtgccaccggaccatattctgcttgccggtcctcctggcttgggcaaaaccacgttggccatgatcgttgccaatgagcttgaagtgccgattcgcgtgacttccggccctgcggttcaacatgccggtgatcttgcttcgattctgagctccctcgacgtcggcgaagtgctgttcatcgacgagatccatcgtctgccgcgcgccgccgaagagctgctgtatatcgcgatggaggacttccgcgtcgatgtgatggtcggcaaaggcccgggcgcaagctccatcccgctgaccctgccgcgattcaccgtcatcggtgccaccacgcgcgaaggtatgctgccaagcccgttgcgcgcacgctttggcttcaccgcacatctcgacttctatccgcatgaggagttggaaaagctcatcgaacgttcggccaacgtactgggcgtaaaccttgatgcgggttccgctcatgagcttgcgttgcgttcgcgcggcacgccgcgtatcgccaaccgattgctacgccgtgtacgcgactgggccatcgtccacgacctgatcgtggtgcggccggacgacgtcaaggaggcgctggccctgtaccagatcgactccgaaggcctcgaccggctggacatcgccgtgctcaatgccatcgtgcgcaacttcaacggtggacccgtgggcctgaacaatctggcggccatggtgggcgaggaatcggaaaccgtggaaaccgtgtgcgagccgtatcttgtgcgcgaaggttttatgattcgcacgcccaaaggccgcgtggctaccgagaaggcatggcagcatttgggaattacgcccaaagatgatgtcagcaagctcttctagactttctcctgtttgcacacttggcggcgtttcgtcaatgtcgctcgtttgaaggagttgtttcgtggaacaacagtacattatgctcatcgtgatcgtcgtcgtgttcggcggcatgatgtggtggcagtccaagaaggccaagcagcaacagcaggagaagcaggacttccgtcgcaacctgcagcccggcaccgaggtcatcaccatcggccaggtgatcggcaaggtcgtcgaagtcgacgagcagtatgaggagatcgtcatcgactccgaaggctccaagctgcgtttcggcttcaacgccatcgcccgtgagtacacccgcccggcctatgtgtccgatgatgaggtcgacgagaacggcaacccgctgcccgacgaagacaccgaggctccggctaacgatgaggctggtcaggttccgatcgaggcgtccgtcgtgtccgaggaagacaccgctgacgagatcggtgacgacaacgaaaccaagacgaagtaagctgttcgattcggtagcaccatccgagtatcgcatcgcaaaggcataaaaggggcgagcactatggcacagtcggacatcaccatcgacgcattgagcaaggtagggcaacaggacgccgaatatctggtgtccttggtgcgttccataccggggtttcccaaggaaggcattatcttccgtgatttcatgccagtgctcgccgaccccaagggcttgaagattctgctcaaggcgcttgaaacggctctgccggtgtccccgagcgaattcgactccattgccggcctcgaatcgcgcgggttcctgttcggcccggccatggccgcccatctgggcaagggtttcatcgccgtgcgcaaggccggtaaattgccgcccgaaaccatcggtgaatcctatgacctcgaatacggcacggccagcgtcgaaatcgaaaccgacgccgtacaggcgggggagcgagtgctcattgtcgatgatctcatcgccacaggcggcaccgccaaagccggcgccgaccttatcgaaaaggcgggcggcactgtggtgggcttcagttttgtgatgcggctcgatggtctcgacggtctggataagctcggcggcaagcccagcagctcgctgatcgcgatgccggcctgagattccgtctcacccaacgtacagttagttttcaaggtccggcatgtactgtgtacagttatatgccggaccaattacatagtcagggaaggatcgatggatctttacgaatatcaggcgcgtcagctgctcgaggaacaggacattcccaccccggacgccatctttgcccagaactcccatgaagtcgccgaagcggcggacaaaatcggctatccctgcgtaatcaaggcgcaggtcaagatcggtcatcgtggtcaggccggcggcgtcaagatcgcccataaccgcgacgaggcgattcttgaatccgagtccatcctgccgatgaccatccacgggcacaaggtttccggcgtgcttgtggccgaagccaagaacatcctgcacgaatattacgtgtccatctccgtggaccgcacctcgcgcgacttcgacgtgctggccaccgccaacggcggcaccgaagtcgaggaaatcgccaaggaacatccggaggccgtcaagcgcctgcacatcgatgcgctcggcgacttcgacctggccgctgccaccgaaatggcacagagcatcggcttctaccacgcggacgtcgatcaggccgcacagattctgctcaagatgtggcgctgcttcaaagacaacgatgccacgctcgtggaaatcaatccgctcgccaagatcggcgacccggatgacgaatccaccaagcagctgagcgccttggacgccaagatctccttggatgacaacgcctccttccgccatgatggctgggcgcgtttcgtggatctcatcgttcccgaccccttcgaacagcgcgcccgcgaacacggcctgcactacgtgcacctgcacggcgaggtcggtgtgatcggcaacggcgcaggactcgtcatgagttccctggatgccgtctccggcgctggcgaggaacagggcaccaacatcaagcccgccaacttcctggacatcggcggcggcgcctccgcagccgtcatggccgaaagcctggagatcgtactgtccgaccctcaggtcgaatccgtgttcatcaatgtctatggcggcatcacctcctgcgtggaagtcgccaacggcatcctcgaagcggtcgccaagctcggcggttccaagccgatcgtcgtgcgtttcgatggcaacgccgccgccgagggtctgcatatcctcgcttccgccaacaatccgaatatccatgtgtccgaaaccatggaaggcgcggcagccaaggccgcgcagctcgccggtgaggcgacccagtccaaggaggttcgctgatgctgttcatcgaagacggcgctcccgttatcgtccagggcatgaccggccatcagggcatgacccacacggctcgcatgctcaaggccggcaccaatatcgtcggcggcgtgaacccgcgcaaggccggcacatccgtcaccttccccggtgccaagaacggtgccgacgtggacatccccgtgttcgccacctgcggcgaagcacgtgaagccaccggcgccaaggccagcgtggtgttcgtgccgccgaagttcgccaagtccgccgtggtcgaagccgtcgaagccggcatcgaactcatcgtggtcatcactgaaggcattccggtggccgattccgcatacttcgtcgaactggcgctcaagaagggcgtgcgcatcatcggaccgaactgccccggtttcatcacgctcggcaaccctggcgtcaacttgggcatcatccccgacggcatcgtcggccgcggcccgctcggactggtctccaaatccggcaccctcacctaccagctcatgggcgaactgtccgatatcggcttcaccgcatgtctcggcgccggcggcgatccgatcgtcggcacgacgctgctggaagccctgcaggcattcgaagccgaccccgacaccaaggctgtcatgatgatcggcgagatcggcggcttcgccgaacaggacgccgccgcatgggccaaggagcacatgaccaagccggttgtcgcctacatcgccggtttcaccgcccccgaaggcaagcagatgggccacgccggcgccatcgtctccggaggcaagggcaccgcccaggacaagaagaacgcgctcgaagcggcgggtatccccgtgggcaagaccccgggccaggccgctgaaatcatgcgcgacatactcgccaaggccaacatcgactgatcggttccaaccaatcgtgatgaaagccgtgattcgccaatgggtgcggggagccatagtcgccctcgcatccatggccatctatgccgttgcattaggttgctatacagcgctgatgttattggttgtctccatggaagagggcggcgacaatctcaccgtcggcacaacctcgctgacacaggccgttgtgcttctgagtgagggatcgggctctagaaccgattcgttcaccctcaccatcacgccattgatgttgaccatactgctgatatggctgatcaatgcactcaccatgcgaatcaaagcatacgggccgcatgcgtatgttgccggattgaatgtttggctcgggttgaacgaggcattccggcaatccgtacacctaggtcttgtcgatgaccagtggctggtgttgctgaaagcagccatcgtattctcgatcggtttcctatgcgcagccgtaccggaatcagccaagatgcgagcattcagggactggactcgcaagcaggtgccggcggacatacgccactgcctgaaaatcggcgtcgtcttggccgtcgcgatactgggcatatacctggcaattggattgattaccgtcatcgtatggtcggtacgcaaccatgccgctgtcgtatcgttgttcgaattgtccgggatggaaaccggttcacgaattctcaccaccgtcgccatgctgatctggctacccaacgtcatgctctgggctgtttcctggctcttcggcggcggattcgccatcggtgatttggccagtttcacgttatggctcggccaatctaaagagcttcctgcaataccggtattcggtattctgcccgaaccggtcagcagcgaactatggcgtaccgttgccttgaacgcgcctctcgccatcgctgcgctcgtgggcctgctggctgtattcctgccgcaaggattcgcctgcagaccgttgaatatacggaatgcgtccacccgcggcccagtactggtttcgctgatctactccgccgggtcattctgcctgagcgcgatgctgatctcactggcatccacattgctgttcgctctgtccaatggatcgcttggcgatcatcgtctcgctcacattggcgtcgacgtcatggcctccaccagagtcgtcggtcattcgaccgcattgggatttaccgcggcatggctgctcgcgctgattggcacagcgctcgttttttcgataggctggttggttgggaggatcaatgattcccgcaccaccgccgcgaccccgaagaccgtcatcgtccgtcaggcgcggtccctggcgtcacaaccacaagaatccaaggaggaacaggatgacaaacacgaaccgaccgatccgtcgggcactggtctcggtctttcataaggaaggcatcgaagtactcgcggaagcgttcgtgaaggccggcaccgaagtcgtttccaccggttcgaccgccaggaagctcgccgaactgggcgtcaaggtaaccgaggtgtccgatgtcaccggattccccgaatgcctcgacggccgcgtcaagacgctgcatccgtacattcacgccggcattctggctgatatgaccaaccccgagcatgccaagcagctcgaggagttcggcatcaagccgttcgacttggtggtcgtcaacctgtacccgttcgccgacaccgtgcgctccggcgccaacgaggccgataccatcgagaagatcgacatcggcggcccctccatggtgcgcggcgcggccaagaaccacgccaccgtggccatcgtcaccgatccggccgattatgcactggtcgcctcccgcgtggccgatggcaccggcttctctctggacgagcgcaagtggcttgcagccaaggccttcgcgcacaccgccgcctatgacgccaccatcaacgagtggaccgccaagcactggcccaagccggcctctctggacgccgtcgaggtggacaaggacgatcagggcactgaagtcgattccgccaagttcccggcccagttcacccgcacctgggatcgtgcgcacaccctgcgctacggtgagaactcccaccagcaggccgccctctacattgacccgctcaaccagaccggtttcgcccacgccgagcagctcggcggcaagccgatgagctacaacaactacgtggacgcggacgccgcctggcgcaccgtatgggatatggctcccgccattgccgtggccgtagtcaagcacaacaatccgtgcggtctggccatcggcgcgaccgcggccgaggcccacaagaaggctcacgcctgcgacccgatgagcgcctacggcggtgtgatcgcctgcaactccaaggtcactcttgagatggccgaaagcgtgcgcccgattttcaccgaagtcatcgtcgcccccgactatgagccggccgcgctcgaactgctgcagaccaagaagaagaacctgcgcatcctcaaggtggccgagccaccgaagggccacgaggccatccgccagatcgatggcggcctgcttgtgcaggacaccgatctgatcaacgccgtcggcgacgatccggacgcctggaagctcgtggccggcgatgccgccgacgccgacacgctgaaggacctcgtgttcgcatggcgtgcaatccgctgcgtgaagtccaacgccatcctgctggcccacgaccaggccacggtcggcatcggcatgggccaagtcaaccgcgtggactcctgccatctggccgtcgagcgcgccaacacgctggccgatggtgccgatcgcgccaccggtgcggtcgcggcatccgatgcgttcttcccgttcgccgatggtgcccaggtgcttatcgacgcgggcgtcaaggccatcgtgcagcccggcggatccatccgcgatgaggaggtcatcgaagcggccaagaaggccggcgtgaccatgtacctcaccggcacccgccacttcttccactgatcgggactctctgaggggagcagctcagccaaaacgcacaaaggtgggattccgcctgacccgtcaacgggtccaagcggaatcccacctttgctattcgcctgctattgtggtcacgtaaccgttcgacagaaggaatcgcaacatgcacaaccatccctatgtatccgaagcgcatgagggcaagccatggtttgaatggtgcgtactcggcgtcgtcgccgtcatcacactgctggttgctttcggatatacgatggccgccacggtcatacttgccgtgacggccatcatcaccgggcttgttcgcctgattcttcaggacaaaagcccatggaaagtgcgctcagtggcgttcgactccttcatcggcatcgccttgggaatcggcctgctgattacctacttcagcttctttggactcttcggcaacatctttttccgctgaatcgccatcagacgaggcggcctgatcgaagaattcgccatcgtcgagcgtgtccgcgttcgcatcggcatccgtctgtggaagatcggcggcagccggcactttgggagtggtcatcatctgcgcgatgatcatgaccaacgccaccacagcggcagccaagaccgggctaatccagaacacccacagctgttgcagcggattttgcgtaagaccctcattcatcgcggccagtgcgataccggtggaacgggcgggattgagaccggcaccggtaaccgggtagctgatggcggcggccagaccataggcaagacccatggcaatgacatgacggtccgaggactcgccgtgatcacccagagaagacatggcggtggcaacgacaatcagagaggcaacgacctcgacgacaatcgccagcgtaatcgagaacgtaatgccatactgggtcagcagcgagtaagacacggagccgttctcgaaaccgttaacggccggagtcagccacactttggcagctacctgctcggatgtgggcagcagcttgaccacggcgaagccggcggcgatggcaccgatgacctgagcgatcacatagaggatgccatccaggattttcgtcttggaaaccagcacggaggctacggtgatggccggattcagctggccaccggacacgcgggagaagatggcggtgactgcggcatatgccaagccggtagccaacgcgaagaacacgatattgatgccatacacggccgaaccccatgtggagaaggcgtaaatggcaaagcacagcaggaagctgccggccaattcggcgcacacgcgcagggccagcggctgttgcttggtttcttccatgattgttcattccttttcatctgttggaagacgggcgaacccgcacaaacggttgccagtctagcagcagtcctacgttgcggtatgatatataggttggaattggctgggattccagtccgccaactctgaagtatgtatacaaatcgacagtctctgcgatgacagagtctgtccggccacgttgggagaacgatgccaaacgcatattcccgcgctgcgaaagcgcaagacgattccaattccattcgactccagaagctgcttgcccaagcgggattcggttcccgccgcaagtgcgaggacatgattaccgaaggccgtgtcgaggtcgacggtgaactggtcaccgagctcggaactcgcgtcgacccccataagcagcaggtgcgcgtagacggttcgcgcgtacgcgtcaatccgaaccacgtcactctggcactgaacaagccccgcaaggtgctctccgccatggacgacccgaagggccgctacacgttgcgcgacatcgtgggcgacaagtacgagcgcatcttccacatgggccgtctcgactacgattccgagggtcttatcctcatgacgaacgacggcgaactctcgcagcacgtcatgcaccccaagtacgaggtcgaaaagacctacgtcgccacactggaaggcaagatctccggcaccgtatgccgtcgactcgtgaccaccggcgtacagctcgacgacggctggatcaagctcgaccactgcgcgatcatcgactcctcacgcgaccacacgatggtcaaggtcgtgctgcactccggcaagaaccgcatcgtgcgccgtatcttcggctcaatcggcttcccggtcaagcgcttggtgcgcacccagatcggcccgatcaaactcggtgatttgaagcccggttcctaccgcgtgctgtcccagacggaagtccgttcgctgtccaaggaggttggcctgtgattcgcgttgccatcgacggccccgccggcgtgggcaagtcgtccacgtccaaggcgctggccaagtatttcggatacgcctaccttgacacgggcgcgatgtatcgtgcctgcgcttggtggtgcctgaagcagggcatcgatctggacgccgaaaccgtggatgagcgtgtcatcaccgaagcggtgggcgagttcttcaccggcgaccatttcgatatctccgtggacccggacaacccctgcgtattcgccgacgacgaggacatctccgaggccattcgttcctccgaagtctccagccatgtctccaaggtgtcgaacgtcatcccggtgcgcaacgtgctcatcgccgcccagcgcgcctacatcgcccgcgaggcgtcggccgactccttctccggagggttgggcatcgtggccgagggccgcgatatcaccaccgtggtgtccccggacgccgaggtgcgcgtgctgctgaccgcccgtgaggaggtccgtcaggcccgtcgcaccggccaggctgtcaagggcgtgggcgctgaggatgtggccgcgcgcgacaaggccgattccaaggtcaccagcttcctgaccgccgccgatggcgttaccaccatcgacaattccgatctggacttcgcccacacgctcgatctgctcatcggtgtggtcgaggacgccatcgagaaccaagaatacgagcagtatgccgccaatctcgaaggctatgagctggacgaaggcgatgaggatctgatttccggccgtggtttcacggaaggcgcgcgcaaggccggtcccaagccggtgggcgtgctggctgttgtaggccgtccgaacgtgggcaaatcatccctggtcaaccgtatcctcggccgccgtgccgccgttgtggaagacacgccgggcgttacacgagaccgtgtgagctatgacgcggaatgggccggcaccgacttcaagctggtggacacaggaggctgggaagccgacgtggaaggcattgaatccgccatcgcctcacaggcacagattgccgtgaccttggccgatgccgtggtattcgtggtcgatgggcaagtgggcatgaccaccaccgatgagcgcatcgtcaagatgctgcgtgccgccggcaagcctgtcgtgctggccgtcaacaagatcgacgaccaggccagcgaataccttgccgccgaattctggaaactcggcctcggcgaaccatactcgatttccgccatgcacggcaggggagtgggcgacctgctggacgtcgcgctcgacaagctcaagcaggccgagaagacttccggctacctcacgccttccggcctgcgccgcgtggctctggtgggccgcccgaacgtgggcaagtcgtctctgctcaatcagctggcgcgcgaagaacgtgccgtcgtcaacgatttggccggcaccacgcgcgaccccgtcgacgaaatcgtcaacatcgatggcgaggactggctgttcatcgacaccgccggcatcaagcgacgccagcacaagctcacaggcgcggaatattattcctctctgcgcacgcaggccgccatcgagcgctgtgaattggcgctgattctgtttgatgcctcgcagccggtatccgatcaggatttgaaggtcatgtccaccgccgtggatgcgggccgtgcaatcgtgctcgtattcaacaagtgggatgcgatggacgagttcgacaagcagcgtctcgaacgcctgtggaacaccgaattcgaccgtgtgatgtgggccgagcgtgtgaacctgtccgccaagaccggctggcacaccaaccgtctgacgcgagccatggataaggccttggaatcctgggatcagcgtattcctacaggcaagctcaacgccttcctcggcaagatccaggccgcccacccgcacccgttgcgtggtggcaagcagccgcgaatcctcttcgccacgcaggcgtccacgcgcccgccgcgtttcgtgatcttcgccaccggcttcctcgagcacggctaccgccgctacatcgaacgctccctgcgcgaggaattcggcttcgaaggcacgccgattcagatctccgtgaacatccgcgagaagaagaagcggaagtgacacgcgcgtaatttgccagatttcatatatctggtagattatctactcggtgcttttgcaccatcgggccgtagcgcagtttggtagcgcacttgactgggggtcaaggggtcgcgggttcaaatcccgccggcccgaccgattagccccggaattccgccacttctgagtggttgctttccggggcttttccgttttcagacaacatgagacaacatgacgacggacttacctttgtaagccattcgtaatggattaaacacggacttcatcttggcgtgttattggaattatcaccgacaattcaccgcctccgccccccgtcgtatgtgtttgccccaaacaggggctagactggttcctattgatttgatgaaagggacccgaattgaccgaaataaacgataaggcccaactggatatcgccgccgctgacgacaccgacgccgtcacctcggatatccccgaagaaaccgtaaacacccccgaagtggatgagactttcgagctttcggccgccaagatgcgcgagcacggcatgagcgaaaccgccatcaaccagttccgccatttgtatgacgtatggcgccatgaagaagcctccagctggattcgtgaggacgacatcgagccgcttggccacgtgcccagcttccacgacgtctatgagaccatcaaccacgacaaggccgtggacgccttcgccaagaccgcattcctcaagctcaatggcggtctgggcacctccatgggattggacaaggccaagtcgctgttgccggtgcgtaggcacaaggccaagcagatgcgcttcatcgacatcatcatcggtcaggtgcttaccgctcgcacccgcctgaacgtcgaactgccgctgacgttcatgaattctttccgcacttcggcggacacgatgaaggcgctcaagcatcatcgcaagttcagccagcatgacgtgccgatggaaatcatccagcatcaggaacccaaactcgtggccgccaccggcgaaccggtgagctaccccatgaacccggagctggaatggtgcccgcccggccacggcgacctgttctccaccatctgggagtccggcctgcttgacgtattggaggagcgcggcttcaagtacctgttcatctccaattccgacaatctcggtgcacgcccctcgcgtacgttggcccagcacttcgaaaacacaggtgccccgttcatggccgaagtggctatccgcaccaaggccgatcgcaagggaggccatatcgtgcgagacaaggccactggtcgcctgatactgcgtgaaatgagccaggtccatccggatgataaggaagcggcccaagacatcgccaagcatccttacttcaacaccaactcgatctggattcgcatcgacgctttgaaagacaagctcgccgaatgcgatggtgtgttgccgttgccggtgattcgtaacaaaaagaccgtgaatcccacggacccgaactccgaacaggtgattcagctggaaaccgccatgggtgccgcaatcggtctgttcaacggttctatctgcgtccaagtggatcgtatgcgcttccttccggtgaaaaccaccaatgatttgttcattatgcgttccgatcgcttccacctgacggacacgtatgagatggaagacggcaattacatcttcccgaacgtcgaacttgatccgcgatactacaagaacatccgcgatttcgacgaacggttcccctacgccgtgccatctttggccgcagccaactcggtttccattcagggcgactggacattcggacgtgacgtcatgatgttcgccgacgccaaacttgaagataagggtgagccgagctacgtgccgaacggcgaatacgttggcccgcaaggcatcgaaccggacgattgggtgtgatttacaacacggtcgaacgataaaaaagatattatttttgtgaaatggcgctcaactgtggaaaaagcctctaagatagagtgagtgtggggaaactcatacgcacttataacgaaacaataactatacgtgaggactaatggcagagggcacaagcggacgtcggcgtttttccgacaaatggggcaagcacgagctggacgtactggctgtgttgtcatccgcgttcccgcaatggctcacatcccgccaaattgcgcagcgcgtcaaggcttacgccgactcgtatggagagctggcagatcaggccgccaaggccgcgttcgccaagcagttccagcgtgatcgcgccaagctcgctgcgatgggcattgccatcgaatcacggcagcctgagtactcgtccaagtcggaaggccaggacttcgcatcctatcgtctgcagttgggcgacgaaccgcgcatccgcctgatgttcgagccggaagatatgccggtgcttgccgccgccaactatctggctcgttcgatgtcgatttcttccgagccggatcagtcccagctcacccagcatgtgtcgcgcactacgccgcgtgtgccgcagaccccgattcccgggcttggcttggattcgattgcgcctggcttggggacgcagcccattccggattcactggtcaaggttattgattcgcgtcgtttcgccgccaccgttgacgtggatggcgaacacctgaacgtggcgtacaccgattccgacgatttggccatgtttgtgcttgagcatccgggggccacgattgtcagcccgcaagaggctgtggacgcttatcatcgccgtttgcacgccgccagccggttcactctggccgacgaatccgccagtcctgtgagcgcttcggtggtttccccgtcgattagtcgcgatgtgcgagagccgggtgatcccgagtctatcaaggctcagaacaagaagaacggctccgctttccaaacgggcagtgaggttgatcgtcgcctgcgtctgatgctgttcctctccgctcatctgggtgaggaattctcgatgagcgagctgggcgaacgctttatcggcaagccaaagaacgatgatgaactcaagaaattcgtcaacatcatccataaggacatcaacaccctgaccaccgtttccgacgatggtgagatggccggcagccagttcttcgatattgactggccgctgctggatgccgagggtattgtttccgccaccaattcgctgggccttgaacgtcttgccggcatttcgccgcaatacctcagcatgctcaccgcctcggtcagctacctggcgcattcgccgttgctgccggacaagcagcgtgggcaggccgaatccctgtatgagcgtttgcgccgtcatgtcagtcccggtcagaccccgtggctgagcctgaccggctatgagctggagccccgaagcttctccatcgtcaagcgtgcgatcaacaccgattcgctgttggacatggagtacaccgacggtacaggtcgtacccgccgcaagctggtggcccccgccaagatcttcattgacgaaggcgtgtattatgccgccgtctacacggacgttggttccgccgcacccaaggacaaaaaggcctacgtctccaaagacaagaccctcgacaaggccaacggcaagccgcgcatctggcaggtactgcgattggcccgtatcgaaaaggcggaactggtcaagcccaccaagcagatcaacatcccgaacatgccggtgagcgaactgcgcaagtggagtttcgacaacggtaccgacgcggtgttcatcaccgatcagcgcgatctggcattcatcaagacattgccgggcgctaccgtcgaacaatgcggtgccggtgaaaaggtgcatctgaccgtttcctccgattcctggttcgtggccttctgcatcgcccacgcgcgtcatatcacggcggtcgccccggaaacgttgcgcaccatgatcgtggcacgcgccgaacgcgaactgagcatcagcgagaacaagtaaggagcctttcatgccttggtggatatggctgattctggccctgttcatgctggccatgattgttgccggactcatctatgcagcccttcatggactccgtgccttgaaagacatgtccgacatcggcggccaactcggtgaacgcgtggccgcgatgggggagcccggcacctctgccgacaccagcgagccgcctctgttcactcagccgctcagcgtggcacagaatcgttatgccgaggcccatgcgaacgtgattcgcagcaaggccgccaagcgcgaacgccacacccaggcatgggcccgctggaagcgattcaacaactaacggaaagcagcaatggcacgtcaccaacaccataagggcaatgccgattcccagacgctgagcccttcgcagcggtacgcatcattccaaaaggtccaacgccatcgggcgtccgcagcagcgcgattcgccgaatccctgcctttcgaactggacgacttccagaccgaagccaatgacgcgctcgaagccggcagcaacgtactggtcgcggccccaaccggtgccggcaaaaccgtagtggcggattttgccatttacctcgcccaggaacgcaacgtcaaagccttctacaccacaccgatcaaggcgttgagcaatcagaaataccatgatctggtcgacgtgtacggcccggacaaggtaggcctgctcaccggcgacacctcgatcaattccgaggcggacatcgtggtcatgaccaccgaagtgctgcgcaacatgctctacgagcgttccaccacgctgaacgcactgcgctacgtgattctcgacgaagtgcactatctggccgaccgattccgcgggcccgtgtgggaggaagtcatcatccacctgcccaagacggtcaagatcgtcggcctgtccgccaccgtgtccaacgtggaggatttctccaactggattgcctcggtgcgaggcgacacaaaactggtgatcagcgaacaccgccccgtgcctttggaacagcacgtcatcgtgcaggcggacgaacacaccgagcccgaggtgctggacctctatcgccgcgacggcaacggcgagcagaccaccaaactcaacgccgaactcatcaaccggctcgaccagttggaccgcaaggccgcacgccggcgcggcgaggaacgccccgataagcgcaagggcttcggcagaggccgcggcggcaaaggcgccaaagaccgtgccccgaaagcggaacgccacaccccgcgccgctgggccgtggtggacgagcttaacttcctgggaatgttgcccggcatctacttcatcttctcgcgcaacggctgtgaccaggccgtggaacagtgtatcaacgctggactggagctcaccaccgatgaggaagtgaccaggattcgccgcatcgtggatgagatggtggaggggcaactcactcaggaagacctgaaagccctgcagttctccaagttccgctttgcattggaagaaggcttcgcttcgcatcatgccggcatgattgccctgttccgtcagatagtcgaacgattgttcgaagaaggtctggtcaaaatggtgttcgccacggaaacactggcattgggcatcaatatgccggcccgctgcgtggtggtagagaaactcgaaaagttcgacggtaccggtcatgtgggcctgacgcccggcgaattcacgcagctcaccggtcgtgccggtcggcgcggcatcgacaccatcggccacgccatcgtggtcgaccatcacggttttgtgcccgccacggccgcctcgctgtcatccaagcgtgtctacccgctgcactcgagcttccgacccacgttcaacatggccgtgaacctgctcaactccagcgactacgagaccgcgcgcgtcaccctggaccagtcgtttgcccagtgggaggccaacgaatcggcctggcagctggaatcgcagattaacacactgaagaacgcgctggccggatacgaacaggcgttcgcatgcgaacacggcgacttcaaacagttcatgaccctgcgtatggagctgagcgacatcgaaaaggaaggccgccgcaaactgaagcacgaagtgttcctgaccgatcaggagcgttcacgcgctttccagaacctcgaccagcgcattcgcgatttgcgcaaggcggaacacgagcatccatgccgcaactgcccggacctccagcaacacctcaaatggggccaccgctgggcccgcgagactcgagaactgcagcgcgtcaccgatcgctacgactcccgcaccgggtccgtggcacgccagttcgattgcatctgcgatattctcaccgggcttggttacctcgaacgtcatgtcaatgcggccggccacattgacatgacgttgactgaaaaaggtctgctgctgcgccgcatctacagtgaacatgacctggaactgtgcgaggcgctgctcgccggcacgttcgacaagctcgacgccaacggactggccgctgtgctctcttcactggtatacgaggccagacgcgggggagacggcgaaccgaggcactacccgggcggcatctccgggcccatcgccatcgcttcgtccaagctcaagggcatttgtgaagacatcgatatcctgtgcgaggatcacggtctggacgagatgcagcggccggatttcggcattctcgacatcatgtatgaatgggcggatggcggttcgctgggatcgtgcctgtacggcaccgacatgaccggcggcgacttcgtgcgcactgccaaacgactggctgacgtgctgcagcagattgctgtcgcccagccgctgccgttcgacgggggagagcggctggcaggcctcgcccacgaagcggccgaccgggtcaatcgtggcgtggtggcctactccggcgtggactgacggggctgtttgacgggagtttgtcagccgacgtcggaagcttggaatagcggccaagtccgaactgttgcgtaaattagtagggttaaagatctttcaaggaggatgccgatatggcagaacgtagcctcaggggcatgagcatcggagcgaaatcgctggagtccgacgacaacgtcgatttcgccgcgcgaaacgatgtggcgtatgtatgcccgaagggccaccgcaccatcctgccatttgccgagggtgccgaaatcccggacgagtgggagtgccgttgtggttccgtggcccaccgtgagggcgacgccgaccgtgagggcgacgaaatcagcaaacccacccgcacccactgggacatgctgctggaacgccgtagcgaagaggaactggccaccctgctcgaaaagcgcctgcaaatgcaccgtgacggttggattcccgactacgagtgatctcctactgaacaacacgtgaacttgatgcccagtcatcccgactgggcataatcattgttggaacaagtcgcattgtttgacgaccattcaaagcagtcgacatgaacaagggggagtggaatctcaatggcacagcatccgatgaaagtggtcctgttggatctcgacggcacgcttaccaagtccgacggcggcattatcggctccgtcatcaagaccttcgaagagatcggtcgaccggttccggacgccgccgaactgcgacgcttcatcggaccggcgattattgaatctctgcgccgcaatcatgtgcctgcggaagatctggatcgggccgtggacatctaccgcagctactacggagaccgtgccgtgttcgacgatccgaacgagcccggcaacaaggtgcccggacgactggtgaacgtcgtattcccaggcatccgtgaacagctgctcaaactgcatgccgacggttactacctggcactggccagctgcaagcccgaataccagtgcatgcctatctgcgaccatttccacctgaccgaactgttggacggcatctatggtgcttccaaagacaattcccgtctggacaaagatcaggtgattcggtactgcttcgacaaaatcggttttgatgctgcagcgggggacagagccgtgatgatcggcgaccgctacaccgacattgacggcgcccacgcctgtaatttggacgccatcggctgccgctggggctacgctccggccggtgagatggaggaacacggtgcctacgaaattattgagcaacctgagcagctcgaagacgccgtaaaccgttatttccaaacgcactgaaacacaacggcgaggacttcttcatgatgggatgcgatggagcctgcgccgcgggcttcgacctggttttcatcggtttgccattgctgtcgctgtatgagattcccatgctgatatggtccatttggcgagcattccactggaaacgaaatgacaaggattggctgaaaggcacggcgattcttgcaattgcggtggtcgctccggtgctcctttggctgtcggccttttggctgtcggtctggtatgcgtggactagttgatacaggcgactgaatcctcgtcaaggataactaatctgacataacgtacattatcggttaatagtatgtggtgattttagccgaaccagtagtatctagctgcggattagcctcgccgcagagaatcggctacttcgcaacatcatccttattccggtgagaagcaacgcccaaacgcttgtccatttcggtttctgaggcgttgcgtgcctgcagatacatggcgatgagttccagcagcaccagcacgaatatgatgattgcaccgggcaattgcgcgtggtcgtagaacgcgagcatgcgaacatccatcaaatccgctgtaaacgtcaacacgggaaacgggatcagcgccgccgcaaacgacatgaaatgcgttttcaccatcgaccagtcgaccggatcgaccggcggtcgccggcgtttcggcgtgaacagatggcctcggctgaccgttatagtgatgatggacacagcaaagatgacggcgaccatccacagaacgcccggcaacaatccaacaacaatcccgttcacccggtcctccaaccagtcataataatcaccgcaacatataaaaacataagatggcaggcaacaaaagcaacacatacaacaaagcgacctgccgaccaaagccggcaagtcgccaacaaccatacatgtatcaggcggttgcgcgttgcaagcgctgtgcctcgagcttcttgcgcatcctcatggcagtcagttcatcaatcggacggcccgtggcaatcgtcagcggcttagcctcaagatcaatatattcttcctgttccaaggccgtctcaatctggtgccacaacgaacccaccgacacggcgaacactgccttaccgctttgcaacagttcgagcatctgttcgctggtagtgcattcgtgcacgttttgaccatcgcacatgatggtcacattggccagctgatcggtgctgcgttgagtcaagaatccgatggccgccgtcacgttctgcagattcacaccggcatcaagcagcttcttggatacagcgagaatcaccacatccttaaacgagtacagtcggcgtgaaccggagccatgagacggcgtgatggacggctcaacaatctgcttgcgtgcccaataatcgagctgtcggtacgtgatgccggccaccttggaggccacagtgccacggtagccgcgcttgatctcctcagtatcgacattggagaacaactccccctgaatcgcgtcagcgttcagattctgacggtcctcaagcgaaacatgaagatgcagccctgtctgtcccatggcactcccctaactcatgcgtgtctcgcatgtgactcacactggtgtaatcacatgattgcaatttctgcaatcagtctaaccccgtgctgggtgtggactattgggaaataatggcggatttcgtgaagaacacgagacggaatttaccgatcatgatttcgtcgccgttcttcagcgacgcctgatcaacacgctgacggttcacgtaggtgccgttcagacttcctgcgtcaaccacaaagaactgaccgttgaccctgcggaacacggcatgctgacgggatacggtggagtcgtcgagcagaatatcagctcgcggatcacgaccgacggtgatttcatcctcgtcaagcaagtaacgagaacctgagaccgctcccctggcggaaatcagcaatgccgttccctcggacaatctggtgatggtgtccagatcctcttgagtcagcggtcgatcgccggtggtggtaatgggcagtacattaatcgcgggcaggccgataatggtggtttcgcctgcgctaggaatcgggttggtcataatcccctattctaccgtctttgcatactggttttgcgtagcttcgcgtacttcgtcgataatgatgctgtcagaaggctgcacgttgacgttggatccgtatttcacctggagctgagcgcccacaccgccggcgatatcgactgcgttggacagctcctgcggattgccgatggccttcaccgtgtatgtgggcttgatggtggtgccatccacgatcaagccttcctcggcgtcctgaatgtaggtggaggtgatgacgcgcacgttattgatggcgattacctcggcgccggcattgcggagttcctcgatgaggttgaacatgattgaggcgtccactttagtcgtcgagcctcgtccgatccggatggtcacgccttggcccttcgccgggagtctgccggagatcaagccgctggtctcttcgttttgcttggcgatcttacgcgcctgctcctgctcgttagccgccgatttcagtgagttgagctggctgttcaactgggttttacgctgctcgagattcgagatttgcgtattcgactcgttcagcagccttaccagttcgctctcgtccatcgtttcgtacgtggatttagtgttattgatctggctcatgtaggcgaaacccagcagcgcgcacatcagagcaatgagaatcgaggatagtagccgtgatttgttgctggcccggttgagatccttccggggcttcttgcgcaccgtggggaacgacccggtttccatccggtcgttgaccttgtcttgtgcatgctggtcgcgcattttctccagcatgttgtctgattgtgctttacgtgccatacgtcagtacccttgtcagcctcggaagatgaagcgtctgatcgcggacacgttggagaagatgcggatgccgagtacgacgatgacggccgtctgcagctgcgaaccgacgccgagctggttgccgaggaacacgagcagtgttgccgtcaccacgttggcgaggaaggagatcacgaacacgcggtcggagaagctgcgctcgaaataggctcgcgcggcacccagcagggcgtcaagagcagcgaccaccataatcggcagatatggctgcacgatgatcggaatgtccggcttgacgaacacgccgatgacgacgccgatgatcagtcccagaacggctgccattattcattcctttccgcgtacttcacttcgccagtgactgctgcctcaagtgtaatcgaattggatttgctcacctgcgggtagataccggcttccttgaaggaatcgtaaagacttgcaagtctcttctcccccatcgcttcggccagggcgctcttatcgcctatggcttcaatggtataggggctttgtatcgcggtcatgccgatgagaatatgcccgccggccttgcgtatcgaggtttgcgcgccgagcctattaccgttgatggcaatggcttcggctccgttttgaaacatcagggagaccagttgttgcagatccagatcggtgatgactcggatgttcgtggaggtgccgactctcgtcgaggaggattgatccgactggcttgccgcgattggatcggccagcgtcatggtgattccttcgccttcgaccaccgtggcaccattgaccatttcgtcttggataaacgtgtcgcttttcacgctgccggagattttcttggactgttcgtcaacttgggatcgcaaattattgacgtccgtggtgagttcgtctatctgcgagttgcgattctccaattgcgtggccaaagtctgccgtacctgcttacgcggatcggattgcaactgttgcacgaataggctgcaggcaaagccaacgccgacgcagatgatgaatacgacgatgcgattaaaccagatggagaaggtcgaacgatgctcatggaccagtcgtgagtcggagaacatcggatccatcggacgattgacaagatcatcgatgagctgaagcgaatcgtcgttggttttacggcgacgtctggtgcggatggcggcggcgtcatccggggaaagcgcatgatgcgattccgcgcctcggactgagtgggagaacacggcgcggcgtcgtaccggctcattctccttgggtatggggaacgagaccggggccatggcctcaagcgccatacttctcccccagttccttgcgtagcaatccgacgccctgcttggtatagatatatccggcgagccaatacatggcgatgccccagatgccggcggccagcgcggcgatgtagagcaagtggaagaacgtactggtgcccaaatcggcgaaaataagactgacgatggaaatcatcagcagcgcggtaccagccttgcccacgaaatgcacgggcagcggaccataaccgtactgggcaagccatagcacctgaatcgccatccacagatccctcagtcccacgataatcagcatccaccatgggatgatgccggcgacgctgagggccagaatcgagcagaaaatgagcagtcggtcggcgatcggatcaagaatctgaccgatcttgctcacttggttgaatctgcgcgcgatgatgccgtcgagtccgtccgaagccgaggaaatggcgatcagggctagcgccgcaatcacctcatgcttggagatcagcacgctgatgaaaggaatcgagatgattcgcagcgcgctgatcaaattgggcacggtgaaatagatgtcacgtgcttccggactgtatctggcgttgattttctggttggtcatatcgactaacagtctacatgcgggaggcttgcagagcggtaacgatgatgccgcgtgcgccgacttcgtacaaatcatccatcagctggttgaccttggccttgggaaccatgactcgcacggcgttccactgtttgtcgtgcagcggggagatcgtcgggctttcaaagccgggggtcacggccacggcggcggcgaccttgctgatcggaatgtcatagtccatgagcacatactgatgcgcagtgagcacgccttgcagacgacgggtcagcacggccagacgcggatcctgctcgttcagacgcggcgagcgaatcaggcaggcttcggagtgcatgagcggttcggcaaacacgcgcaggccggcgttgcgcagggtggtgccggtggagaccacgtcggcgatgaggtcggccacgcccagctgcacggaggattcgaccgcaccgtccaggtggatggtctcggcctggatgccgtgctcgaccagatagtcgtgtacgagcttatcgaatgtggtggccacgcgcttgccctgaacatcctccagagtggtgatcggggattcgttcggtgcggcgaaacggaaggtcgaggcaccaaagccgagcggcatgtgctcgagcgcggcggtaccggagttcttgagcagatcctggccggtgatgccgacgtcgatggcgccgcggcccacgtatacggcgatatcgagcggacgcaggtagaacagctcgatgccattgtcgggatcttgcacgaccagctggcgagggttggtgcgcagacggtagccggcctcggccagcatgttccacgcgggttcggatagcatgcccttgttgggcactgcgattctcagcatttgcgttcctctcacaggtgcttgtagacgtcctcaagcgtcaggccgtgcttgatcatcatgacctggacgtggtagagcagctggctcatttcctcggcggtgcggtccgcaccctcgtattcggcggccatccaggtctcgccggcctcttcgatgatcttcttgccgatgaagtgggtgcccttgtcgagctcgtcgacggtcagggagccttcggggcgggtctgggccttttcggacagttcggcgaacagggattcaaacgtcttcatgtgattcagattcttttcttgcggttatggatgaaaggtggattgcggttcaggcttggagctcaggccttgaacgcggcctcggccttggtgcggatgtcgtcgatggcctgggcgggattctcggcgccgtacacggcggaaccggcaacgagcacgtcggcgccggcctcggccacgatgtgcgcggtcttggggctcacgccgccatcgacctggatgcgggtcttcaagccacggcgggtgatctcatcgcgcaggcggcggaccttggccatctggttgtcgaggaacttctggccgccgaagccgggctcaacggtcatgatgaggaccatgtcgaactcgtcgaggatatcgaagatcggctcgaccggttcggccggacgcacggcgaagcaggccttgcagcccatctcgcgcagctgtcgggccagacgcacgggggcgtgggtggcacccatgtggaaggagatggaggcggcgccgagcttggcgtattcgggagcccaacggtccgggtcctcgatcatgaggtgcacgtcgaccggcagatcggtgacctggcagatgcggccgacgatcggctcgcccagggtcaggttcggcacgaaatgatggtccatgacatcgacgtggaccaggtcggcgttggcgatggccttgagatcacgttcgaggttgcagaagtcagcggacaggatgctgggtgcgattgcgatattgctcatggtttcctaccttatctgtgcaatgggacttggggtcccgtgtttcgcgctgtttcggcgctgtttattgtggtgtcacttagtgcgcttggcctgcttcttctggcgaagctgttcctcttcgatgctctggcgttcgagctcgtcggcggtgaccgccgcaagcccgcgcgcctgcgccttggggtccggaccgtactggtagagcacgacgaacaggatgcagccgagcacgaagacgatgatcgcggtccacacgttggtcctcaggcccaggatcaccgtggagtagttgatgcgcacgttctcgatccaggtgcggcccaggccgtaccacatcaggtacatggcgaactgctggccggccttgagccggtcggcgagcttgtggccgaggtagatgatgagcgcggcgccgatgaggttccagatcatctcgtagaggaacgtcgggtggaacagcgtggtcctgtagtccgggcattgcgcgccggaatagcagatttcggatttgccgatggcgtccgcgtcgttgagcttcaggccccacggcaacgtggtgggccagccgtagagttcctggttgaaccagttgccgagtcggccgatggcctgggccacgggcagcgcgggggcgatggcatcggcgaagatcgcgaacggatagtgcttgtggcggcaccacaggaacgccaccaaggtgccgactgagatgccgccgaagatggccatgccgccttcccacaccttgaggatgttgaccaagttgccggtgggcgggaagtagtcggccggcgtggtgatgcagtggtagaggcgcgcgcccaccagcgcgcagggcacggtgacgagcgtggtgtcgagaatctggtcgaaggtgccgccgtaccgcttccaacgtgtggtgaggatccatacggccacgcagatgccgatcaggatgcagatcgcgtacatgtggatggtgaacgggccgatctcgaacttggagaaggtcggcgagggaatataagccagattcatcgtgcctctacttgctggtgctcatggtgtgtccacgcgcgggttgtgcttgatgctctgtgactaccctaccgtgtcacggcacaacccgcgtgaggcgcaccgggtgttcaccgggcgttgtggatgccttcggccagttcctcgctcttggcggcgagcagcttcaagccttccttcgggtcgcgtgcggtcttgttgtcgtccgcgagcagggtgtgcacgagcgcggagccgacgatgacgccgtccgcgtaggagccgaccttggcgccctgttcggcggtggatacgccgatgcccacgcacacgttctcggcaccggcctgacgggtgcgctccacgagcagttcgggcgaggcgtcgatggtggcgcgttcgccggtgacgcccatgcgggcggccgcatacacgaagccgcgcgcgttgcgggccacggtttcgaggcgctcggtggacgagtccggggagaccaggaagatgcggtcgagtccgtgacggtcggaggcttcgatccactcccccgcctcgtccgggatgaggtccggggtgatgaggccggcgccgccggcgttctcgaagtcgcgggcgaaacgctcgacgccgtagtggtacacgaggttccagtagctcatgatgagcggcacgccgccggtgttggccacggtttcgacggcctcgaacacgcgcttgatggtctcgccgttgttcagggcgatggaggcggcagcctggatgaccgggccgtccatgaccgggtcggagtacggcaggccgatttccacggcgtcgacgccgtgctcgaccatcgtcttgaaggcgtcaagcgagacgtccgggttggggaagccgtagggcaggtagccgatgaagacgggcttgttctcggccttgaacttggtgaacatagcgcctgacttgctgggcttgtggctgatgcccagcggctggccggacggcgtggttgcttcgttggtcataatcaacaatctcctcttcttgttcaggcgacagtattgccgcgggcgccggccacatcgagcgcggcggcctgatcgtcggtcaggtagccgaaccacttgccggcggtggccatgtccttgtcgcctcggccggagatgttcacgatcatcacggccttgtcatagcccttggctttcagatcggcggcggccttgtacgcgccggccacggcgtgcgagctttcgatggcggggatgatgccctcggtctggctcaggtcgcggaaggcgttcatggcctcctcgtcggtggcccagctgtagttcacgcggccgatatccttgagccatgcgtatgctcggcgccgaagtggtcgaggtgaccctcggcgacaagatcctgaaggacgccatcaacgaagccctgcgcgactgggtcaccaacgtcaaggacacgcactacctgctcggcaccgtcgcgggcccgca

SEQ ID NO: 3896 - DNA, 4240 bp, Unknown
  R22_24m  MAG No. k141_8902
cggcggcccatgccacgggatgccaccgcaccggcattccggctgcggcaccgggcatgcagcgtcacggccgcatgccgcgaggcatcacagcttcgcggcgaaccagcgcgtgatcgtcgtcggatgcgtgatcgcggtgcccaccacggcggcccacgcgccgcattccatcacgcggtgcagctggtcgggcgtgtggatgcgcccctcgcacagcaccggcatgtccgggaacgccttgaccatccgctcgagcagttcgaagtccgggccgtcggtcttgagacgctcaccggtgtagccggacagcgtggtggagatgatgtcggtgccggcctcgaccgcacgctcggcgtcggcgaaactgccgcagtcggccatcgtgatcacgccctcgtcgtgcagtgcgtgcacggtgtcggcgtagctcagaccgtccgggcgaggcctgccggtggcgtcgatcgccacgatgtcggcgcccgcggccgcgcagcaacgggcgtggcgcagcgtcggggtgatatagacgccctcgtcgccctccttccagatgccgatcaccggcaccttcacctgccccttgatggcagcgatgtcggcaagtccctgacagcggatgcccaccgcgccaccctccaccgcggccatggccatttgggccatcgtctcggggtggcgcagcggctcgcccggatacgcctggcagctgacgacaagcccgcccctgatcttttcgattacctgatgcatgatgcgcttcctttcctcatgccttgacattgcttcatatgggtgttgacgattgcgcgacgaattgccggagagcgccggctcggggtcctcccgaggggagtcccagcccggcggcggatcacgggcggccctgcgcgacatgcctgcgcacggccaccgcggcgccgatcagcggagcggcgccgcccagttcgccctccaccagcggcgcggacctgaccagctgcaatgcggaatcctcgaatcccgcgcgcagggcgttccaccacagggggccggccttgaccaccgacccggaaacgacgatgacgtccgggtcgatgagattgcccatgccgccgatgcactcgcccagcgcacgggcgctgtcctcgatcacgccgacggccaggggctccccagcggccgcgcgcgccgcaacctgggagccgtccgccaccggttcgccctcttcggcatcgcaacgggcgttgtagaggtccttcagccccgtgccggacgcgaccggctcgatgtgcccctcgagggtgccgcacgagcataggaatccgcggcccagcgcgctcggcacgtgccccgcgtggccggccacgccgtgcgcgccggtgaacagggcgccatccaccacgatcgcgccgccgatgccggtgcccacgccgatcgagagcaccacgcccctgccgcgtccggcgccgtacgtcgcctcgcccagaccgtgcgcgcccacgtcgccgatcatgtgcaccggcaggtcggtcacggccgcgaacgcgtcgtagatgcgctggccgcgccagccgggaaggatgtccgtggcggagacgatctcgccggtttcactgtccggcacgccggccgccgcaatgccgacgccggcgatcgccacgccctcggcctcggcgcgctcaagctggcggacggcgaaggcgacgatgcggttcttcaggtcctcgccgccgcgcgcggcctcggtcgggatttcgcagcgggccgtcacctcgggcctgccgtccgcgcccgcgtttgcgtttgcgcttgcgggcaacgtcacgaatcccgaggcgaccttggtaccgccgatgtcgaaggcgaggtaggtgggcgccgcccccgcgctcatgcgacgaccgcctcgtggatgcgcgcgagatagtcgaggcgctcctcgaccgtcgcggccttgggcacgcacaccttggcgcccagatagtcgagcgggcgctcctgcgtcccggcggcgcgcacggcggccttgatggcggcggcgtccatgagcgaggtcggctcgtccgggttcatgggcaggtggccgtcgatccagccgtagccgtactgggtctcctccgggccggccccggagaacatgaggccgctcagtacgccggccttcgcggcggcctccacgtgcgccacggcggtttcgggtgtgcgcccctccaccaccgagcgtccccagttgacggtgagcccgatgccggccgacccgcacagcgcgatctcgtcctcaatcggcaggaagcccttttccggcttctgcccctcgacgtacttgtcgcagtgctcgatgaccagcttggcgccggaccagtccagctgcgcgagggcctgcaacgaggcggtcatcgcgtcgcggctggcaatgcgcgtgggcgccgtgtggatttcgacgaacttgacgtcctggctgccccgccactgtgcaaagtcggcgagcgcgtcgcgcagctgcttgaagaacgccagagcgaaccggcgtccgtcctcgtccgggctggccagtccgaagttcgggtccttccatacgtgctgcatggtgcccggaatggcagtgaccgtattgttcttccaatgcctgggcagttggccggcaagccagatgcggtcggcggtttcggcaaggtcccccgggaaggggatctcggtgccgtcgatccagggctgaccgcccagcagatcgtaataggcttcctgggcttcgcgcccctgcggcaatgacgcgtacgcgccgacgacgaatgatggcatcgctttcctccttgaaatgcccgatgcgggttcgctgagcattcctatcgtactatcatcagacatctgatatctaatctgttaaaggcagattacttcggcgtgtcttctctcggcctgccgaccttagcatcatgcattcgcttactatgcttgcccccctggaggggaaccagaaattatcaacaaatagtgacatgggatgctaaccgcggccagccggtgaaatggcatgcgcttatacggtttcaccggctggcgcccgctacggcggagttttcgtatggccctgtacgatttcaccggctgacgggcgcccagccggagtttccgtatacggtcatacgatttcaccgtcttagccgcagccagccggtgaaatcgtatgtggactccgtgcggcaacaagtcagcgggcaagcggcacggccccgacaagccgcgcaatccgctcactaacggaacagcgagacgcccctgcgggccatgcagaatgcgttgccaagccacgtgtgcttggaattcggccacaccgcaccgagcctcggggcgttctggctcagccagatgctgggcacgcggccgtcggcgctgcgcgagcccagcaggttgaacccgtttttctcctgaagccagcccggatgctgcgtggcgatggccagtccctcctcgagcgtgagcggaatgcgctcgtcggagtcaatgagcttgcgggccacgtcaggctcgcggtttgtgtgtacttggtaccggtgcgcggttccacgacgatgtagaacggtccctcgggcggctcggagccgtcctgcggcaaaaagctcgcgatgtcgcgcggcggcatcgtggcgaaaccggccatgcggttgatcgacgtacgggaaatcagcgattcgggcgacaccagctcgcgcgtgggcgccagcaggatgcgctcgtcaaaatcggtatgctccagcgcctcgatcagcggacgggccagggagcggaacgccgcggcgctcacatccgccacgtccgggtaccccaatgccacgatgcggtccaactggcgctgcgcttccaccgacgccttcgacatgactcccagtgcagagcatcgcggcggggcggcgccgtgacgttccagccggttccggcgtcccgtcgcaccggcgatccggcccagcatacgggcacccggttcttcttgttccgcccgattcgtaagattgatggatacgtgtggccatttcgctacggctgcccgaacgtgaaatcaatccgtcaaacccagaaggttgttatgtccgaaaagttgaaagtcggcattctcggcgccaccggtatggtcggtcagcgttttatcacgctgcttgagaatcacccgtggttcgaggtggtcacccttgccgcttccgcgcacagcgccggcaagacgtatgccgaggcggtcggagaccgttggaagatggaaacc

SEQ ID NO: 3897 - DNA, 33172 bp, Unknown
  R22_24m  MAG No. k141_9096
ccgcagtacggccagccggagaccccggccccgcagtacggccagcccgacgctcaggccccacagtacggccaggttccgccgattcccgaaaacgttgatgatgggtccaccgtgctgtctccgcacacggctcccaccgatgacaacgcacagaaaccctggcaaggccagtgactgacgccggcgaagttcgcttaagaagttcgcctcatcactcatgaagcccaacaatgaggccccactcatcaagcggcggtagtattccccgccgttcagtaagccaatgccctgtgtactggatcattccagcacacagggcattgtgcgttattgcggcccctctcttcgcgcaacattccccggaatgcgttacggtggaggatggacgctgcgccgagctactcctacaagctgcctacggagagcgtttgggagatcacatgggattctcccgggcccagcgtcacgatgcggtcgcggcataccgccgcttcaaccgccacgaaaccgcgccattcgcccggcttggtgtagctcatattgtcgccgtccgctcccggattccacaccacggtttgcggcgacccggtacggctgatatgaatcgcacgccccaacatgtcatcgcgcagttccagacgcgcatccgagtaatacacacgattcaccggctgctcgccaaacgtcaccacttgcgcgtcctgtgttttcggcggaaacccttcttcggtggcatccagatacgtcgctccctgcaatccgaccagctgagcaccggacacatcgccgacatgcagataggaatgcaacgcggcctcgtacgacataggcgccgtgccggtgttggtcacggtcaggctcatggtcagcgcattgcccgtttgcacgtcatacacggcatgaaactgagcacccggctcgtcatcgaaccaaggcacttcattgtcgttcagctgctgcgaatccaacacataccgtatgtggctgtcgtcgaatgaaccctcgtccaacgcccaccgacgcagacgtgcaaaaccgtgggatggattgagtgccagctgcttgccatgcgcaaaacccggaccgaaccacgggaagcagatcggcactcccccgccgagcgacttaccggcctcgatatgccacgtactcggcgtccacaccacatccgcctgcccggccggggcccagcgcaacagatgcgctccgtaatcgctgattaccacgctgccgccattgttggcgagcatacgcaaatcgacaccattgcccataagtttcccattcccattgtgcgaacgatacttttcactaaataggatacttccttaacaaaaaagaatcgcaaagtatggccgcaggatgcacaaaggccgtacacacaccatatacgatgtgcgacgcggccttgtgctctgtggtccaatgaactcgttgcttttgagcgatgccctaagggctacagatgcgtttctcgctgccagagagcgatctgccgctgctgggttcccgctacgtcgattcagtgcgcaccaaccatccctatggcgtgcgtaaggcggcggtgcgcttcctgcaacacggtcacacccgtgtgggcgcggcgttcaccgatacaccgacttcggagctgattcaggatggctggaagcaaatcgtgacggaaagcgacgccatcgaatgcccgttcaccatcaccggcattcagccgtacaacaccagggacgtcaaccaaatcgtggacaccattctggattcgggcgtgacggccatgctggtgcactccgattatctggcgatcgccatcgcgcagaccctggagcgccgcggcaagcgcgtaccggacgatatctcgatgatctccgtcaacggctttgccacgcccagctcccgcccgctgaccgtactgtgctcgtccgataaggatctggccgaggcggccatcaacctgctgatcaaccgcatccaaaacccggattctacaacccgccacatctacgtggacccgacgctgaccgatcgcggctcggtaatcgataagcagtaaccccacctccctctgacgagggaggtggcatcgcaaagcgatgacggagggagaggcaccaggcctctaaccgttacgagcgaagcatcggccagagcaacgcccttactctttacaactccacggtctctttgccgggatcatccttgacatgcgcgaacttggcggccagagcctccttattgcgcttttcgtcttcttccttggcctgacgcttagcctcgtccgggttccagagcacatcctcacggtgcttgttccattcggcaacggccagaggagcgatgtattcggcggtggcggtcagggtgtctgcgtcggcggctttggcacgggcattaagcaacccgaggatctgctcgtcggtcaggcagatgcgcggcaccgagcactgctcgcgcagttcgttgacgtagagcagaatcggcagaatcttggcggcagcattggcgacactgtccgctgaaccatcggccacagcatcaccggacacctcacccaataacgcatcgcacacggcgagcgcggtggcgaaccgaacagccacatcggcgggcttggcagacgtggccagacgaccatcggcttcagcgtcggcctcgacctgggcttccatggccgcgaccgcctccctcaccgattccgccgtcgcggaatcccagtcgattcccaacacgtcggccgcctcaacgatcagcctggcatcaccggactcggcgtagtcggccatcgtgtcgtaggcgtcattggcggcgagcagggcgtccacgatgctctgcgggcgaccgggaatctcatcggcaccttcgtagacgaactcggcgtccggcacggtgacgtcctcgccggtcaggatgcgggcgaatgcacgggtgacgcgcacctgcaggttctccgcgtactttgcgtcattgtccatctgcatggcttcggtcagcggccacaggctgatcagcgccgagccggcttcggcggcctcagttaccgccggcaatgccgcgacctgtgcgattgcctcacgattgagttcaatggtcatctatgctcctttgcgtccaccactcgattgcagtgcgtcttggctcccctctctgaggggagccaatgtcctaacaccagtgtgccgttacttgacgttggctgctgggtcgacatacgtgattgacatcacacggccggtttcgttgtcgtacgtcaccgaggtcacggaggcgagcgccgtgtgccgcaggaacatccagtgctcggggtggccggtctccagataatggcgataactgaaaatcggcgattcgtggctgaccaccacaatctgctcgccggggtgctgggccaccttctcgcgggcgaagtcgtccatacgcgccgcgatgtgctgataggactcaccccagctcggcttgtacaggttggtgacgagcttccagttgccgttcttccacagcgcgccctcgccatggccgatgcgcttgccacggaactcgttgccggcctccatcacccgttcatcagtggtgagcgtgagcgaagcctcgccacgagcctcgcgcacggggttcagcgcatcgagaatcgcgccggcggtctcgcgcgtacggtcgagcggcgaggagtagacggctgcaatcgtattggtttggggattcttggccaagtacgtggcggtggcttgagccatgcgacggccaaggtcggaaagatggaagtcgggcagtcgctcatagagcagatggtcggggttatataccttgccatgccggacgaaatggatggtggtagcgctcatgagccgcctttctgcttcccgccctgaagggcatgagaacgttgtcttaatatctccaatctaccgcgtgtcgcggagtggacacccgtagagtatccgtgacgcaaatatgcggatgggaaaatccgacgcaaactttgcgcgaccatggacaacacatcattcgatgagggcttcgccggcaacgccacgccagcgggggacatccaatcgggagcggaaaggagcgtagtgctgttatgtccaataactcgtccaactcgaactcgagcaccattctggccggcatcaaggaagtaggccacaaagtctttggtgggtatgcggaactactgcgcattccgcataccgcccgttattccatcggctcggtcatcgcctgcatgccattcccgatggtcggcatgaccatcaccatttccgtacagcattattacggcaactattcgctggccggcatgctcaccgccattcaggcgattgcgctggccgtggccacgccgctgctgggcaagctgaccgacaagttcggccagaggcaggtctcgattccgacgattatcgtttggattgtggccgccatcgcgctggtgacggcgattaccaaccgcgcgccggaatgggtgctgtactgtctgacgccgttcctggccgccattccgccgtggggcgcgatgagccgcgcgcgctggaccaagattcttaagggtgaccgggagcgcacgaaccgcgcgctgtcgctgtgcggcgtgctcgacgaatgcatgtgggtgatcggtaatccgctggcctccacgctggccgtgatctccggtttgctggcgttctcgttcaccggcatgtgcgtggtggtcggtgcgctgatgttcctgaccgagctgaccactgagccaccgtcgcagaccgcgctggcgcgtgccgagggcatctcccgcaaggaataccgtgagcgcgaggccgccaaggctgaggcgctgaaggtggaaaccgccgccgaggagacccgccgccgtcttgagcgtgaaggcgtgaccgatgaggccacgattaacgcagccattaagcaggcggtcgccgatgcgcgttcgggcaagaaggcgtccatttggggtccgggtctgattgcggtgtgcgtcacctggttcggtttgggcgcgttccagtcggctacgggcatctccatcatcgcgtttgccaccgaagcgaatatgaagcagtacacgggctttgtgtttgcctgcttctccttcagctcgctgatgggcgcattggtgtatggcgcgaagaactggtcgattgccctgtggaagcgcttctacttctgcctggccgtggtgaacatcggcatcagtacgttcctgttcgccaagcatctgtgggtgatcatgatcatctacttgattattggcgtatgccaggccccgacgtggatcaacggcaaccagctcatgttgcatctggtgccgccctctcgcttgaccgagggcatggcgtggatgggtgcgatgaattctatcggctcctccgccggttcggcgattgccggccagttcatcgaccgcatgggctcgcacggaggcttcatggtggtgaccaccttggcgctggcctcgctggtgattgcactgatcggcttcaagcagatcaagggctccaccgagcagccgaccctgactgaagtgagtgtgtgagacgtatgctaagccccctctgacgagggggcttagcatacgtcaaaacgctacttcggccagcctttgggcgtgtgctccaaggaccagatgccgagcttgtgggagaagctgttctgccacttggcttcaagctcctcggcattcagtcgattttcagcggacttcagacggttcatcgcattggtgtgcgtatcgtcgagcagccacttgcgaatcaagaagttccagatcataaccacggcagtggccaccaacttgccgatattggtacgcaacagatattcggcatgctgcgatacataggcatcatggttcataccataggtggaaatccagataatcgcgtcattcatgaacagaccgactacagcgcccgccacgaagataaggatctccatccagcgtgccatgtcatcacgatgcttgaatacgaatttcatgctcgccagatagttgaaaatcagcgagatgatgaaagagatggtggcagccagcacgttgtgcatgtggaatatgccaaccaataggttgaggataccccagtcgataacaaaggcgataacgcccacaatgccgaacttcatcagctgttcaatcagttttctcacaagagtattcaacactattgggctgactgcggaacgtgtattggctggaaaggccaataatctccccaattggccttgccccggtccgttctgcgagcagcttcctacgtccgcatgccatgttcaacagcagccgctgaggctagactggaagtgaaccgaatcaaggaggaattatgcccgttattcacactcatgtgtccgtgtccaccacccccgagcagcgcgaggcgttgaaggccgcctacggcaaggcgattaccgctgtgccgggcaagtccgaaggctggctgatgtgcccgttcgaggacaatatgccaatctacttcggtggtagcgatgaccagcccgccgcctatgtggaggtcaacgtattcggccgctctgtgccgggctctgcttgggaaaagctgaccgaaagcattatggccgcgctgaactccacactcggcattcccgaggaccgcacctacatccgctacaccgccaccaccgattggggctggaatggcggcaacttctagttgccaccattcccctcgcagcatagctgttcgcatcgcctacggaaagcccagtgggctttccgtttaatggctcagggtggcaactagtttgcgtattctggctcccctcagtcagcttcgctgacagctccccctcaaagagggaagctcagatgtagaaagcccgccggtggcgggctttctacgtttcaaggggctgatttccaacattcagaagctctactagcgtttcaaggggcttttaaaacaagaaacccggagtataaacattgcaatttcaatggtcatactccgggtttcgcaatcgaagagcccctcgaaacgcagatagacctccggaaaaccggaaatccgcccctcgaaagcgagttacctcacctcatgcctgtcatcacacaatcttgggcatgggggtggtgaggctggtggtcaggttgacgtggaccagaccggcaccggcatgcacctcgaccttcttcagggtcacggtgcgctcttcttcgggggcgcggtcgttgtcggtcatggtcgccggggacttgaccgccacgaacgccagatcatccagcgagatgcctgcgctctggcacagttccatggcctcggacacggactcggtgaagcccggcttgtagatcacgcgctcggccggtacgccgtaggcgttctcggccacccacttggcgttctcggtcagggccatgcccttgtgcgaatgcggttcggccggcatggagccgttctgcagcgcgtcgacgaaaccgtcaagctgcggggccagcgcctcgccgccgtcgcggaacaggttgccgatgatcggcgtacggaagcccagctcgtcggcggtggcctgcagggacgggacctgatcgtcctcgccttcccacaggttgatgagcgggaaggtcggaatgtccaggttctccaggcgctgcacgtggaacgggtagcgccaggccagctcgggatcgtcgcgccaggtggaggcgcgggtcaccacgatggcggcggacggccactgcgcgccatactcgcggcaggcgatgtccagccacttctgggcaccggcgtcggtgccgtaaccggcttcgacgacaaccacatcatgcagagcgcaggccatttccacggaaaccagcgtcggaatgccgatggacacgttggcgaacgggccaccgtgcacgtagaccagggagccgttcacggtctcggtcttggccggcttgaccgcgtcggccagaatgccggtgatgcgccacaggtccacgaactcgccgaaggtcacggccttgccgtccttggtgccggcaatcatcttggatacgcgctcggaaatctcgtccatcgagcgggagagcaccatgatctgcatgagctcgcaggtcggcgtgagcacgaccttctccggcacgttgcccttgccgtagtccacggcggtggagcgcagggagcggctcggcacctcggagacacgcggcacgagaatcgtgtcaagcttgccttcatcgatggccttctcggcgaaggagacgagcaggttctgggccgcctcgatggcgcccatttcgccgcacagaccccagtcgatgagctcggggtgggtcagggatgccttgccgccgccggaggcaccgcccttggaaccggctgcggtgatgcccatgctcggctgacgcagcacggcggccgcatcaatgccacgcttgttcagggcgtcgatcaaggcgatggtcgtggtggtcttgccttcgccgcgcgatgccttgagcggcgtatcggcggtgacgagcaccaccttgccgtgcttgcacggggcgtccgggttctcagccaggtacttcatgtaaccgaatgcgtcgatcttctggaccaggccgtactggctggtgaagtcttcgatggtggtcatttaatgcctttctgtgttgatgatggcggagcggggtggtggggcggccgccgccgcctcttcgcctagaaacagcccactgggctgtttcttaacagcttagcctctcagtccgcttcgcggtcagttcccctcagggaggggagctcaatacggactaaaagtcggacatgtggaagccgttcttcatttccatgctgcgagtgtacagcacggagtcaagcagcttgtcggtttcctccttgagctggtcggccatggtctggttggcggcggcgagaatctcgcgcacctcggggttacgcagcgcggcgatggtctcgtccggggtcatcggctgcacatcgccatccacgttgtcggcctcgaattcctcttcagcggcagactgcgcggcttcctcggcggccgtcaagcccagacgggcgatctgctcgtcggtggcggcgaccaagcggtgacccatcgcaccggtcttctcctggtagcgctcgacggcgttggacgtggagcggaaggcgccatcgcacagggcggcgatgatgcggttggcccagtagaagttctcggacgtcacgcgggtggtggtgtcctcaaggtaagcgggcgtggtgtccacgttcgggaagaacggcaccagcgtgttgaacgggttggagccgtatgccatccactggatggcgcgggaggcctgcgggcggtacgggcggatctgcatcaccgcaagctggctctggcggttgatgccgatcgtgcggtacatgtggcgggtgcgctcatcgcccagctggccgtatggatcgaacggggtgccctggtagtgggagctcaacacgtacttgatgtcctcgatggtcaccttgcgctcgggctggcgggcccacggaatgtcgtcggaggtgggcttgtggtcggcgtccgggccgtcccacacctcgtcgtacgggttgaggaagcgctgcatgtaccaggcgcgcggggtgttgtacacgtggtcggagtcggagtgggagccaaaggcgtcgcgcgggttgaacggggtggtgttctccaccgcgaggtccaaatggttggtttcgatgaattcggcgagatcttcggagcacatgtgcgcttcctggtcgcccagagcgtcctcaaggtcgaattcgtcgataccgagctggttcggcatggtcacgtaggcctcgtccggcacgcgcttggcaatccagtgatggccgcccacggtttccagccaccagatttcgttggagtcagagaaggcgacgccgttcatctcgtaggtgccgaactcctcgagcagtgagccgagacgctggacgccctcgcgcgcggtcttgacatacggcagcacgatggtcaggaagtcctcttcgccgatgccgccgggcacctcgagctcatcgcccctggccggcgtgtattccacgaacgggtcggcgccgagcacgcgctcgttggtggtcagggtttcggtggcgctcatcgccacgttcgcctcgttgacgccggcctcgccccaaataccttccttgaggtccgcgttcggcacggcggtgtactgcagcgggtcgtccggcagagtgatggtcaggtgggagatcactgatttgtattcgcgcggctgttcctccggtttcacgacgatgaagcgcttcgggttgaactcgccgttcgcggaatcctcgttgcgggcaatgatggtcgaaccgtcatagctcgcgtctttgcctaccagaatcgtggtgcaggccatagtgtgatggtgtcctttctcttattcaagctccccttgtcaggctgagccgttcagcaaacagcccggtgggctgtttgtaggcgagggtgggagataagtcccaccacagatgttgcgggcggtagcccgtccgtaattgcaggacgagctgtctcgcaaagcgagactgaggggtagtcactctagctgtctctcccccagtccgcctacggcggccagctccctcatcagagggagctcacatacgccaactaaaaatcacgccttaccggtcaggaagatgccgtcggtgtcgggcgcttcgccgctgttgcgcagcgcgtgcaacagctcgttgagccagaagccctgattcaagccgggcaacggcttcttggtggcccacacctgcaggtagtactcgtggtccttgtccggcggctgcggaccgttgtaccgcatgatcaccgctgggtcagtgctgcggcccaagaacttggaggccgaagaattgcggccttgcacggtctcgggaatcatggccggcagctgacgggagaagtccggcgggatggccaacgcatgcgaatcattgaagtcgtacatcagcgcgtcaatcggcagattggccacggaccagtgaatccactcgaagccgcagaccggaatcgaatccgggtccacgaactcccagtgcaggtaacgggcctcggggttcacatcaccgatgtagaacgggaaggagacgaccggcacgccgccgttgaagtactcaggcgcggcggccttggcaaaatcgtccggaatgacggtgaaatcggcggaaatcttcatatgtcccagtatcgctcatatgtgtgacgtactgggggctgtgcgttacgggggtctctcccccagtctcgccgcgctcgacagccccctcgtcagagggggctggttgcgtcgggttatggaattagggcgcagaagagggattcgaataccagtagcgggttgccgttgccggctagacgcttgcgggcgtaggccacttcgtccagacgggtcacggcaccggcccggttcaaccgcaccgacaattcggtgatcggcgagcggttctccaggttgatgaggcccaccgaatcctccgcattgttctgcagcaccgccacatcccggtagatggaggcgatggagttcagcgcacgatccaatacgtcgcgcgtacggcgggtgaccaaacgcttcacatcgtctttcttggcgatctggttgaacgcgccacgcagtttcggcgggatgcggtcgttcggtgccagtccgttgatgcggcggaattccgcttcctggccggcggtgatgcggcttgcgtccgcctcggcctgggccttggcattgtcgataaggctgccggccagcagcaccgcgtccgaggcgcgagcgaggttcagtacgcccaccaccaattcgtcgcgatccgtcatcacctgctcgtcagtggcgtacaacttggcgatgccgatgtgtccctcggccagacgggccgcacgctgcgccacttttggctcgacattggtggtggaggtcaggaatccggccaccgcctgggtggagggcacggcgaggttcacgatgcgcgtgcgcgagcggatggtgggcagtacatcctgggcactcggcgcacacagcagccagatgcagtgttcagccggctcctcgatctccttcagcagcacgttggtggtgcgctccagcatgcggtccacatcctcgatgatgatgatgcgccatggtgccgtggcaggcatttgctcggaggcggtgatgatctcgcgcacctggtcgatgccgatggtcactttgttggtggccagcactgtgacatccgggtgggtgccagcgagcacctgttgggtgacgcgcgtgggctcatcgttcatgccgtggtcggggctttccagcgccgccgcgaatgctcgggccatattggaacggccggagccgggaggcccgcaaatcagccacgactgggtgatctgacccgggtcgccctgcgcgatgcgactgagcatgtcgattaccggctgctggccgactagtgaatcccatacgctcatcggacaccgcccatcgtcacggctcctgtagacgccccggatcgcgccatcaccgtatccacatctgcaacattgtcccgcagcagtgtctgaatgtccgcttcgatggcggaccacacctgttcgatggactggctggcatcgatcacgtggaaacgattcggctcggccacggccaagtcgaggaacgcctgacgggtgcgggactggaagtcgctgccggccgactccatgcgatcttcggcatgctcaagacgattgtgggaaagcgccggatccatatccagcagatatgtgcggtcgggcagcaggttgttggtggcccacatgcttaaggctcgaatctcttctggcgtaagttcgcggccaccggcctgataagccaaggaagagtctaaatagcggtcggtgatcaccacttcaccgcgctccaatgccgggcggatggtttcggcaacgtgctgggctcggtctgcagcgaatagcagcgcctcggcgcgcggtgcgatgtcgacggcgcccccatccacaccgtgcaacagcagttggcgaatggccttgcctagcgcagtgcctcccggctcacgggtaacgaccacggtacgcccctgagcctcaagatacgcacgcagccgctcgacttgcgtggtcttgcccacgccatcgacaccttcaaacgaaacaaacagaccgctcatgctattgaccttagcgttaggcgcagagttgtgcccaacaggcagttaaaccagctctacctccgtttcaaggggctgatttggtcttttctgaaggtctacttccgtttcaaggggctgttacccaagtagacaacgtcccaaaacggcggaatgacgttggcgcggagccgttcatactcgtggttcagcagatgaccagccccttgaagcggaagtagatattctcaaaacgagaaatcagccccttgaaacgcaagtagagcaataattccgctcagccacgcttgggaattacggcggggcgctcgtagccctcgttggcagtcagccagtcgacatccttcttgacggtggcggcggtggagctgagcttttcggcgatgcgctggttggaccagcccttgtttgccagcttcttcacctcggcacggcgtccggcgcgcttggcctcctgcgccgaaaccgcagccaaagcagcgcccttcttggctcccttggctcccgacttcgcggcaccggcacgcccagcaccgcgacggccacgggtggagggaccagccgcacgcttttcggcgagcagtcggaaggcgtcatcaggggtgatggattcaggcgtgtactgacgcggcaccgtgcggttggtctcgccatcggtgatgtacgcgccgaaacggccgtccttgatggtcacgttcttgccggtgttcgggtccttgcccaaatcacgcagcggcggcttggcggcaccacggccacgcccgcggccgtacttaggctgcgagaacagttctttggccttgtcgatatcgaccgtgaagatctcgtcttccgaggccagcgagcgggtctccgacttgccgtcggcacccgtcttggtcagataggggccgtagcgaccgttgttggcggtcaccgtgcattcggatacctcgccggtttcggcgttggtttcctcgtatgtgcccacttcgcgcggcaggctcagcagctttagcgcgtcttccagcgacagcgattcagggctcatcgtcttgaacaacgaggccatcttcgggcgcgacgcggcggcggccgcggccttcttcgaacccttcttggccgcagaagcaccagcagtatcgccagcagcgccagccgaagcctcagccggcggcaccagcgccacatacgggccgaaacgcccattgcgcacctcgacggtaccgccggataccgggtcaacgcccagctcgcgcggtccaccggagtggttgtcgatcaaatcgcgggccacggccaccgtcagctcatccggcgcgatggtgtccggcagagacgcgcgcttcgggttgccttcgacgtccagatgctccatgtcttccagatacgggccgtaacggccgacgcgcacgtgcaggccgtcgccgatgtcgatggtgttgatggcgcgcgcgtcgatctcgccgagctgcgcgacctgctgttgcaggccttcgtgcgcctcgtcggcgttgcgggcggcgccctcgccggaaccgaagtagaagtgggtgagccagtcgcggccggattcctcgccgtgggcgatgcggtcaaggccgttttccatctcggcggtgaactggtagtcgaccagcttggggaagttcgtctcgagcaacttggtcacggagaaggcgagccagctggggatcagcgcacggccacgctcgtatacgtaaccgcgatccatgattgtggagatgatgctcgcgtaggtggacgggcgaccgatctccttggcttccagcgtcttgaccagcgtggcctcggtataacgggccggcggctgggtttcatggccgtccggttcgatgtcgcttgcctcgacctgctggccgacgctcatcggcggcagggaggtgttggattcggatgcgtcacccctgacggccttgacgtccgtcttgccggcggcagcagcctggtccgagccagccccagcgccgggagcggcggctttgggcttgcgcccctcccccgtggccttcataaagccggggaattcgatgacagtgccggacgcttggaacacggcctcgccctcggtggggccggccggcgcagacaggcgcacggtggcggtggagccggtggcgtcagccatctggcaggcgagcgtgcgctgccagatcagcgtgtataggcgcagctggtcgccgggaagtttggaagccagctcatccgggtcgtggaagcgcgagcccgccgggcgaatacactcgtgggcttcctgcgcgccggcggttttggtggcgtactgcttgggctcggcggagaggaacttgtcgccgaaatggtaggagacggcgttgcgggcggcggtgatggcctcctgcgacagcgtcaccgaatcggttcgcatataggtgatgtagccgttctcgtacaggctttgggccgcgcgcatcacgacgcgagcacccatgccgaggcgattgccggcggtctgctgcaaggtcgaggtggtgaacggcggctgcgggcggcggcggtacggcttggtttccatcgacatcacagtgaaatcggcggtcctcagcgcttcagccacggcagtggcaccagcctcatcaagctggcgaacgttcgccgcgaacccgtccggggtcagctggccgtcggcaccgaaatccttggagccggcgagtcgcttgccgccgagcgcgatcatgcgggcggagaattcggcacgctcccccagcgcgtcaggcgcggccaacatggcgacgatatcccagtacggcacacgcttgaatgccatgcgttcgcgttcgcgttccacgatcaggcgggtggccacggactgcacgcggccggcggacaggcccgggcccaccttgcgccacagcaccggcgacagctcatagccgtacagacggtcgaggatgcggcgggtctcctgtgcgtcgaccatattgccgtccacgtcgcgcgtgttgttcagggaggcgttgatggcgttcttggtgatctcgtggaacaccatgcgcttgaccggcaccttgggtttcaaggtctgcaccaagtgccacgcgatggcctcgccctcgcgatcctcatcagtcgccagatagagttcgtcggcgttcttcagggccgatttgagttcgctgaccgtacgcttcttgtcgccgtcgacgatgtaatacggcttgaacccgtcgttgacgtccacgccgaacttgccgaacttggccttgtctgccgcgggcacctggctgggctgcgcgaggtcgcggatatgaccgaccgacgccatgacggtgtaccccttgcccaggtagtcaccgatcttgtgggccttggtcggagactccacaatcaccagtttggtagccatacccactccttatgtattgcgcgaaacacacgacgtttctggcgtcataatactcatgaatcatatccaactgccaaattccgccgttgtgccgggcaaattcggccgttcgcacctcatgttttaccgtttgggcggtgccggcggagcgccgatcaggcccagcctgcttaagggcgctgcagtgatctgacgtagggccagcaacagtccgaatgcgagcatggccacacccgtaatgcccacaacagcgctgacattcgccccctgaaccgcccaactggcgctgacattgagccccggcaccacctgccagatcacataaccgctgtaggcgagcaacagcaggcccccggtaatcaacacgctgccgacgatctgcacactcactgaggagacgcggtggcccggctcgtccatgccggacttgcgtgtaaccgccagagcgagcagggccaatcccgccaccagcaggatggacatcgccacatccgaagggcgatgccattgcccgtatatcacagagacaccgacggtcgccgcccaaaccacgccgatgacgcccgccaaagctcgaaccgcgcgaggcacggtaagcagcagaatcaccgcacaggctgcggccagcatcgtgtgtccggaaggcgcggaattagcggcaggcgattcagtgttgatgatgaacggacgcggcaacagacccttgatacgggtgacggccaagcagaccacggcgaacacggcgatttgcccggccaaccaccagcggcgtcgaatcagcgccgtaataatgccgattgcggcaattgtgcagctgacagcgataaccagccaggattgtgcgacggcgttcatcatgccggtggtccaggacggtacatcgttgtgcaggtttttccagaccagttcgtcgtacgattgtccgttttcggtaaacacgcacccccaccacacgccgaagccaatagcgatcaggagcagaccgaataccacgcacagtacgcggctggagattcgcgggcgcacggtaagcgggtcaagccgggccaagccacggtcgatatcagatgccccatccgcatcgtccatgcccagcggcctgaaatcccctaaggagcctgatgtggatgccgatgcatctgaaccggagaccgggccgagcgcagccaatgggtcaacaacgttcgacgacgagtcaggctgcgctgcgcctgagccgaccagattgaccgccgcatgcgggtcgcgaattctaggggtctgtgcgtcattcatacgttcgactgtacggccgcgccccggacagggagccgtgctcgtgccagctcacggccaaatccgcacaaatggaaaacctccacgcacccgtcagaggccacttacccttgctgcattcctgccctgggggagttgggtgacatagcgccgcgtggaggctggggataagtctatggagacgtatggaccagcgcagcgacacgaaacgtgcgcgccgggtcgcacggcaggccaaccagcgcattcaggcaatattcatgcagcatcaaggaacgtgcccaattgtaagaattccgggaaaataccggcataaatgcgtgtggttacgctcacgtcaaacgattgttcaaggccaacagttacggtggacaccatggcttcttatactcgtcgtgcacattcgggaggcaatggccccgctctgaggcaaccgcgcaccgcgcaaagcagagccgaccactccgcacaggagggcccctatacgccccaggagagccgttcccgccacgcaagccacaaggcttccaatagccatcgagccccgaacaggaagaaaaagaacacaggaaaaggcaagcaccgtgtactgaaatgggtgctgggcatcttcttctccctgattggactgggcttgctggccggtatcgcagtattcgcatacctgtacaccaccaccgaggtcccgcaacccgaaaagttcgcgttggccgagaaaaccaccgtgtattacgcggacggcaccaccgcgatcggctcctacgcggaacagaatcgttcaatcatctcttgcgaggggctgccggactacatcggcaacgcgattgtggcgtccgaaaaccgtacgttctacacggataaaggtcttgatctgaggggcatcgcccgcgcattcattaataatgtgaccaagggcacgcgccaaggtggttccaccatcacccagcagtatgccgagcggtattacatgggcgaaaccacatcctatgtgggcaaggcgcgcgaggccatcgtggccatcaaaatcgcgcaaaccgagtccaaggacgaggtgctgtgcaattacatgaacaccatctatctgggccgcaactcctacggcatccaggcagcggccaaggcatacttcaataaggacgccaaggatctgacgctgtctgaagcggcgatgatcgccggcattattccgtcaccgtccacgtgggatccggccgataacgccgatatggccaaatcgcgcttcaagcgtgtgctgaacatcatgcaggaggatggttacatcactgccaagcagcacactgatgccaagttcccgcagactgccgcggtggcgcagcaaaacgaatacgcggggccgaacggttatctgctggatatggtgcgccgtgagctggtgcagtccaaggcctttaccaaagaggatttggataccggcggatacaagatcatcaccaccatcgacaagagcaagcaggaccttatgcagtccatcggcgacacccgtctggacgacatgcctgaatccctgcaaatcggcggcatagcgctggacccgaagaccggtgaagtattgtccgtatacgccggttcagattatctgtccaagcagctcaacaatgccgatcaggccgtattcgaaccgggttcgactatgaagccgttcgctttgctgggggccgcgcaatccggcgtcagcttcgatacgttgttcaacggcaattcccaccagcacttcaccggcttggatcaagaggtgaataacgctctggagaacaactggggcaacatcaatctgtatcaggccaccgccaactcggtgaacacggtgttcatgaacgtcaatgagcatctgacgccgaagcgcacggccgcaatcgcccatgaagcgggcattcagggcgatatcgatgaaaactccatgtacaacgtgctgggcatcaacgccctaaccgtgtgggatttggcgcaaggccattcgaccatcgccaacaatggtgtgaagagcaccttgcacatggtgtccaaagtgcttgattccaacaataaggacatgtacaacgcgcccagcaaaggcaccaaggtgttcgatgccaacgactgcgctttggtgcagaaggccatgcagggcaccaccacgtacggtacggcggccggcacatccaacatgctgggccgacccatcgccggcaagtccggtaccgccaacgacgaaatggcttcgtcgttcgtgggatacacccccagcatgatgaatgtgtgggctatctggaacccggacgataagggcaatccgcaggcggtgccggccttctccggatacggcatctcttccactggataccccgcccacctgttccaggagttcatggctcaggccttgcaaggtaccgaggtggagcagttcacgaccgctaaagacaatggcaagatcggtggacccgacggcacttggggcttgggcaagggacagagcagcggcctgtccaacaacaccaacaagcagtccaccgaagacgcgcagaagcaggctgagcaggacgcacagcagaaggcggccgaagaggaagccaagaagcaacagcaggcccaggagttcgcccagcagtgcctcgccaatccgagctattccaccgagtgtccgaattatcccggcaccactaccggcggagatggcaacaatggcaacaatcccggcaataccggcgggaacaacgggaacaataccggcaacgataatggtaattccggaggcaccggcgggaacaacggcaccaacggcgtcacccagtagtaagtaagcacagacaacaaagctccctctgatgcaatcagagggagctttgttttgttgttagcgctcagcgcttgcgctgggaacggttgatggcagagataatcgacttcagagcgctggtggtgatcgacgaatcgatgccgacgccccacacgatctgcgcatcatcggcctcgccgacctggcattccacgtacgaggcggccatggcgtcggtgccgacggacatggtgtgctccacgtaatccataatcgaggcgtcaacgccaaagttggaaatggcgttgaggaaggcggcgatcggaccgttgccgatgccggagacctcgcgctccacgggcgcatcgaccccgacgttcacgccgcggtcgagcaggcgagccttgagcacggtatcggagccatcctcaccggagctgacggccaccttgagcagcttcaagcggccccacggcgcgagcgaggcgtcatgagtatcgcccacaaccacaccggcggcggtcatgccggactgttcgatcggcaggtactcgtccttgaacagacgccagatatcctcgtccttgacttccttcttggtcgtgtcagcgtagttctgcacgatcttgtcgaattcgatctgcagacgcttgggcaggtcaagattgtggttggtcttgagcaggtaggccatgccgcccttgccggactgcgagttgacgcgaatgatggcctcgtacgtgcggccgatgtccttcgggtcgatcggcaggtacggcacaagccacacgaagctgtcgagatcggcgccagcgcgctcggcggccacctgacgagcctcgagacccttcttgatggcatcctgatgcgagccggagaacgcggtgaacacgaagttgccggcgtacgggtgacgctcggagatcttgatctggttgcagtactcaaccgtcgtgcggatctcgggcacgttggacaggtcaagctgcgggtcgatgccttgggtgagccagttgaggcccagcgtgaccaagtcgacgttgccggtacgctcgccgttgcccagcaggcagccttccacacggtcggcgccggccagcacggccagctcggtggcggccacgcccatgccttcgtcgttgtgcgggtggagggagagcactacggagtcacggtcgtcgaggtgggtggagacgtactccacttcgtcggcgaacacgttcggcgtggtcatttccacggtggcgggcaggttgatgatcatcgggtgctcgggagtcggcttgataacaccgatcacggcgttgcacacctcgacggcgtactccggctcagtgccggtgaaggattccggcgagtactcgtagtacaggtcgatgcccttggcctcgttctcgaggtccttgcacagttcggcggcgtcggtggcgagcttcttgatctcttccttgttcttgcggaacacgacctcgcgctgcagcacagacacggagttgtagaagtgcacgatggcgcgcttggcacccttgagcgcctcgtaagtacggcggatgaggtgctcgcggcactgggtgagcaccacgatggtcacgtcgtccggaatcagctcacgctcgatgagcatacggatgaagtcgaaatcggtttcggaagcggacgggaagcccacctcgatctccttgaatcccatggagacgagcaggttccagaaacgcagcttgcgctcggaatccatcgggttgacgagggcctgattgccgtcgcgaagatcgacggagcaccagcgcggcgcgcgctgcagtcgcttgcccggccacgtgcgctccgggtaatcaaacgggatctgcttgtcgtaggcggcgtacttgttatacggcatacgactcggcttctgcggatcgccgatgaatcgtgccggaggcagcagcgggtcgttgttccccccattggacgccgcagccactgccgcgagatcaaaaacggatgattgaccctgacccattgttcctcctttactgtgcgaaccattcatacaatcgcttattggatattcgtttacgcattggtaacatgcgtaacttcctccatcctagcgacggcccattccaacaccccgttcatctcacaatatgccagcacacgtagcgcttcccggcgcagtactactagacttgcaactatgcgtggaggcgcatgggcttccacagcgagagaagaggtccattatgacaaatccaagtatgcctccgatgccgcaaatccctcaaccgaacggtcagcggcccgcagctccgcaatttacagcaccgcagccggtcttccagcagcctgcagcaccacgccccgcgcagcccgcagcgccgcagttcgcggcgccacaatatgctcagcctgccgcgccgcagttcccggcgcaggctccggctgccgtacagccgacattcccacagcagcccgcagcacagcaagccacctataacccgcgcccggtcaaccaactgcgcaccaagcgcagcctgctgaagtacatcctgctcggcattattactttcggcatttacgatatctggcaaatgagcgaagtgggcgagaccctgaacctcatcgcttcgcgccgtgacggcaagcgcacgatgcactactgcctgatgttcttcctgatcggtggcctgacgctgggcatcggctggctggtgtggtaccaccgcctcagcgcccgtattggcgatgagcagcaggcccgcggcatgactcccaccgttaccgcagccaccttctggctgtgggacgtcttgggaattttcatcatcgtgggaccgctggtctacttctacaagctgctgcatgcgatgaacgatctgtccgccgactacaacgcgcgcggctgaaacaatcccgtccttccacacttgccgacatatttgccggggcagtgtttttactgcgcttgccgatggccgcaccagtcagaccattattgttcggctccgcagtctcgttgattcataggagattccatttatgctttgccccaattgccataccgataacgcggaaggtagcaagttctgcgaaacatgcggcacgccgctcaccgccaccgaagcgaatactgcagcgtcgagtgcttccatgacaccgcaggacgcgccggttgcgcccacgccagcgggagcgactcccgctccggctgccgcttcagtccccggccccggcggtgcggcagtgccgccgattcctatgccgcagggtgctgctggcatgtcggctccggcggtcgtctccgcaccggcggctacgcagcccactgcgaccgttgccacggccacgcagacggccccggcaacggcaaccacaaccgccgcgaccaagcccggcccaaacaaactcatcatcatgctggtggcggtgctggcggccctgatcatcgcgggtgtcgctttgttcctgacatatcgttccgaggtgtggggcggcaagtcgctgcctgacccggcatccatcgcctccagcgtcaccgataagaacggcaagaaggcgtcggccgtcaaggccaaggatgtcacggccgcgctgaaggccaagggactcaacgcgaaaacggagaaggtgttctcaggcaaggattcgggtgagttcatcggctataagaacgccgctccgggcgctcgtgtcaaggccggctccacggtcgtggtgcaggaatccgccggccccggcgtgccgaaagacactctgggcgcacaggtcaataaggtgactgagacgttcgccgatatgggcgttccggtccactataagaaggtgtttgtctctgacgccaagaagaaccccgaaggttcggttgtggccacctatcctgccgccggcactggggtcaaggacgacgagaaagacaagggcatctacattggcgtggccgccaagggtgacgacaccgctctgcccatcgacgtgatgggtcaggatgtggataccgtcaaatcccagctcgagtctgagggccacacagttaccgttgaacagcgtttctcttccaaggattacgtgggtaaggtttccggcgccagccccgctccgggatcgtccctgtcttccggcgaagacgtgaccctgtatcagggcatcgatgccagcgacaccaaagaagcctttacaggccatgatttggccgaaacaggcggtgacgcgctgctcggtaccacacgcgcagccgacggccagtggtgcactaatgatgggaagtgcatcaccatcgacaattacaaggtgactgaaggcggcagtgataatgttgactataccagcgattacgacggtactctgattgcctgcgacgccattcagcaggcgtactgcaatagtccgaaagccgactacctagtcacacaagattatggcgccttcgagctcatgccgcatatcagcctgaccaacttttgggccaacggcaaaatgtatgacggcaatggcgtgcatatgggtgattcttggcccacatccggcgaataccacatgcaggatctgttcctcgtagtgcctaccggctccgacttgcaggggttggaagataagggctacttcgacaaagacgcgcttgccgcagccaagaagcagaaggcggtggacaccaatcgaccgttcattctgtaccgcgatccgaagctctacgacactaccaccgctccatacaacggtgccgggaacggcgccaatccgttcctgccctacaacggatacaacggcagtaagtccgacatcgtcaagatgaagccggccccaagcgacgccgacgcctactatctggtcgaagcgtccgaacccgattgggattccctgccggacgcggacgtgaaggcgcccagcaccaaggacaagggcaactccaaggattccaaggattccaaggattccaaggattccaaggattccaaggattccaacaagagcagtaagaaatccggcacaccggatgcggcctcactgaaggtgttttctgatttggccggtgcccaatacgcttacacgattgctggcgatggcagcgccttcaccaccatttcgttggatgatcggggcaacttctccggcactgtggacgaggcagatatgagcagtggcgattccgcagcgaatgcgccacgtatccagaccaagttcagcggtaagtttgcatccgccacatccaattcagatggcacggtaacgctgaagtgtgatgcgtcggctttcaaaattgacgacaagtccaaatccgacaagtcaggattcagcccgtgtggcaccttcaccggatatccatctggaacctccagcgatgcgttgccatctgaagcacaggccatgctcgtcaagcgtggaacgccggatggatcatccgattggatgctgattaacaccgaaggctctggtgtttttatccgcacccagaaataaataacagttaagcagggttcaggcggatccaacgcttaatactcagtgaggccagttcataccggcctcacgtgtttttagcgcttcttcaccaacgagcggatgacggccataaaaccgaggctcatggcaccggccagcactgcgaatacctgcgggcggcgcaattcgttacgcatgctgatggcaccggtcacgcagtggtcctcgaaccagacgcgcacctcgttgctggagtatcggcccaccagatcaccccaggtgagcatgcgggtcacgtagccggccgggttgctttcatggaattcaaacaggcggatgcctcgatagcgcgatttggggccatagcattcgaatccgcaggtgggtgcgtagcccaaatcaatgccatgcgcgtggcccacgaaggcgttcttgtgatcgtgaccacagaacagcgcgaagtagccgcctgcctcacgcaaggcgtccacttcaccgacgttctcgtctgcacagccaatcgcctcacccagccgcgatcccggccggcagatctcatggttgagcacgtagcaatgaccggcgtgggtacgtgcgccttccaccgcgttcggcgtccatgcgggaacctctttgaggcaatcgtagaattcctgcggcggaatgtgctggaaggcgatggcaggcaccggcttaccgtcgccgttgcgttcgccaagttcggactgtacggctcccagccaatcgatcgcctcggggcttggcgtgccatacccatcggaatcagccaaatcaagaccacgcggattgaccacataggccgggtattgggcgtcgttctcttcgggcttgccggcgtaatcgccggaattcaccatcatgacggacatagctacgcgcccggatccgtcggaagcctcaatgggcagggcaaaagtgcctggctcaaggctgtcgactgggttcaggcagccggggaattcgcggtagatgccgtcctgctcgtcggccaggatgccgcactggaaatcgtgattgccgtaggtggcagcgaacggcacttccgcttcgatgaccgggccaaggaagccggcaaacgtgcggcggactttgtcacgggtctcgtccatgagctcgtccaaagtcgtcggcacatcctgcggatcggatgttgtggagtagaccagcgtggacgcggtggacgcggtttgttgggcgtcggaatcgctgccgtcggacttcatggccagcagacgattgttcacgcggtctctggcccgccgcttgattccgcgcagcttggcctcgacctcggtgaccgcacgcacgcgagcgcccggttcctcgccacggcggcgcaggaaagtgtcgatgtaggcaggatcgtaaccgcggatctggtcgccggtgaacaccaccagatccgggtcggctttgcgaatggcttcacggataaggcggatggtatcggggagcacgttggggccgtcttggatgtcggccatttgcagcacgcggaagctgccgtcttcgcggaatcgcaggttcgtcatgcctcaccagtctagggacgtaatgctgtttcgcacagcatacgcgccggtccttcacgttccccgccgctccgcacggcagctgaatcactacgagaaatcgtagaacgtgtatcccttatccgctccgctcgtcacgttgagcaatgccttgccgttcagcgtatcgacgtcgtttcctatgagatagccgtctcccgtggcccccatatccgagtcatggtaggagcctgagaaggtgccatccttattgactttcattacggttccccatgcgccgacaccggaaccgaaactatagttacctgccgcctgtttcatggcctctttgaatgtggcgtctcgtttgccgctgtccttggacttgtcaccggtcgtctcaccggaagcggccttatcgccagtgcccttgacctcggcgtccggcagggaatcccagtcgagatcgccgttctgctccaccagatagtagacggtcgaatcgctgggagccggcctcatcggcaccagcgcgttctgatagttattgatactgctgttggtcggcacaaacgggtccacgtccttgccccggctggcgctcacactgatctcgctgtacaggctcttgtcacgaaccagaacgtacgggcggctggtatccacggccttctgcttcttggccttcgccagttcggcggcgtcgaagtaaccggaatcatccaatgacttggcatcggaaccggccgggaagtagaccaggaagtccttcatgtcgtaggtcatgccggtcgacccgttctcagccccggccggtggcgtcatttcgccatcgtcgaacgacgcccgttcatagttgccgttcacgcagtactcacctatcgaagcggacatcacctttgagccgcagttcggcagacccatgcccgcgtacagctcgaacataccccagtctttcaacagcagatggtttttcatcggcaatttgtccgcggccatgccgtgttccgaatccgcttccagcatcgcgccgctgatgtcctgagagaagttggtcaggcccaacacatcggccttgtcttcaggctcatggcctttgatttgcaggtactgataatcctcggatgaagtggagccaaagggattcatcgaggattgctccagtgtgatgcagtccttggcggcatccgtcacctcgctcttgcagtacataccgatcattgcggacgcgtggatgctggccatcttgatgttgtcatacgagttggttttgctcagcacgtccatgttgctggacttatcgatgccgtaatacaaggtcaccgactggccggaactcaacgtggatcccggagccgggtacgagccggaaatcttgcccacgtatttctctgacgagtaatgcggttccaaatccacactgtagccttgcgactccaagtcgctgacggccttgttcttgtccgcaccaagaatatccaccgggataccatcgcccttggaggccacgccaatgtaaatgccgttgtccttctcgtcatcggtgagccctgcaccgggagccgggtacgtgacgctgacctgcccttccggagtcttgctgtccggcgaaatcacaaccttcttatagtgaatcggcacgcccatattcgcgaacgtgttcgtcaccttgttcacatccttgccgaccgtgcccttcggcacaccgggaccggccgactcctgcaccaccaccgtggaaccggccttgacgcgagcgccaggattcgtgccctcgtagccgaggaacacaccgcgatcctcgccggagaacaccggaaccgtcttcgcgttcaggcccttggccttcaacgcctcggtcacatccttggccttgaccaccgatgccttcttgccgttcttatcggtgacgctggaggcgatggacgccggatcaggcagcgacttaccaccccacacctcggcacgatacgtcaggaataaagccacaccggctacgatcaacgccagcagcaccgccacgagcgcgataatcagcgtattcgggccacgcttgcccgaaagattcggcaatgtggcggttgcggtcgttgtgccgctcggcggcgtggctgcgcccggagcgacaggagcacccggagcggcctgcggcactgctcccggtgcgatcgacccagtatgacttgctcccggtgcggtcggcgctcctgccacaccgctcgatgtcggcacgccgggctgcccataggcgttcccatcgtttgggccgggcagcggcgggtgatcaagcaccgtcatagtattgtccggcagcggcactggaatcgggccggccgccgcctgaggagcaggagcactcacgtcggttagcggcgcaccacagtgcatgcagaaccggcttcccccatcattgtcagcaccacaattcttacagatcatcattgctcttctctctggtcgaatgacgcactatagcctcattctactggaaaatgaacgcgatggaatagtccccactcagccgccaaccaaaaggcgtggtccgtatacacagttgcatgtgcaaatactgcttgtactatttgcgcaacgtgctatccaccgaggcaagcacttggctcatcagctgagcggcacgatcctgaccttggttttgcgtgaccacagagaccgcggccttgttgccattcacctccacgatggcgaagtaattccacgtgttctggatgcccatgccacgatgtgcatgcacggtcatgccgctcggaatcaccacgccctccgaagcaatatcagtgttcatcagaccagtgccaccgaccgcatcaacggcaaccagcatgcgggccgcgtcacgagcggtactgtaattctcatatccagcattgctggcctgtacatcaccgaaatcacggttgaagctggtgccgctgtacccatgggaactcagccatgaattgacagcactccatccgccaagggccccgacagcctgattgccggcactgttatccatgccggtcatcatcgtatttgccaatccttccgcattgccgttgccttgagaggcaagatacaccggcagatacaggcctgcggcaacgaacttcttactcgactgcgacgtattggcaatggccgagtcttcagacgacgcatcggcgctggaactggagctggacgaatcatcgattacggtggcgctggccgccacatccatcttcactagcgggttgtatccaccgctcatcggtataccgggtacgaacggattggtggtttgctcgccgttcttgtatgcttcgacgcttgtggtcttgtatcccttggggtcgcgcatgatgaagaacggccggtcggtgtctggcttccccgccttgttcgccgcagccagcgccttgttggagaaatagtcggaatcctcgagtttgctgatcttcgattccaccgggaagtaaacgtagaagtcatccatttcgtaggtggcaccggattgctgaccatcagggatatcatcagtcctcacatattgaccatggtcacacccttccgtctccccatagcctcggtagaccgtgccgtcgcataccggccatccgtagccacggtacatctcgaacatgccccactgtttggccaacaagtggttgcgcatattggtttcattatcgggaatcgaaccatccttgtagtgcagaatgcacccgccaatgtctccggtgggcgtgcacagtgtgccccgatcgtcccatatgccattggactcatcgcctttgcgcaccaaatacgggtaaccggacccgtatttcattccgtcttgacccttcgaaatcagcgagatgcatccacccgagccaggtaagaaaccatccttgcaataggtgcccgtaacacgccattcgcccgcagccgagatatacggcaaactcctgtcactcttgctagtgctggcataatccgcgtgcgggtcgaaatcataatcactacctgaaccggtggtcaccacatcttcagtgttgtcggctcccacaccgtagtacagacgtatcggttgcaatattttataatcattttcctcattgctcgcctcaaacggcgcaccaaaaatgtaattggaagctacgattttgccaaaatccttcttggcggaaaatcgcggctcgagaataacctcgatcttgttgttcgatgcgttttctactgcggttttcgcctcatccttatccataccgataacgtcggccggcatgccctcgactgagggatccgggataccaagataaatcgcaccattatcgtccactggctgcccccagccgggtaggtatacacgactttcttcgtatcggccttggatgttgcggctactcgcttggcataaatcggcacacccatatctttaacggccgcagcggccttggcgacgcttatgacccggtaccggcgtctgcggtaccgcgatagtggcgggcgcagacgacgctgggccgaggctagagctgagaccggggccgggaatgggaccggcgggtggcatcggcacaggcggaacatcagtgaccgtattgtgtcccacggcaagtttcggtgccagcggagcaccgcattccgtgcagaaacgggacctatcgtcattggcagcaccgcacctatcacagttcatcgcgtcttctctctgatgaaatgatgcaatatgcctttcattgtacagagaaaacgcacactggcggagtcaacggaacagactcaccccgcgacgggccgtgcaatacgcgttgcccagccaggtatggcgggaattgggccagacagctcccagtcgcggtgcgttctggctcatccagatgctcggcacgcggccgtctgcggagcgtgagccgagcagattgaagccgttcttttccagcagccactccgggtgctgggtggcgatggccaagccttcctcgagggtgagcggcaggcgttcatcggagtcgataagcttgcgggccacgtccggctcgcgattgatataacacgtgccggtgtgcggattgacgaccagatagaacgggccttccggcggcatgaagccgtcttgaggcaggaagctggcgatgtcacgcggcggcatggtggtgaagccggccatgcgattgatggaggttcgtgcgatcagtgactcaggcgaaaccagttcgcgcgtgggcaccagcaggatgttcgatcccaaatcggaatgctcgagcgccccgatcaggggtcgggccagcgagcggaatgcggcggcggaaatatccgccacatccggatagccgagagccacgatacggtcgagctgtttttgggcctctactgatgcgatagacatggctaccagtgtagaacatcaccttcgcttcatcgggcagtcaccatctgggaagaccgctactgttgttccgcgcgtttcgtacaatgtcattgttttacggtcacccgtatgacggccgtccgaacgtaagtaacccatcgaaacccagaggtcatagaggtcatcatgtccgaaaaattgaaggtcggcatccttggtgccaccggtatggtcggtcagcgttttatcacgctgcttgagaatcacccgtggttcgaggtggtcacccttgccgcttccgcgcacagcgccggcaagacgtatgccgaggcggtcggagaccgttggaagatggaaacc

SEQ ID NO: 3898 - DNA, 6915 bp, Unknown
  R22_24m  MAG No. k141_9108
ccatgtaggcggagaagtcggccagggtcatgaaccagtccttggtcagccagtcggccacgagcggggagtaggcgttgcggtcgccgttggagaaggtgccgtcggccaccagatcgatggcctgcttcaggcgcggatcggcctcgtagtaggaggcgggattgtagccctcggcgtacttcttctcgacctcgtcgacggtcatgccgaacaggaagaagttctcggcgccgacgcgctcacggatctcgacgttcgcgccgtccagcgtacccacggtcagggcgccgttcagagcgaacttcatgttgccggtaccggaagcttccttgccggcctgggagatctgctcgtcaagctcggtggccgggatgaggttctgagccatctcaacgttgtagttcggcagcatgtggacggcgagcttgcccttgacggccggatcgctgctgatcacgcgggaaacgttgttgatcagctcgatggtcatcttggccaggtagtagcccggagcggccttggcaccgaagaacacggtgcgcggagtgatgtcctcggccttgaccttgccggacttgatgtcggcgtagttggagatcacggcgagaatcttcagagactggcgcttgtactcgtgcagacgcttgaccatggtgttgaacagggtgttctcgtcgatatcgatgccgtagtggtccttggcgaagcccacgaatgcgtgcttgttggccttcttgacggcggcgaacttcttgacgaactcatcgtccttggccagcggctcgaggcccttgagcagttccagatcggcgacccacttgtcggtgcccaggccctcggtgatgaggtcggacaggcgcgggttggcgagcttgacgaagcgacgcggggtcacgccgttggtcacgttggtgaacttgtccgggtagacgtcggagaagttcttcagggtgacgtccttgagcagctgggagtgcagctcggcaacgccgttgacgtgggagccgccgtaggtggccaggtaggccatgcgcacggcgtcgccagtgtagatggccatgtccttgatggtgtcggcggcaacgcccttggccttgagctcggcctcgaactgcgcgttgatcttctcgatgatctcaaggtgacgcggcagcagctcgccgatcaggctggccggccagacctcaagggcctccggcagcagggtgtggcaggtgtagttgaaggtcttggtggtgatggaccacgcggtatcccagtcgtagccgtactcatcgatgaggatgcgcatgagctcggggatgccgatcaccgggtgggtgtcgttgagctggaagacgatcttgttcgggaaggtcgtcaggtccggcttgtcctgccccgggtagaagacgcggatggcgtcgtgcagggatgcggagacgaagaagtactgctgctcgaggcgcagttccttaccgaccttggtggagtcttccgggtagagaatcttggagatgttctcggccttgacctgcggggccacggcgtccatgtactcggaacggttgaaggcgagcagatcgaactcgtcgtagctcttggcggtccacaggcgcagggtgttcacacgctgggacttgtagccgggaaccatgtagtccaccggcacggcgcgcacggaccaggccggttcccaggtcttggtgccgtcggcgttttcgacgaccttgccaccgaaggagaccttctgatcacggttgtagtcggtgtggccccacggctcttcgttggccagccagtagtccggggtttcgacctgcttgccgttctcgtcgaacttctgcttgaagatgccgtacttgtactggatgccgtagccgaaggccggcacgccgagggaggcgagggagtcgatgaagcaggcggccagacggccgaggccaccgttgccgaggcccggctcgtattcggcgtccacgatgtccttcggcttgaagccaagggcttccacagccttgtcgaactggtcggtcaggccagcgttcagcagtgcgttctccagctgcttacccatcaagaactcggcggacaggtagccgacggccttggtgttgccgttgacggtgtcggcctgggtcttgaaccaggagtcggcaaggtggttgcgcacggccttggatgcggcgacatacacgtcagcaggggtggcctgctcggcggtgacgttttgagtgtatttcagttgttcacgaatctcgtcggcgaattgttccgccgtgacaggagacttcggtgcggtgatttcggtcattctgactttccttccgggataagtgcccgtgtttattatgccgcgcgataggtatcgtcgcatagacgtaagcatgaactctccgtaacgacgatggcggagcgttcttgcatacgttctcattgagagcgtatcacatatctcacggttccgcatcctacagtatgccatcgtttgcataccttgcggtttcgcgtgccggtgccatgatggagcatatggcagtaattctcgaaaaagacttgaaacgagggcacgacgcactggtgcaatggcgtgccgcagccctggaactggccgacaacacaccacatcgcctgaccacctcccccgttctgccgcgcccggtgtgggcgatggctgtgcgctactcgctgttcctgctggagcggcgcgcgcccggccctggcgtggaggtgcgcgttgcgccgtggggtgcggtcaaaatcctggacggcccggaatcggacccgcacaacctcactccaccggacgtcatcgaactggagcccgaggtctggctacggctggcctgcggcatcaccacgtgggcagaggaaaaggacgccggccacatcagcgcggtcggagagcgcgacgatctgagcgacctgctgccgctgtaaatcgtcggatgcccggtatcggatgccctttatcagaactgtgcgatgctccaacgctggatgtgctcggcccagcggtccggcgtgggtagggtgatgaggctgcgcatcgtcagcgcgtaagcggcggcagctaccagtacggtggccagaatcaggcaggtcggaccgtagccgatggtctgcataccccagccggcgagtgccacggccacgccataggcaccgtactgcaacaccatgctgcccgctccaacgcggccgagcttgtccttgcccaccaaggtattgctgaggcctccaagcaccgcgttgcccgcgggcaatgccagtaccgagcaggccacaaatatggccttgccaactatggagggcaccaacgcggcaccggtgaatcctacagccagcaagacgaacatcacacccaccagtacgccgccgggcacacggttgaccagttgcgaggccatcagtgcgcccagcaacatgccaacggcggaggcggcgttgatggatccggcggatatcagctggctgccaccttgggagatgtccagcgcggtcagcagtaggaaggcattgctggcaccggtcaccatggccgctgcgatgatgagatggcgttggaaccggtcgcgcagcagccagatcatgccgtccagtgcgtcgcgccagcgtggggcggagtcatcggcatcatcggcgtccgagacggccccgacctccgaaccggtatcaacattgcccggacggccgctatcgctcacagtcgcacgtttccaatagcggcggatacgccatgcggacaccatgcccagcacgctcagcaccgcgctggtcaggaacggcaccgcatgtcccacggtcatcagcagaccgcccaacggcccgcctgccagcgtgaccgtcgaatccctggcgtcgttcaacgccatcgcgtgaggcagctgctcatccggcaccacgccacgcagcatggcattcgatgtattctccaacaggccatcgcgcaccgaaaacagcacgacgatacacagcagcgcgatcggaagcacgtgggcatagggtccgccgaatgccggagcgtttgccccgttaaccccatggccgctcgtcttcggcgcattgccgaacagcatcaccgctgccgccgccaccgccgagagcaccacaccggacgcaccccagatcagcatgagcgtacggcgatcataccggtcctgaatcacgccgccggcaaggcccagcaccgtctgcaccaccacgcagatgctttccgtcgtggtggcggcggcagaggatcctgtcgtggcgagcatgatcagcggcaccgcgaacgcgatcaggctggcaccgaccgcgccggacgtgtccgcagccagccaccatccgtaatcagtcccccgccataattccgtatcacttgccatcgttgccctccctgggattggtccttatggacgccaccatagggagccgccgccgagccgaacacccgcaatcctcggttatggggacatggctgcggtcgtcgtcctcatttgtgaggacagggcacaatcagcgccggacgccggacatcgcagcttctgccccatcagccccgcacgcacgggatacgcgcactcactcaggaagcggcgtacccaatcccaccatcagccccgcacgcacgggatgcgcacgtaaatcatccatacgccatcgtccgaacgggcggtcaactcaccgcccaactcctgcacacgggtgcgatgcatggccagcccacgccccgaccgctcctgcgcggacaggccactctgcgcgtcggcatcgtcacggatatcgttggtctcgcgaatctcaatccattcgggagacagagtgacgaatagcaggtaggaatcagctcccgccggtgcatggcggcggatattcgtgccgatctccgtcatcagcgacagcgcctcggccgccgcctcggggtccacgaccatggcgatgccgttgaccgcggccgtcccccgatagccctgcgcctccagaaactcctcggtatcggtgatctgcgccttcacacgcgtgacgaaggattgcggcatgcccgctgtggattgcgtacggtcatcgccaccggcgttctcaggcacggcattgtcaaccacctcattcgcaatcgctggacagctcccggtgcctaccgggtcacgagccagggcggattctttcgtcggcgaatcaacctgccctgattctgcagtcgccacctcagatgtcccggtgccaccgaccggcaaggactcgtcccggaagccggcgtccattccgctctgctcggtcagaaaatcgatgatgccatgcacttccgcaaaggcacgttggctgcgatccagcacgcgctgccagtcgccaccatcgatgccggctggcgcggccagattattccggacgatggtcgagatatacgtcagatcgttggacagcgtgtcgtgcagttcgatcgcgagctggttgccgtggcgcagatcggccagcgccgattccatctgctcgttttcgttctcctgattcaccacgcgcttgcgccagcgcaacgcaatgcccagtaataccagcagcacgcttgccgtcaacgccgccgacgccgtgaccagccacgacccggtcaccgcatagacgatggccgccaccgcaagcacaccgatcgggccgaacatcgccagcggatgattgagttctatatcgatatcaatctgatgatgcttcttgccgtcggcgtgaccatacgaatacgacgaatgccgcgaaatgataatcggacgtttcaccgggccgctccccttatgcgtcttgcgcttcttctaccgtgtccccacacacccatcggcgccttcatcagtgcaggttcatgcgaatccatgcgccgataagttccttgagattgccggcgccgagcttgtcggccgcacgcatcaaatgcgtgcgcacggtggtttcggtgatggacagttcggcggcgatctgcggcatggtccggccgcgggaccacagttccgcaacctccatctcacgtgcgctcagccggttgtccttctcggccttgatgcgcgcggacgcaacggccgcggtctcgaaccgcacgtcgccaccatcgccccatgttttgccggcctgtacctgacgaatcgccacggcctgcaaccgcacatcatcgttcttgctcatgatgccctgtgcgccggcccgggccatctcctgggcatgccggcccacaatcgaggcggtaatggccagtatcgccgtggtcgcgttttccctgcggattgcacgcaccacatccgggccgttgatgtcgttcatcgcgatatcggccaatagcacagcaggcgggcgtttggtggccgtgcacagctgaatggctttgctgccttcgctcgccggcggcagcagctcgaagtcgggcagcgccttcgccagaatcgactgcaatgccatcaaggccatgcggtcgttgtccatgatgagcatggtgggcttcgatccatcccgcccgctgatatccgacatatgcctacgtgcgttcagctcttcttcggcttcagcgctgagggcatgggcatcggaatcggcttgcgcggggccggcttcggcttgggcgcggccggcgcggaggccgggaactcgccgctggtcgcctttgcggcggcttcggctgcccacttggcgtactcgtcgaggtcgtcctcctgcgcggcgggcgagaccttggcggcgtcggcgtcagcagcagaatccacatccttgtccgcatactgatcatcaatatcggcgaacgggtcaggagagcccgttcccggctcctgctcgctcagctcttttgccagctcatcgtaatcggtatcggtggtcaggtacttgagctttcgggcaattttctgctgttttgctttttgacgtccgcggcccatctgaccccctgcgattactgtgctgttcgattcatcaacaata

SEQ ID NO: 3899 - DNA, 38270 bp, Unknown
  R22_24m  MAG No. k141_9156
cggacggatgatctgttcgaccaccccgtcggacaagcccaactcgtagtcgccgggcgtggcggacagatacacggtctggccgacgcgctgcaggaactccggccatttgagcggtcggttatccatcgcggagggcagacggaagccgtgttcgaccagcgtgcgcttgcgggaggcatcgccctcgtacatggcgccgatctgcggcacggtgacgtgtgattcgtcaatgaccagcaggaagtcatcggggaagaagtcgagcagcgtgtgcggtggggtgccggcggcgcggccgtcgaagtggcgcgaatagttttcgacgcccgagcacacgcccacctgggtgagcatttccagatcgtaggtggtgcgcatgttgaggcgctgcgcttccagctccttgccttgcttacgcagttctgccaggcgttcgtcgagttcctcgcggatggttttgagcgcgcgttccatgcgttcggggccggccacgtaatgggaggccgggaagatgtggatttcgttttcctcgtcgatctcgtcgccggtcagcgggtgcagcgtggagatgcggtcgatctcgtcgccgaagaattcgatgcgcacggccagttcctcgtagacggggatgatttcgaccgtatcgccccgcacgcggaacgtgccgcgggtgaaggcgatgtcgttgcgcttgtactgcatggccacgaaccggcgcagcaggtcgtcgcgattgatctgctggccttccttgagaaacagcatacgcccggcgtattcctcaggagtgcccaggccgtagatgcaggagacggtggccacgaccacacagtcgcgtctggtcagcaggttggccgtggcctgatggcgcaaacgttccacatcgtcgttgatgttggagtctttctcgatataggtgtcggtctgcggtatgtaggcctccggctgatagtagtcgtagtaggaaacgaaatagctcaccgcgttgtcgggcatgagctcgcggaattcggcgcacagctgcgcggcgagcgtcttgttcggctcgatgatgagcgtgggacgttgcagccgttcgatcagccatgcggtggtggcggttttgccggtgccggtggcgcccatgagcaccacgtcgttctcgccgttctcgatgcgcgtggccagttcctcgatggccttcggctggtctccggatggtcggtacggcgatttgaccacaaacggcttgtccacacgttcgatgttgaatcccatgcgctgtttccttccgattcacgctgtatcccgatgatatatcggaatatacgctaggcaactccaatacccgtcttcctcttggacgcgcagccaaccaccgctccgcgtaattgattgacacagatgagacattccaaatcccatgcccaatgttctcggagattccgccaatgctccatccgccatcttggcgggaacgtcagccaccgatacgtacagtccgtcttgccgcacttgtatggcgagtacatacccttgttcgcgatccgcgtgcttggcgatattggcaaacgtctcttccagcaacgaccgcgtcaactggatagtcttctcgtcaaaccgactcaggagatcgaagggatcggacacaaccacctcgcctcggaaaccaagcgttgcgagttcccgccggcgccgttcgatctcggcctcgaatcgacctgcaccgatcggaacaatggcttctccggagcgacgcgcatggcatcgcgggattcgcgcagtaccgacattgtgctttgcgagaaccgctatgacatcatgcgtctgatcgagcgcccgttgagccacttcgcgcaacagtggcaagtccatcgactctccttgcgaagggtgttccgacatgatcctgtcgatgctcatgatgagatatgagagatcattggtcgtcgcatcatgcagccttgccgccaaatccaacgattcggccctgccacgcgcttccgactccctctccccctcacgatgatgccaattcagcagcagaccgattccaacgcacgccaacaccggcatgacggtccaaggcacaacggacaccaacgccccggcatcccaacccatcggcaacccatactgccatatcagctgcgccacgcgagatacggtcacagtcaccgccaacaccacgccgcaccatatgcgttgataggagaggacgattaatggctcggctatcaccacgctcaccgacatggacagatccaccggcaaggggaacaccacgcaccatgagatcgccaacgcgatattgccgccgaacgggaatgccacgcagagcaacgacaggatgacgaacaacagacccacccacagggcccacgcatcccaaaccggattgatacacgattcgatgaccgtatcagcggctatgcacaaggcgcaggctagcgccgcgatcttctcgccatgccaagacttcccgaaatcgcggaagcgacgtctaagaaaacggctgccgtcacagaacatggtatcgctcacagtaatcaaggagttcgccgcgcctcgtcaccccgaccttgcgcatggctcgtttcacatagctgtacacagtttcgacaccgattcccaagcggcgcgcaatttcaatggtcggtacatgatgtgcatagagacgcaacaccgccagctctcgatcggagaagagcctggcaccatccgcttccggctgtgcggcatccaccgtatgcaatgtctcttcaaggctatgcaaaccccaaccatgagggtatgttcccccgtcaaacaccgatttgaccgcctcgcgtatggtcgctgcgaaatctcttttcgaaatcaacgcttgggctccgcaacacgcgatatcctcaccataggttgccaggtcatacgaagtgactacgatgacgccaacctgcacgttccgctgtcgaatacgttccgtcagccgcactccgttcagcccgtccatcatgagatcgcaaataaggatgtccggcttccgcggatcgaacagacaacgttccaaggcaagactgggattatccgtaacccatagcatatgcgcctcgggaatcgtcctgccaataagcaaagccatcatctccgcagagcaacgatcgttgtccaccaaggcaagccgaatcaggcgcccgttcttcataagtaccccctccccaaatcgcctccgtcaaacgaaatcgtaacactgtgacgattcccgtcacacagacttcgttcgctcctcattggcgtcttaccgtgttatatgcggcaaaacagccgcgcaataatgtgcggcgagcgaacttcctatcgtccgccgcacaaacacattgttaccgggaataaggtgtatcatgcactggacttataaaatcgccagtatattggccgtggctctcatcactctcgcagcaggattctatgcgcaaaataacgaagaaacctatccctccggccctagctacgatattggaatttccgacgcgcacgggcagcctctatcgacattgaccggtctcgcagcgacccatcatgtcgtactcgcgagagtctcctatgagccggacggtcacggtaccaacagacgcgtaatttctattttcggcgcattagacggcaacggcatgcatgcgaattcgccatacccggattatgggttcgggccgcgcacacgtgtgcaacgcggagacagattcaccgacccattgggaagatggcttctctatggatcaccacgggataccgcttcagtagccaaatccatacggcgccaaggattcgaacttaacagagcaacccccatcggcatcacacaaatcaccaaacaattcttctccaattccatcgcccaagtcatattcgccggacttgctgtagtatttgtgtccggcgcgctttccgtgtcgacagcttcacgcgtttgcgcgatacaagccttgcatggcatgagaacaaccggcattattatgaggcaattcctgcggcatgcgttctttttcatcatctgcgtctgcatcggatggatgacttggatttccattggtgcgatcttctggcctttcgcttctcccttaggattcgccggtcaggtattcctctccatcatcatcgccacaacgtgcatggcattggttgccttgtcattgtcgattgctctagtaagggttctggtgccgaacgcactcaaattaatccaaggaaagcgccctttacgttttctcatggcttccggctgcatcatggcaatcatcgttctcgctctcagctctgccagtttgaacgttacgaacttcaaatggcggcaatcccaaacactgaaaacaacattggagcatcaattgtcatccaacgacggattccaattgcaactgtggtatagccgcgatcaaaaccgagcccgttccatgccctcatggaatgacttcgtcgaacaaacttcccaatcagaacatacgcgattcgcctcattccggctaggatgcacgtgggtggatagctcgcaagacccacagccctgcatcctcatggattcccgtacggcaaggcttcatcatcttatacgaaacaacacgacacttgcacgaatcagtgtgattatgcccgagaatgaacaatggaacagcgaatccattacgaacaatgtgcttcgcgcatactcattcgagcaaagtttggcggcagaagagggaaagagtctgcccgccatcaatcgcacgagcatctccattgaatccagaccaagagatgctgtcttatcggcatttgacaccccttccaacaccgatggcctttcctctgttcctgttgttgtcattgacccgtcactgctctctggcgataccactacatcgatggtgtccaccggcggcatgaccttcgattacagctcccgccatcagctgctcgaaatcctacgggaaaagggcgtggactctttggtggcttcggtcgtcaatcggcacgacgagatacaaactcgtttggcacgaacaactcaggaaatgaactatttttccatcacagcttgcatatccataacatgtctgctgggcggcgcaatcatggtggctttgacactatgcacactccgacgtcaaattatgttcgtggaatatatgcatggagcgccgtcatatctccgttttcaatcgatactgttcctagcagcggcgttatgcagtgcatctcttccgatccagttgctcataggaggttacaacgccgtttccacgacctcggtttccttactattcatcgtcgtttcgctggcaaccacagtgctttacgattcgcggctgcgcgccgacagtatcaaacatccctgatcgccatccacaaacctgtatcagcaatcacttaccacgtaaggaacatcaatcatgagcgccttattgatcacgcataatctgacatatcgaatcgacgaccgcaccttatgggaaggactgaacctgacgttcagtcccggtgacatggttgccctaaccggagaaagcggatgcggcaaaaccactttgttgaatgtcctaggtcttttggaagagccaagttcaggaacaattacctatgatgggcaaacaattgcctccagaaagggccgacggctcatgcaccgcaacgtcatgggattcatgttccagaattacgccctggtggagcaatggacggtgaacagaaatctgattctggctctgcgcagcgtcggaataccatcggcagatagaagtcggctcatcagacgcgcattgcgggccgtgaatctgacgggctacggcaatagacctatctacacactcagtggaggcgaacaacagcgagtcgcaatcgcgaggcttctcatccgtcaatcgctgcgcgtcatactggcggacgagccaacagcggccctcgatgccgacaaccgcgccatggtcatgcgtcacctgcgtgatttcgccgacaacggagcgatcgtgatctacacgacgcacaacgaggagaccgcggccctcgccgaccgcatcatcgcattatgattccgccagccactgttcgtacagcgcatcgacggcttcgagcattcgacccatcggctgcgtggaatcgatcaccgcgtcggctatgacacggcgttgttccaggctggactggtggcgaatgcgcgcaagcgcatcatctcgcgtcatgccgcgggtcgacaccattctgtcgacccgtacttgttcgggcgcttcgacggtgacgatatggtcgaatcgcatgggcatggcgtccaggacttccgccaacagcggaacatcatgcacgaccacggcatccggattgtccgcgaccgcctgccgctcccgcgacagcgcaagatcatagatcaacggatgctcgatatcgtccagtttcctccgcatccgttccgagtcgggcccggcgaacacgtgctcggcgatccatcgccggttgagccgcccctgatcggtcagcgcgtcggggccgaaacattccgctatacgacgaagaccgacgccgcccggttccaccactcggcgcgcgagctcgtcatagtcgataagcgccgcgccgagctcccgcagtcttgtggacaccgtgcttttgcccgccgcaataccaccggtcaatcctattcgaatcatgctccccccatcatgccatgtttcgaggttcatgcacacaacggcaaaacccggcccgccgaagcgagaccgggttttgactatacgtcaggcgtcagtcgcccgatggcgaactcacttgccgagcagctggtcgcgcagggcggcgagctgatcggagtcggcgagggtaccggtagccggagcagcggaagagtagttggaggtctcctcgaccggcttctcttccttcgggccctggccgtcggcggctgcggattcggcagcgttctccagctccttggccacgaactccttgtgctcctcccacagctcgtgggcggcggcgtactgggactcccactcctcgcgctgcttctcgtaaccagcgatccactcgttggtgttcgggtcgaagccttcggggtacttgtagttgccctgctcgtcgtactcggccggcatgccgtagatggccggatcgaagtcctcggaagccgggtcgacggagtcgttggcctgcttgagggacagggagatacggcgacgatcgaggtcgacgtcgatcaccttgacgaacacggcctcgcccggcttgaccacggtctccgggttctcgacgtgacggttggcgagctcggagatgtgcaccaggccctcgatgccgtcctcgacggagatgaagacaccgaactggacgatcttggtgaccttgcccttgacgatctggccgggaacgtgggtgcgagcgaagcgctgccacggatcctcctgagtcgccttcagggacagggagatacgctcacggtcgagatcgacgtcgagcacctcgacggtgaccttgtcgccgaccttgacgacctcggacgggtggtcgatgtgcttccaggacagctcggaaacgtggatcaggccgtcaacaccgcccagatcgacgaaagcgccgaagttgacgatggaggacaccacaccctcacgaatctggcccttcttgagctgggacaggaaggtctcgcggacctcggactgggtctcctcgaggtactggcggcgggacaggaccacgttgttgcggttcttgtcgagctcaaggatcttggccttgatcttctggccgatgtacggggagaggtcgcggacgcgacgcatctcgacgagggaggcaggcaggaagccacgcagaccgatgtcgacgatgaggccgcccttgacggcttcgatgacggtgccctcaacgacgccgtcagcttccttgatcttctcgatgtcgccccaggcgcgctcgtactgggcacgcttcttggacagaatcagacggccctccttgtcttccttggtgacgacaagggcctcgatggtgtcgccgacctcgacgacttcgtcaggatcaacgtccttcttgatggaaagctcgcgggaggggatgacaccctcggtcttgtagccgatgtccaggaggacttcgtcgtgatcgatcttgacgacggtgccctcaaccagatcaccatcatcgaagttcttgatggtggaatcgactgccttgatgaagtcctcttcggtgccgatgtcgttgatggcgaccttggtgacttcagtgttgttctctgccatgtaaatatatggtttctaatagtggatggataatttctcgatattcagttatacgcacacccttacaggcatacagatattcacaatacaagcaactctgcccaaatttcctaggaaactctaggcgtgtcgttcggccatttccacgacgttggccaggagcatggctcgggtcatggggcccacgcctccggggttgggggtgtaggcggaggccttgtcgtagcaggccttgtccacgtcgcccttgatgcggtagcgaccggcttcttcgtcgtagacgcggctgacgcccacgtcgaccagcacggcgccgtccttgatcttgtcgggcgtcacgaatccggccgaacccattgcggcgacgatcacgtcggcgcggcgcatgtggtcggccacatcccgggtaccggtgtggcacagggtgacggtggcgttgacggcgttgcgcgtgagcatcaggccaatcgtgcggccaatggtgatgccgcggccaagcacgcacacttccttgccgttcagatcaatgtcataggcgtcgagcagctcgagcaccccgcgcggagtgcaaggcagcggtgtcgaaatgtcgccgcgcacatgcagcaccagttcgccgaggttgtacgggtgcatgccgtcggcatccttggccgggtcgatcatgtcgatgatcgcgttctcgttgatgcccttgggcaacggcaactggacgatgaacccggtgcaggccggatcttcgttgagttcgcgtacggcagcggcgatgtcgtcgaagctggcgtccgccggcagttccttcttgactgaggtaatgcccacttcctgacaatcggcgtgcttgccggccacgtacttcatcgacccggggtcctcgcccaccagcagcgtgcccagccctggttggatgccctgcgccttgagcttgttcactcgctcggcaaggttggtcttgatttcggccgcgattcgtttgccgtcgatttttgtggacatcaacgccctcccctgtggtttcggtgcattctatcgaaacgataggctatcgttggaacaagtcaggattatatatcgttcgctctcacgaagaaggcgtgccatggggactcaaatcacacgacttacgcgactcgccgcagccggcctgagcgccgtcctgttgttcgcgaccgccgcatgcgcagccacctcccccactgaaaccgagccggacaacaagaccagtgttcccgcaccgaccgggccgatcaatgtggtcgcctccctcaatcaatggggctcgctggccgccgagctgggcggcgatgatgtggaagtcacgtccatcgtgaactccaccaatgtggatgcccacgatttcgagccaaagacctcggacgtcgccaagctgtccaaggcccagatcatcgtggccaacggtgcgggctacgattcctgggccaccaaatcgatgaccaagaccacgaatatcgtatccgccgcttccgtcatgggtgccatggaaggcgataacccgcatctgtggttctccaaagacgctcgatccagcatggccacggccatcaccgatgcatatgtaaaggcgctccccagcaagaagaaggccttccagaagcggctcaaggcatggcaggcggatgagaaatcgctggaaacatgggcgtccgagttcaccagatcccactccgacctcacctatgcagccaccgaacccgtggtctattatctgatggccgatctcgggttcaagaatcagacgcccaaggggtatacgcaatcgaccgcttccggcggcgaaccggcccccgcggacctgcagtctttccagaaactcatcgaagacaagggcgtggatgtgctggtcaacaacacgcaggaagccagtgacgcgaccaatatgatcactggcgctgccggtcgtgccgatgtgccggtagtcgacgtctccgaacaaatgcccaaggataccgacacgctgaacgcctggatcaaccagctcatcaacaccatcatcgacgcggtggatccgagctatggctgcgaagacgccacggacggcaacgcgaattccgatgattccagcgccgacggcgccgccacggatgatgccaatgcgcacgattccaaggccagcaccggttccagcacggagcccaagtacatccgtcagtgcaaggcggccacatccagtgattcgtctcaggattcggcaaaggccgatgcctccaatggcgattccggcgatgcctccggcaacgaccagaccgactccggcaaatagttagaagcaaaggacaacggcatcggattcatgcaatgccgatagacgccttgcatgagaagggttgtgcgaccattgtcgagatggccgcacaacccttttctttggttgtcaccatccgtacacgatattgagaacgattgtcagcatcgtttgccacaatcgggcgttatgagtgaaacttccgattgcatcgtgttcagcgatgccgccatcaagcgtggtgaccatatcatctggcagcatggcacctttgccattcccaccggttcggtcacggccatcgtcggcaccaacggcaccggcaaaaccacgatgatgagggccgagctgggacttttgccgctttgccatggcagcctgaccgtactgggcaagcctgcgggcgagatgaacaaacgcatcggatatgtgccgcagagctatgtggcgaatgtcgattccaatctcaccgccgaacaatccgtgttgctgggcctgaccggcacccgattcggcatccaccccatcaccaaggcccagaaagccaaagcgctcgaggcgatggagttcaccggcatcgccgacaaggcgcagtaccgtctgtccgaactgtccggcggtttgcgccagcgtgtggccatcgcccaggcgttggtgtgcgatccacaactgctgatgcttgacgagccgttggccaacctcgatctggccagtcaacgcgccaccgtacacgtgctggccaagctgaaccgtgaactgaacatgaccatccaggtggttgcgcacgatctcaatatgctcttgccgattctgaccggtgccgtctacttgctcgacgggcacccgcactacgccgatatgcacaaagtgctcgactccgacctactcacccacctctacggcacacaggtgcaggtggtcaccactccgcagggtgacatgttcgtgaccccgacgccggatgagccccaggaccagccgcaggatatgcacacggcagccgaagtggcgcaattgcaccatcacgagcacggcaacgccaccaatggcagtgccgccaacagcgccgagaatcgataacatcaagctagccgatccacagcccgtcaacgggctgcagctcaggcatggagaaaatacagggacatgagcaccatcaacttttcgtatgatcccgaatggctggacacactgtccgctccattcatgaccaacgccttcatcgccggcctgtgcattgccctggccgccggtgtcatgggatacttcaccatcgcccgtcgttccaccttcgcggcccatgcgctggcccatatcggtctgccgggcgcgaccggcgcggtgttgctcggcctgcccgtatcactgggcatgggcgtgttcgcactgggcggcgcactggtgatcggtgctttgggcaagcgcgtttccgagcgtgaaatcgcaaccggcaccgtactggccttcgccaccggcttgggtctgttcttcgcgcgattgtcgagttccgcctcccagcagatgcagtcgatcctcttcggctcgatcctgaccatcaccaccggccagatcatcggcttcgccgtgttcgacgtattgctgctggcattgttggccatcatctaccgcccgctgctgttcagctcgttggatgagcaggtggcacaggccaagggtgtgccgatcgggctgatgaacgtggcgtttatggcgattatggccggtgtaatcaccattgccgtgccggcagtgggcaccttgctgattttcgcgctggtgatcacgcctgcggccaccgccaatattctggccggctccccattcaaggcgatggtgatcgccagcgtgctgtgcctggtgtcgatttgggccggactcgtgctgtcggcgatgttccccgcccccccgagcttcattatcgtgacgctttccaccctgttctgggctatcgccaaggccgtggagacagtgcggaagtaatctcattcatttttcttgccccccgctggcaaattcatagcgggggctttgttatatcttctccaccaaggcattggcgatggcggcgatgccttcgccgcggccagtgaatcccatatggtcggtggtggtggcggtaaccgataccgggcaaccaaccgccgcagacagggcggcttcggcttcagcacggcgtgtgccgattttcgggcggttgccgatgatcgccaccgaggccgatgccggcgtatacccgttggatgccagatgcgccacaacttcttgcagcatatcgatgccatgccttccggcaccatgcgcgtccgcaccgacaccgaacagtgaaccaatgtctcccaatcgggcggcggcaagcaacgcgtcaatcagggcgtgcgcggccacatcgccatcggaatcgccttcgataccctcgtatttggcggcatcggcctcgctgcatgaatcagacgccggccagtaaagcccggcaatccacagttcacggcctgagccggcaggcgcaaaacggtgagcgtcaaaaccctgccctatcaacactcctgcagaccccatgcagtccccttcgatggcgctacccagacgaacggcagcaaacgattatgaatcacgaagccccggcgtatcgcataaggacacgaccggggcctcaacaatcaaatcacttcttcttggacttcttctcggcttcgacacgagccaaagtatcggccgcggcctcttcgggctcggcggtgtgatgcttgtcgtcaccgggttgagcgggctcgtagcccaggttcacgtcgagcagacgctgggcttccgcctcgtcgatcttctcggacaaggcgatctcagaagtcagaatggcgcgggccttggtgagcatacgcttctcgcctgcggacaggccgtgctcgtcgacatcgcgctgggcgagatcgcgaaccacttcggcgatcttgttgacgtcaccggtggcgatcttttcgacgttcagcttgtaacggcgagaccagttcatctctttctcgatgatcggggtccgcaggatgccgaacaccttggccacttcggatgcggagacgatgtcacgcacgccgaccttcctggcattgtccacgggaacgttgatgaccaaaccatcggaagagagtacggacagctgcagatattcgcgcgtcactcccttgaccgtccgctcggtaatggcctccaccttcgctgcaccatgacgcggatagacgaccatatcgccgactttgtaagacatgtaccctccgagaactgacggcttacacacaaaaactcgaataattatgccatgcggtctggaccgcccctatgagagcgctcacaaccacggagacacaccgaaaagggcaagaattcgccattttcgacgcgccaatgtagcgttttcgactccaacgcacgtagactttgggtcatggctaaagaaacgaagatcaaggaagataccgtcaccgtgcctgtcgcccaaggcgacctcgatgcggtgagcaatgctgaattctacaacccccacggagttctcggcgggcatctcggcatcggcaagcatgccgacaccgccacaatccgtgtgctgcgtccgcttgccaagtccgtgaccatcctcacccaggatggcgaatacccgatgacccacgaatacaacggcgtgttcgtggctaccgtgccggcctccggcaccaagaagcagcccacgattcccgactaccgcgtcaggaccgagtgggaaagcggcgcagtgctcattgaggacgacccataccgttatatgcccacagtcggtgacatggacacctatctgttcggcgagggccgtcacgagaagctctgggaggcgcttggcgcgcacgtgctgcgctatgacgatccgatgggcggcgtggacggcacgcctggcgaacaggtggtaggcaccgcgttctccgtgtgggccccgaacgcccatgccgtgcgcgtggtcggtaacttcaacgcctgggatggccgtcgtcatgccatgcgcgagctcggctcctccggcgtgtgggagatcttcattcccggcatcggcgcgggcgagacctacaagttccagatcctgaacgccaattacacgtgggagatgaaggctgacccgatggagcgtcagcacgaggttccgccgcacaccgcctccatcgtcaccgaatccacctacgagtggaacgatgacgcctggatgcagcaccgccgcaccaccaacccgcatgatggcccggtctccatctatgaggttcacgccggcagctggaagcagggactgacctaccgcgacctggccaagcagctcgtggactatgtcaagcaggaaggcttcacccacgtggagttcatgccactggcacagcacccgttctccggctcctggggctatcaggtcaccggctactatgcggtggattcccgcctcggctcccccgacgacttccgttacctggtcgatcggttccatcaggccggcatcggcgtgatcatggactgggtgcccgcccacttcccgaaggatgccttcgcactcggccgtttcgacggcaccccgctgtacgaggacccggacccgctgcgcggcgaacaccccgaatggggcacctatgtgttcaacttcggacgccgcgaagtacgcaacttcctggtggccaacgccctgttctggctcgaggacctgcatgtcgatgcgctgcgcgtggatgccgtcagctccatgctctacctcgactacagccgcgaacccggccattggcgtccgaacatctacggcggacgcgaaaacctggaggccatcgacttcctcaaggaagccaccgccaccgcgtacaagaacaaccccggcgtcatgatgatcgccgaggagtccaccgcatggccgggcatcaccgcccccacctccgccggcggcatcggcttcggtatgaagtggaacatgggatggatgcacgacaccctcgagtatctgcacgaggagcccatcaatcgcaagtggcaccacaacgaaatcaccttctccatggtgtacgcctactccgaacactacgtattgcccatcagccacgacgaagtcgtgtacggcaagggctccctgtacggcaagatgccgggcgatggctggcagaagctagccggcgtgcgttcgatgttcgcctatcagtgggctcacccgggcaagaagctctccttcatgggcaacgagctggcccagtggggcgagtgggatcacgacgcctccatcgattgggattgcctgaactggcaggagcaccgtcaggtccagaccatggtcgccgacctcaacgccttctacaaggcgcatccggcactttggagccaggacttcgatccggccggcttccagtggctgaccagcgacgatgccgaccacaacacgctgagcttcctgcgcatcggcaccaagggcgagaccttggccgtggtggtcaacttctccggtgaagcctggcccgattaccaggtggcgctgcccaccggcggcaagtggaccgaagtgttcaccaccgatgacgccaagtacggcggctccgacatccacaacggcaccttcgaagcggtcgagggcgaatatcattcgcgtccgttctcggcgaagatcaccgttccggctctgggagttgtattcttgaagccggaagactgaactggtcaacaggctgaaaggtaaccggtttatttatgctcaataccacagcgcgtcagaatacgacaccgcgcatggtgctggtggtcgaggacgagcccacactcgccacggccattgcccagcgcatcaccgctgaaggatggaccgctcgcgtggccggggacggcgcttccgccgtccaggccgcgtcccagctacgccccgatctggtaatcatggacatcatgctgccggtcatggatggtcttgaggccaccaaacgcatcgtcgccgaacgtccggtgccggtgctgatcctcaccgcacgtgatgacgaggccgacaaggtcatcggtctgggagcgggcgccgatgattacatgaccaaaccgttctccatgcgcgagctcatcgcccgctgcaaggcgctgctacgccgcgtggagcgtgcgaaggtcatcgccaagaattcggagaacgagaagctgctcgacttcggttcgatggtcatagacccggcccagcgcatcgtcaccgtgaacggcgagcaggtgcatctgacccccaccgagttcgatctgctggccacgctggcccgccgcccgaagtcggtgctcacccgcgaaaagctgctcgaagaggtctgggactgggtcgacgcatccggcacccgcaccgtcgacagccacgtcaaggcgctgcgccataagctcggcgccgataccatccgcaccgtgcacggcgtaggctacgctttcgagccgccgaccgcgtgatggcatccaaaaaacaacagcaatcccggcttgatgcgatgaaacctcgcgtcaagccggttgatttgttctcctctctgaagctggaactcagcgtactgatcgttatcgccactgccatcgcgtttgccatgtgctggttcctcctgaaattcggctggtccggttggatcgccatgccgctgactttggtggtggccttgggcatcacctatttcttctcccgcggcatcaccgctcccttacgccagatgcgcgatgtggccgaagccatggcggatggcgattacacggtccgcgtggatatcgatcaggatcgtcatgacgaggtcggccagctggctcgctcgttcaacgagatggccggcgaactcgaacatgccgataaaatgcgccgcgacatgatagccaatgtgagccatgagctgcgtacgcccgtttccgctttgcaggcgatggtcgagaacatggccgacggcgtcaccgagcccactcccgccaatctggagagcatcctcacccaaacgcagcgtctctccgacctcatcgccttcctgttggatttgagccgtatggaggccggtgcggcgagtctgaatatcgaaaagttcaacttcgccgactttcttgacgagaccatcgagccgttggaaatcgccgatggcggccacgcccacgacatccgcgtcaccgtgccggccgacatctcgatggaaggcgatcaggaccgcctgcgccagctgttcaccaacatcatcgccaacgcgctgaagcattcggccgacggcaccaccgtgctggtcgatgcccatgaggatgacagccaaggcaccatcgtgaccaatgtggtgaatttcggctcccagattgcaccgtccgaccgttcggatatcttccggcgctttgtcaaaggcaagacgggtcccggcaccgagtcgggcggcaccggccttggcctgtccatcgcacgttgggcggcccaattgcacggcggcaccgtcaaagtggtcgatgacacgcgaggcgccgatttcgaaatcatcctgcctaaatatcacgtcgccgaacgctgatattgtccgccgtcctaccgtatactgtattcgaacagatgttcgaatacagggtgggaggcacagcatgacacagcaatccaagtcacgaaccatgccgcacgacaccacgctgtttgtcatgcagatggccggcgattccatgatcaatgccggtattcataacggcgatctgctgattgtcgatcgttcgttggcaccagtccccggagatgtggttgcggctgtcatggacgatgaaatcgccatcaagcggctggtttcacgggccggcatcaccatattgcacgccgagaatcctcgatatcccgattacatgccgagcaacggcgcttcgcctgctatctggggcatcgtcaccgatgtcattcacccgttgatatcgtcatcggaccgtcgcgccacggcatccgccaataccagcacgcccaccaccttggtgccggcctgctgaaacacctgaacgcattgccgcacggtggcacctgtggtgacgatgtcatcaatgagaagcaccgcgtcgccatggcctatgagatcacgcttcaccctgacatgaccggtgatacgacgggcacgctgtaccgaagaggtctgctgcacggagcgtgccttggtggaggagctcagggcattgcatggtcgcgcattgacaccgtacccacgcaatgcccctgccaccgatttggccaacggtgccgtatgggcacgccctcttcggcgcattgacgcccgcgatgacggcaccggaaccaccaatacgcgatgccccaagcatgatgatgatattggcgtcttgttcagcagcgacaccatgatgcggccgaaagggccgtcaagctcggtatcgtcgtggtccttccagtcgagaatggcacgacgcgccgctccctggtaaatcgatgcggaccatatacgggctccgccaccaccgtctgtatcccgctcccggcattgcgcgaacagggcccagcatgccgcacacaatacctcatccggcgcgtcacacccagcgcagccgcgtggaaacagcagattgcaggcctgtgcccacatcgcatgccaccacttgtatacgctcggcctgtccataacgcgtcaccatcaagctggagtatcgaatcgcgcaagcagtgcatccagcagttgtaccgtgtcttgcggattctccacacgaacaccgatcgcaccggcctcaaccgcaggatagtcattacccgtaggcgtcatgcgatcgcccacgaacaccatttcatcggcctgtatgccaagtgtctgcgtcagcttgcgcacggcataggccttatcgatgccgcattcgctgacatccacactggtgtagccgccggccctgacccgcatgtgcggcagatcggccttgaccgcttcgaccagcgcctgtttcttcgtgttatcgcgatcccatgcctgtttggccgctacgggtgcgaactgtcccagagcggagaaggtgatctggctgcccctgttctcgattcgaggcccccatacctgctgttcccacaatcccagttcccgggcatgtcgctcaagactttccgagacagcggccacggtggcttcggacagatcatgcgcatacaccaaggcccattgcgtgccatcccaccggtaataccgggagccggaggcaggcatgacatgcagattgccgcgcctggcattcggggtgagtacatccagcacctgtgaggtgaccaccgccatgccgccccctgagatcagggccaccaccgtatggtcgagcagcgcacagaaccgttcgatcatcgcgggcctcatcggctgttttgagctggccagcgtgttgtccaaatcgaaaccgaacaccttggcgttggagcagacattatcgaaatcaagttcggaccacgaacgtaccaccatttgtcgcgcctccctcgttgacgaatgttcacagccaatgaaccaatcctaacgcatgttgcctccgccatgtcctatggtgggaaccatgcttcagccaccttggaacgcacgaatctaccgcaaccgccacggtcgcggcacacgaaccccgatgttcggcacccgtctgccccgttaccgcactcgcaccggcatgttcgacgatatggtggcggcccaggttcgcaggctcggccaagcgtggccggaactgatacgtccgctccagttcgcggtggaggatgtgccgccttcggatccgacgccttggcagaccgagccgaatatgacgtcccagtgcttccccgccagccacggcattcccgcacgagtcgtgctctaccgtatgccgttgcagaccgaggcacctaccaagctcgaattgcagttggccgtcagggatgagctggtggctcgcatagcggaattgtatgggcgcaggcccgaggaaatcgaccccgattggggcctgtgacagtattgcgggggccgtgccacttcaagtaagacagtggcacggcccccgcagctatatcggcgccgaaacatcatcagaccgatgcttcggcgagcgcgctctacttgacgatggaggaatcgttccgagcccagacatggaccgtggcgggcatcagcgttgaagcgtcgatggcggacaatccggcgatgtccttgtcttgcaacgaatcgtgactgaaacgcgctccccagctcactttcttggatgagtcctccaacatcagcacgaccgcggtgccatgatcgccggaaagtttgccggtctcaatcgtttgcgccgcgttcgcatccagcgtgatttcctcggaggtcaccgaagcaccggcatcatcgtaggcgtgcaaggtgaccgtcctgcgcgcattggacgtattggccagcgtgatggaggcctttactccgtcgggaagggccaaccccgagaattcggatggctcgccggcattgaccaatgcgaaatcggcttggccggagtcaccggagcgtgtggccttgacggagaacgacacggcatcctctgcggtggacatcacgcccaacgccccatcaggagcctctcccaagtcgatcgccgtcaccttatcggcagtgacggtggcatctttggcgggaaccaatcctttgtcggtaatccatgacagcccggtgctggtgtctgccttggcgaacagataagcggtgaccgcatcgccggcagtgatggacggcgccaccgacgcattggaggcggtcggcagcggcagcgcgaaatcagaacccttcggtgtcagaccatccatggtcaccgtacgtaccacggacgcgataggagtctccttgctggaaacggtcacgaacagaccatgctgcccatcgaccgcggcggacagttccatcgaggactccccctcggccggcacagacagcgtggattgtgtggacaatgccattttcccggctgtctcggaaccccagacggcaatgtcgacggtggtcggcttggtggagggattcgagacgatgagctgctgtgtggtaccggtcgtgccgccggagagcaagaacgactggctgagcgaggtcgatacgcaggatgccgccgatacgcctctcacatcgccgtcatcggcccatgatgcgatggtgccgacggtgccggtgccagctgcggcctgcaacatacgggtattgatcaggcgagctccctgatcgatcttctgagcaccggttttcaccgaggaatcgtcggtcggatcggcgtctttcaaagtcacgtcatctgaactggacttttgcccgatcgccgagacagtggcgctgtagacggagccgaacgccgcgtagcgcgcctgtgtgctcagattgccgacagtggcctggaaggcgctgtcgccgtacgtgccggtatcggccaatcctataggtgccgggcagtaggtttcggactgggtcggactaactgtctggtcgatggcattatcggaagcggccaccttgtccacccagatattggggatgggggccatgacgagaacgacgaacagcgcaatcaacaccagcatggtgatcacaccgagcacgatgccgatcgcacgtttgaaaccagaagttgtgttgctcatgcctgctcctccaatccgtaggacggtcgtctgcgaggcatggcgaccaagcagtacaacgccgtgatcacacctaggcatatcagccaggcgtgcctccagacactatgctgtgcacgttgctgccatgaggtatccacctgctgtgaggtgctgctacgcagcgtcagacgatagtagctgccgctatccgtggagaccagggactgggtgccgttcgatgcggcgatattcgcgctcaactgttcatacggcatgtcgttcgaggaatcgccggtctcgggaaccacgtagatgccgccgaatccaagcgcgctgatggccgcgatggcctcttcgtcgggattggacagcagcgaggcacaggcctgggccagctgttcgtcaaccgcatcatgcttgccggacagcaggcgcgcccgctggaccggagagctgtcgatcagatcgccgcgcgaggtgcgcatcaccgcatagttgacgatgttgcgggtctccgcgctcacggcaagcacacgatgatcggcactggcctccagataatcggtggtgaccatgggcaggccgttttcggacacgcccagtcccgcatccttatgacgttcgatgccatacatgcattggatgccgatgcagcacaccagtatcagagcaagcaccacacggccagacacgatgagcgcatgcagacggtcccttttcggtgcgggatcgctgccggacgcatgcaacggttggaatcgcttcaccgccccaccggcgacgaggcacacgcaggcaaggaagcccaatatcatcatcgcgatgccaggctgtgcggaaccggccacgacgccatcggcatccacggctatggccacacggctggaaatcagggcgagcgcgcctccgcaaacgattaccacccacatcagccgcgaggtccgcaacgcgaacggcagcaccagcgaagcaagagcgagcagcgtgatgacgccgaacagcacagtgaccgccaaatcggcataatcggtcgatcccattcgccatcccagcgcacgctgtacggcctcaagcaggctcagcgacgccggcgacccgttggcggatgacgttggcactgtgatgtcgccgaacagttgacgccacatgcccaaatcggcgtaacgcaccgcattgacgagcgtaggggccaccgcaaaggcggcaggaaccggaataagcaacagcatggcgcgcttgcggcgcacgaacagcaggaacatcaggaacacgacgatcagcgcgaacagcagctgcggttcggcggccaccacagggatgaagcacagtgcggcgatggccgcggcctgaacggatgtgcgcggcttgagcgggtcttcggtatggtacatgcccacggcacggaacacgaatgcgaacgcggccggcaggaacaccattacggtgagcatcggcatattggcctgcgcataccagccgaacataatgccggtggatgcccacaacagtcctcccagcacacgaaccacgtccgagcgggtgaatacgcccgccagcgcccagaacgacaatgcgctcagcggcgcggccacaaacagtatcatcgccagagcggcggtcacatggccgagcgtgaccagcgaggccagcatcagcaccagcagccacggcgtgggcggcgcaggaatgccggtgccgctgccaaacacccatggcgtggtggcggactgcaccagttgagtgaagctggcaccggtggaaagcaacacatcggaatacaacgatccaccggagaatatcgaacggaacaccggccaatacatcaccacgatggccgcaaagcacaccagcgccatcaccacggctgcgctccagcgatatatggtgcgtgtccgcagatgggcacgttccagcggactgagcagcactctgccctgctgggattggaatgcatcccgacgatcatggaactgcttgatctgccgactgtcggcgaacaaaacctgcagggacgatgcggcgaccttcgactgtctggccaccagcctgcgcgatttcatgtttcccgcgatatcggccaaagccaaccatggcaggcacaattgcacccatgcttcatacggcttcttgccgaacatcatggctatggccatgccaaaactgcgaatcagcctccacagccagacgataatccaggacgacatggccaggtcagtgtacagatagcgctgttgggagcgatgcaccgtcatcgcatgattgaccgtgtgatcttccttaagcggctccccgcctcgcgtacgaatgccctcataccgtgcgcgacgatgtgatatctccgcttgcgggactaccaccacgcgtccgccgctcaggcagacacggcggcagaaatcgaccgattcgctgtaggtggtcagccaggcattgatgccccgcagtcgcgtgaattgcgacatggacaccagcgcgcccgccagcgacaccgcgaacacatcctgtcgcccgtcatactgctcctgatcgggttctccatcgaccaccagggaatgcacggcgtgtcggcctgcatacataccgacatcatgcaggtgggatccttcccaatcacactgtttgcacccgagcacgctggcccccggcgtattgcgccacgcctcaagcaatcgttcaaggcatgaggcatccgaggggcgggaatcatcatggagcaaccacaatgcgcggggagcgtcatccaaatcggcccgatccaacgcccggctgaccgcatcgccgaaggaacgcgcgcccttggccgaaacgatgtgaatggtcacatgcttggactgcggcacctccactaccggccccgatggcgagggaatgacctcgaacgaagtggttatcctcgaaccggcgcgcccggtcgcgtcggcgatgatgacgactcccggaagaacattctgcgtcaataccgaacgcaatgtagaccggaggaaacgcatatcctcctcaacggtgatcacagccgtaatgccggtatccacatcctgcctatgcgtatacggtcgagaagacatggcgtcggccaacgcctcatgaatatcgctattacctgtcggactcataaactcccagtgtacgcaccagacttgaagggggtgtgtgtgtggaactacgcctgctcccggtgctctcgcttatatcgacggcgttcgcgctcgctcataccgccccaaataccgaatcgctcatcatggtcgatggcccatttcaggcattgttcacgcacttcgcatttggcgcacacacgcttggcatcacgggtcgagcctcccttttccgggaagaacgcctccggatcggtttgcgcgcacaacgccttgtgctgccaagatacatcgccatcaggtcggaatagtccccacaattcatgccatggctcttcggctgaatcgtcgaccacaccccacatacgattctccttgcctattgagcttttcatacggactaaattacacacatgcaatttcgtttttgtcaaattctttctcgtgtcattacatcatttttatggaactgtgtgctatggcgcggacacgatgccctgatgccgttgcacatgatattgtgccgttcctgcgcaggaacaccatagcgcaggaacacccggcggatgctgtgtcaaagtgtcattcagacaatcgacagtttcaggaggggttatgacgcaggaatcaggtggggcggatccgcatatcaacccgccaagcttcattcctgcgggaaatcgacgcacccgaccttccgggcaggtgccacgctccttcgcccctgcccgcgcctcacgtcagtcaggtcaggctccatcggcccgtccgtccgtcacgggaaatgacatcgaagagcctcaaccgaacgccaacgccacggcaagcgccaacgtcacggcaagcgccaacgtcacggacaacggcaggcggactccgcccagtttttctccgaaaaccggacgtgccacccgcagcacggctccggatgccgccgcaccgcgcagcattccgccgtcgcgagcgcggatgtcttccggctcatcccgcaacgccgtgcgcaatccgtcggatatgtcggtttcccggccctcatcgccagcagcaaacgtgtccacgaagttcagccatcttggccggccggcggcggcaacggcgaaaacggtaacggcacaccggccgcgcgccttgcgcatcatcttatgcgcgattgcggtactggtggcggcgttgattctttctgttttcggtgcctggcaatgggtggacagcaaactgaaccggagcgactggctgaccgacacccccaacacgccggcctcgacctggctgattcttggctccgacgagcgagacggttccaccgattacggcggcgtggacaatatctcaggcttcagaaccgatacgattctggtgctgatcaagcctaaaagcgggccgagttcgctgatttccattccccgcgattcgcttatgaacgtcgatgaccagtacatgaaaatcaatgcggtggcgcagattgccggcaagaaagccttggtaagcaacgtcgagcagattaccggccagaaaatcgaccatgtggcgcagatcaagttcggcggtctgcagaacgtggtgaacgccttgggcggtatcgaactgtgctatgacgaggatgttcaggattcctattccggactgaactggaaggcgggatgccatacgacggatggttccactgcattgtccttctctcgtatgcgatacgccgacgcgcgaggagacttcggacgcaacgaacgccagcggcaggtcatctcggccatcgtcaaaaaggcttccagcagtgggaccctgaccaatccgtccaaagtcgtggcagtgtccaatgccgcgatgagcgcactcaccgtggatgaaaaaaccaacccttacacgttgctcaccatggcgttggcgttcaaaagcgccaccggctcgaatggcatctccggcagcgtgtactggtccgacccagattattacgttgatggcgttggctcctcggtgctgctcgatgacgccaggaacaccgaactgttcaatcagcttgccgacggcacgcataaggccggcgccgtgggcaatctggcggaaggctgaccgacgctttcccggagcccatcggcttcatcgtcggcgcatgatcgccgccgttgcccacgcagccaatcatgcacgggcaaaatgtcatgtggataactcggcaagctagaaccacataccttgattcggcttgcgctttcggcatgcgctcccccacgctggaagcatgacatcacagcagaacgattcgaagcgacattccgcccatacggcatccgccgtatcccgggcgaagcaccgtttgggcgcgccgccattgcgcgcccgcctgaccatgcttgccgcggcgtgcccgatgatcgcgcaggcactgatgatggtcatactgctgttgcacgggcaatggctgttcgccgccatgatcacgccaggcatattcgcctgtctcgtgtccctgctgctgacgctccccccacctccgggcccggagaagacccccgccccgcaacaggcaacgatcgatatcggtatcacggacgatgccgatgcccgcgccgcagacctccgtcatgcgccgtcgcagccgatagaatcgctgctgcacttcgcacgcctgccatggcgcaccattgtgggccattggcttgaaccccttgaccttgcggtgccgatcggcatgaccggaagcgagccgctgaggctcgatctgaaccgtcaggggccgcatgctctggtggccggcaccactggttccggcaaatccgtgttgctgcaaagctggtgtctggcgctcgcctcgatgaacgggcctgagcatctgaatttcgtgtttttggatttcaaaggcggttccgcgttccgcaaactcgaacggttgccgcataccgtgggcagcgtatgcgatctggatctggcgcatgccgtacgcgcgttgcgtgcgctggaagccgaactgacacgccgtgaacagctgtccgccgctgtccatgcttccgatatccgtgatatggtcaatccgccaccgcgcctgatcgtggtcattgacgaattccatgccctgaaggaccagctcccggattatgtgaatcgtctggtgcgtattgcctcgctcggcaggtcactgggcatgtatctgatcgcctgtacgcagaatccgatgggtcaggtcagtgccgatatgaaggcgaatatgtccgtcagcatttgtttacgggttcgggaccgtctgcaatcatgcgagctgcttggtgatggtcgtgccgccgacctcagtccggcaatgcccggtgcggcgttctgcaacgattccgaacaggtgacggcattccgctgtgcaacggcgcgcgatatcgatgcggtatgccgccagatcgcgttcgcatcgcggttcgtcgggagcccgccgcagccgtccctgtttaccgcgccacttccccggcacgtaaaagaccggactgtggccaatcacgcaccgcaacgcattcgatttggacttgccgacgatggcatcaacctgcgagaagcgacggtatccctcaccggtggcaatatcggtgtcatcggcccgcaggggcgcggcaaaaccacgttgctgaaaacattggctcgacacgccagcatggctgatggcttggcggtacgtgtcagttccccgcatcgccgggtatggggatcgcaatggcttcgcaacggccgctgcacgccgtatgccagctcggatgcaccaccgcctccgcatatcgtgtggttcgtcgacgacgccgatgagttgttcgacccattccgcaccgacgagcaggcgctgtctttcacacatgcgttggccgatgagtccgtcagcgtggtattcgccgtcagcacgattcgcccgatacgtataccagagcattgcaataccagaatcgtgttcccgtgcggggaacgaacgtctgaccttatggccggagtccccgctcgcctattggatacgatgagtcatatcgatgccgacaacgcgggccgggccgtgctcatcgagggcacatcggcatgtctggtgcagtgcgcttcgtgaaaacttcggttttttctcggcgaaacctcttgaaaatcaccacggttcgtggttaccttggtactggacttaaggaacaacaccagccacggggcttttaagggaggcaagcaatgagcagcgcttttgattggcgagccaaggccgcatgtcgtgacaaggatccggaactcttcttcccggtgggcaacaccggtgcagcctatcagcagattgaggaggccaaggccgtgtgccgcacctgcaaggtgattgatgcatgcctgaagtgcgctctggacaccaatcaggattacggcgtgtggggcggcttgagcgaagatgagcgtcgtgcgctgaagcgccgcgccatgcgcgcccgccgttctcaggccatgcagatgcaaatctgatgttttgattatcgcttcgtcatactaggaaaccctcccacttgggagggtttccttatttttgggcttcgcatcactcatcctgagcggccctgagcttcatatcaagcaccacgcgggtgccgcctccgcggcgcggctcccaatgcacggaaccaccgaaatcattggtcacaaaggtgttgatgatctgcgtgcccaaaccagaaccggaagaacgagccaatcctccctgttcttcggagccgagaccggaaccgtcatcctcgaccaccacattgaggttcgggccggagcggcccacggaaatcgtgatatggccatccttgcggccttcgaacccatgctccaccgaattggtgatgagctcggtcagcacgagggacagcggcgtggcatcctgagcgggcatcatgccgaacttgcccatgtagttgatatcgatgtgctggtctttcatcgtggctaggtccacggccatgcgcagcagattggcaatcaccttgtcgaagtcgacgacctcgtcggcggtctggctcaatccctcatgcaccatggcaatggtctgcacgcggcgttgcgcctcctgcaattccttcttgacctcatccgacttggtcttacgagcctgaagcctcagcaatgcggagacggcctgcaggttgttcttgacacgatggtgaatctcggaaatcgtagcgtccttggtctgcagctcctgctcacgacggcgcagctcggtgacgtcacggcatagcagaatcgctccgatacgaccgttgttgtcatataagggcagcgagcgtatcgagacggcggaacggttggcgttgagttcggagtcgaccgcggctttgcccgccagcaccaacggcagggtttccggaacggggtcgttctccttcaacagctgtgtgccgagttcgctgaggtaatggccaggcatggtggtcagcaggccgagacgcctaaagcagctgatggcgttcggggctgcgtatcgaaccacgccgtccatggtcaggatgatgaagccgtccgccacgcgagcgatatggcgctggctcatcaccgaatccttgtaggggaactggcctcgtggaatcatctcgtacagctgtttgcccgcgttaatgctttccgactcatatcgaccgttggattctcgtgtggccatattggtctcacgcacgaccaagcccaaggtcttgccattgtgccgaaccggcgcgtacacgttgcagacggtcgccttgcccacggttctcaataccgtggagcggaacaccacgctggagagcatggcggcgtccaattcgccgaccatgtcatccggcatgacgtttcccaccacgtcttccgcccgtagcgtcatcacggtggatgggcggcattgttcggccaccacgtatttgccgtcaccgttctgtaccagcaacagcaggtcggcaaagctcagatcggcgatcacctgccaatcggcaacgagatgatgcagccactcgcggtcctcgtcgtcgaagtcggggcgcgttgcaaggatgtgtgaaaaatcagccatgcccctatcatacgcagacacgtcgccgccattgcggcaagccacacgggcaagtatgacgactattacgacatcgcatcttcaataccgcaccaatcgcgttgcacggctgcccgccgttcaggcggtcatcgcctcatacacctgagaggacaatgcggcgatctgctgctgcgcggttcccgagaccactcccgaggtcataaccaccatcacataatcccgttctgttccgtccgcggccttgccccacaccacggcggcatcattttccacgccggccagttcaccggttttattggccacctgaatgccagacggtactccggcgggtattttggcgcgtcgcgtctgcccgagcaatacgtcaagcatggagcggctggcttcggcggaaaccagtttgcctcggtacaatgcagcgaggaatctgccgcaatcggaagccgacgtccagttctcggtgccggtcccgtctgtgccggcatcggacaacacccgcaactgcttggatgagctgaagccgtatcgggcggccgtaccagtcacccgttgcatgcctgtggccatgtcgccatcgccgaccatcaataccagctgattggtggcagcgttcgagctgacggtgatcatctggttgatcagcgaggtggtatcttgcccgcccgcggccaaggtgccggcatgttgcttatcgtacacggcaagcatcacgtacagtttgatatccgaagccgccaccatgggctggccgccgacgctcacggttttgcccgtggccagatcctcgacatacaccgaccaggtgcctccattgccggccacagctgccgtgaccgccgaggacacatctgacatccgcttctcttccgccaccgtggtcaggtcgggagcaggtgccgccttgcgctccaaggtgtcatgcacagggcgttgttcgtgtttcgatgacgccgttgacgacgatgccgacgctgttgccggtgagtccgatgccgaggcgacgggcgatgttttggcgtgcgatgcgccgagaccgttatgcgcgtacatccatccaccgacgccgattaccaaagcggcgatcagggcggcgatcaggatcaatcccacgacgctgcctgttgcacgcgtgtcgctactatgcttggtatgccgagccaccgtcactgccccaatgtcttgtcaacactggccagcacccggctcatcaggtccgcggccaccgactgcccctgatattgggtgacaacggccacggcggccttatgaccattggcttcgacgatggcgaagtaattccaggtgtcctggatgccttggcctcggtgggcatgcacgatcatgtcggacggaatggttacgccttcggaagcaatgtccgcgttcatcaatgacgcgcctcccttggcgtccactgcggcgagcatgcgggccgcatcgcgggaggaactgtaattctcataaccggcattgctggccgccacatcgccgaaatcgcggttgaacgaggtgcccttatacccatgcgaagatgcccacgaattgacgccgctccagccacctaccgccgcggccgccatattgccggcattgttgtccatggaacccatcatcgcgtttgcctgcgctttggcgttgtcatcgccattgtcctgggccgcaagatagaccggcagatagagaccggcagccacgaattgcttgccggactgcgacgtggtcgcgatggtggcgtcctctgaggaatcggcgtatgttccatcgatgaccatggcggagacggccacatcggaggacgagtatgaatccgcgatgtcagacaactggctggatgtgatcaccggagtggaaggcttcgacttctccgtcgagcttttcttggacgaatcgtcgctgttcttgtctttggcgctatcagacgtgttcttcttggccttggacttggcgtcagaggaatccgtcgtgccatcatcggcggaatccgacgcatcggacccggtcgactgtaccgatgtttgcgcctgcggctgagctccccacaatcccatgctatgggtgacgaacaagccgatgaccaacgccacgacgcaaatcagcgcgatgagcacaatcaccaccgctttggtgtgatcgccgccaggacgcccggcgggaggttcaggagaagcaggtgccgcagggccagcggtcatgggtcccggtgccataggccccggcaccgcggaacccggcgccgttggcggcgcgacggcgggcaacggcgccgccggctgcttcaccagcgtcagcgtggtgtcgtcataggcaggggccgccggattggcctcgggctgctccaatgggcttccgcactgcgaacagaaggcatttccttgctcgttggcaaacccacactccgtgcaatacaccatcaccgaacccctttttgctgtgacgttctcatcttcggattccatagtatcgccaccattgggtgatagtgttcgtgtgagtcggtattgacaagcataaaagttacgctaacgtaggttacggcagcgtaagaagcgtatcgtcaactcgtgaaacgggggcatcaccatggcatcaacaaccgacgacgcggaaaagacgatgcatcacgacgctcataacagcgcgacgattgcagaggatgccaccatcgcatacaagcgtcaggcggctatcgaggcgcgcgaacaggcgttgcaggccaaggctgatgccgtacgggccaaggcccagttcaaggccgaggccattcgagccaaagccgaggagaaggcccggcacaagctcgccaaagcggagcaccgtgcgctgaaaatcgagggcattgcccctgcggaagtggaacgcaagattcgtctcgacgtgcacggacgaccaaagccgttgatgcgcggctggattcacgcgattgccgctcccctgtcattggcggcaggcatcgtgcttatatgcctggcacatggcgcgagtctgaagtgggcgtgtgccgtgttcatgacagcgtcgctgattctgttcaccaattcggcctgctaccatctgggcgattggagcccgcgcgtcaccgatgtgctgcggcgtatcgatcatgtcaacatcttcctgctcattgccggcacgtataccccggtctcgtttgcgctggaaccgttctggcgcaatgtgatcatcatatcgatgtgggcgtgcacggccatcgccatcgtgattcatgtgatctggatcaatgcaccacgctggctgtatacggtggtgtacatcatcttcggcatctacggcctggcttatatggtgatgttctggaattcgccgtatgcggggccagccgtggtggcgctgctgtgcgccggcggtgcctgctacatcctcggcgccatcgtctacgccttgcgcaagcccgacccttggcctcgcgtcttcggcttccatgagattttccactgcggaacggtggccggatatgcctgccatatggtggccatctacatggtgatcgtctcgctgtggcaataaacgctacgacatataagtatgcccccgcctacgggggcatactagtcacttataactcaggccagcggcttggcggccttgaccgtcacggacagctcgcggccgttcggtgcggtgtaggaaacgacgtcgcccaccttggcaccttcgatggccttgccaatcggggaatccggggtcatgatgtcgtagtcggtgccggccacgatgtcacggctgccgagcacgtaggtcatctcgttgccgttgagctcgatggtcaccacagagccctcgcccacggtgccttccggggcattctcgatgatcttggaatcgcgcagcttgacggtgagctcggtgatgcggccctcgttcttgctctgcgcctcacgggcggcctggtagccgccgttctcggacaagtcgccctcggcacgcgccacggcgatcttgtgcgcgatttcctcacgcagctcgccttcacgatgggcgagctcttccttcatcttgttgtatgcttcctgcgtcagcaggtagaccttgtcctcagccatatcgtcctcctgaaccgttgtcgatgctgaaacaattttcgttatttatgacaaaacgccggctatgaccccggcgttcgtcatgtgctgacctatggtcagcgggtggaaatgatgtcgatgacgaacaccagcgtgtcctcgccgccgatgccggcctgcgggatgccgcgggaaccgtagccgtattccggcggaatggaaaccaccagacgcgagcccacgttatggcccggcacggtctggtcccagcccttgatgacctgtcccacgccgatgccgaagctggcgggctgatgacggtcgaagctggagtcgaatggggtgtccttaccccacaccacgccgtggtagttcacggtgacggtgtcgccgcgacgcacgatcgggccgtcgccctcggtcagctccacaaccttgaggcccttcggggcttcgggcgccgggaactcgataacgggcgtggtgccgaattcggcgttcacctgaggcatctgatctgccattagtcctccttcaaagacacaatgcgccctaccttagcaccatcggcgaatcggcggtagtccttcatccctgtgcgatacgacacgctggccgtatacgtcaattccggtcatcatgctggtgaataccagacatgtcaatcagcattcgacgacattgacggcaagcccgcccttggaggtctccttgtatttggccatcatgtcttcaccggtctgcttcatggtttcgatggcctgatcaagggtcacgatatgtgagccgtcgccgagcatggccatacgcacggcgttgatggcggtgttggcggccatggcgttgcgttcgatgcatggaatctgcaccagtccgcccaccggatcgcaagtcaggcccaagttgtgttcgatgccgatctcagcagcattctccacctgttccggcgtgccgcccatgactgcggcaagtccggccgccgccatcgaacaggccgagccgacttcgccctggcaaccgacttccgcaccggaaattgaggcgttgcgtttgaacaggtatccgatggcaccggcggtcagcagaaacgtgaccacgccctgttcattggcgttgtccacgaaatgccagtaatagtgaagcacggcgggaatgatgccggcggaaccgttggtcggagcggttacgatgcgcccgcctccggcgttctcctcagagacggccaaggcgaagagatccacccatgcggcgtcggaagactcgagcacggcgtctttgcgccggctgtcgcggcgcagcacatcggaattcgaagcgagacgccgatacatcttcggcgcgcggcggggtacgtcaaggccaccgggcaatgtgggctccgccgaggtgcatccgtggtccacgcaggcgcgcataacacgccagatggcatcaatatcggatcggacctggatgcctgagcgtgaagcggtttcgttggcccatacaagttcggcgatgctgagatgatgttcccggcacaacgacaccagttcggcgcatgatgagaacgggtagggtgcctcgacgccgaaatcagtggatgatgattcgtccgcgtcggcaaaggaggtgccttccggaggacgttcatgaatgccgatcatcgggtcttcgggagcgcctttgcgcacgaatccgccgccgatggaataccagacctgttcgtcgaccaagcttgcggcggcgtcgaaagcctggaatcgcatgccattggggtgcgcggccatgcgcttccattgttcgaacaccacgtcgcggtcgtagtcgaaatggatgcgtttgaggccggcgaggttcagagtatcgtccaacgcgcaggtctcgcggatgcgcatcatgtggtcggtatccacggtggccggcagattgccttcgagcccggccatcgcagcacgatcggtgccgtggccgagaccggtcagcgccagagaaccgtaaagcgtgattttgacacgtgcggtgcgatcgaccaaatggtcggccagcaacgaggaggcaaaggcatgtgccgcgaccatcgggcctacggtgtgcgaggatgaaggtccgacgccgatggtgaacatgtcaagcacactgaacatttggctccttctcccctgctggttcggcatgccggtgtcaccaggcgtcatgccatcacgatatcgtattccagcctagcgcccggaatctttcgctttgcgcgatgatggccgcgcgcgtcgtgccggcgagcgataagtcagtcagtgagatagtgcggagaacatcataaccagtacgatgataccgatgatggccaatacgatctgcaccaccatcagcccgatggtcagtcccttcttggtggcgattttgggcgcgtacgcctgtgccaacaggaaggcgatgaagccgaacaccgcgtagttgacggtcagggccatcacatcgctgttcgacaacaccacgccgttcagcggctggttcagcgtgttcatcatcgtgctcatcacgaacatgccccacacgccgtagccgattaatccgacgacgccgtacagccatggcttgagtttgtcgttggcacgcagggtcagggcttcggcacaccacaacagggcgaagccgacgatgtaggtgaacgccacggcgatcagtatcacgatagtcgcccacggcaggagtgcggccacattgccgatcatggacagatagaatcccgagcaggcgatggcaccaacggtgagtgcagtgcccgcaatgacggcttgggcaagcatggtgggcagggcgccttgttcgactcgttcgacatcggtccagcgtgaagccatgtggattcctcgtttcatcaggtacatcgtcacaacgccacatagcctaacggccttttgtttcggccttataagctctccacatagtaagctgcgagcccctctgacgaggggagctgtcggcgaagccgactgggggagagaccgcggcacagccgcaaaaaacggcatcggccacaggccgatttcaaggtgcctccggtgggactcgaaccc

SEQ ID NO: 3900 - DNA, 53025 bp, Unknown
  R22_24m  MAG No. k141_9230
ccgtggtggtgcaggtagtgttcatggatgcggcaaaggcgaatggggcgggtgattggtggccgttggcggccgtccccaatgttggggtgttcgtcattgtgtttgcgtcgatagcgttgtctccgttcatcgtttacgcgattggcagtttgtggcctcgtctgaccgtgcctttcgtgatgttcgcctccttggcgatgcttgcggctggttcgtttgtgggccaggaggttggtcgtaggtggttgtgggaccggtatgtggcgactggcttgttgaagccgggggatttcgtggattggtcgtctgatcgtctgcctgcgcctttggcgcaacccgcgtcgggtggttggtgggtgattggcttggtggccggtgtactgctggtgtcgggttccctgttcctgtaccgggaggatcggtatcgtgggtcgaatattcttcctcgctatatatcgtatggtggcggcgtggttggcttggtcgcggccatcggcatcgcgttgacccgtcatgtgagcggtttcgcgttggtggctgccccgctggttgcgttgttcgttgggttcctgtggttcccgttggatttggcggctgcctgtttttgtgtggataatcgtcgtgagtcgtgtggcgagtggccggccgcgttctggctcaccgccgaggcgttgttcgtcattggcgtgtgtacggcgctgcccatggcgtgacggctggttgtgtgctgggatggtagtgcaaaggagggtgagtggggatgtccattcggttggatgagcgacggtatgtcgaggagttgaagcggctggttgcggatttccggatgtggaagaatccgctggttccgttgccggatggcttcgaggacgatctggcgtggagcaatgttgccttccttatactcttcaaaaccaaaatcggtttccttggccgtagtaagatcctgaatcttttccaactgcctggccacaaccgaattggtcagagtcgcctgaggatgcagcatattgtcaactgacctatatccaaataccgcagcaattgcgcaaacgacgactaaaacaccaataagaatggcttgtgccttcactggcaatttcttccaccttttttcattgtaaatccttcttctctttgagggaatatgacattaactgtccgcccccgaactattttcaagaccaaacggcataatatggggcttatgagcgaacatgtggagcatgggtttgggccggtgtgggatggtgagtcccgggctttgattttgggatcgatgccgagtccgaaatcccgagcggcggcgttttactatatgcatccacagaaccggttttggccggtgatgcaggcgctgtttgccaactccgctgatcctactgacgctgtcggcgatttacctgagtcccgtcgtgcgtttgctctgcgccaccacattgcgttatgggatgtcattgcttcttgcgatatcaccggagccagcgatgccagcatccgcaatgccgtgcccaacgacttgacaccaatcttgcgcggcgctccaatcgcccacatcttcgcaaccggcgcgaaatcagcgcaactttaccgcaaacttatcgagccgcgcctgaccgaagccggcatcgccatcggtatgacccaactgccctccaccagcccggccaacgcctcaatgcgtttgccggaccttatcaccgcctatcgcgaagcttttcgagaatacaatatagttgttcgccaaactactaatatatgagtaatttcgcctgtatacgcccaaaatcactcatatattagtagttattgcacggcggtgacgcacagctgaaaccgccattcggcacagcggcagcaggtagaggaaggttgcggcggccaagctcaacgtgggggcgttgatggtggcgagcggcactgcaccggcgatcgaccaaggaatcaacggagcgatcaccacggcactgtcttccaaatcgatagcttgcgcggcgcgttcggattcgtcgtcgccgtatagcccgccgcacaactggtgagtgagcatgatggtgagggtttggttgcaggcgagcgccgccgcgcaagtcgcggtaatcatggtggcgccacatgcgccgatgcgatgaccgagcatctcgatgacctgctgcagccgagcaagcatccgcgtctcggcaaaaatgccagcgtaggcggaggagatgcagacagtggccatcacagtgagcatggagaggatgccgccgccgtccaggagtgcggccacctgcggattttgcgcatggtaaccgaaaataagcagccgcaacagttccgcccattccatgtgctgcacgcccacgcatatcgcgaccgaggcggcaatgctggcgagcataagcaggcgaacgtccacacgcagcaacgccaacacgatgaccagtaatgctggaactagggtaagccaatgcaaatcaaaggccgatgagaacaatccgccgatatcggttatgctgcttgtgttggttgaaacagccgctctagccgcaccgaatccggaaccaccgcttgcacacagccactccgccaccgcagccgcaacgtataccacacaactcagcacaaacggcaccgcaccagtgcgcagcatgcaggcaatagtactgaacaggttcgtatgcgtaagctgtttgaccagcaaggcactggtggaaaccggcgaacaacgatcgcccacatagacgcccgcaagaatcgcgccaccgagtatcaccgggttcgcctgcatcgacaatcccagcgacatgcagatggtacccatagtcgccgcactggcgaacgacgacccgaccagcaccgacatcgccgagcacagtagaaacgacagcggaatcaccgtggcggcgtgaattaccgcagtcgaatgggccacgatgaaggcgatggtcccgctggcccgccacagcgaggtcagtacgccgatgagcacgaaggtcaccaccacggtccccgcggaccgtacgctgccggccgcacggctcgccatcgcgcgcagcgagcaccggcgaaccagcccataccccatgaacagcagcacaccaacgaacagcgcgggaataatcgaccagccgagggcgacgctggcaaacagcaccgcacagaacagcaacatcgcgcccgcttccagcatgtgatcctctcctcttccggctacgacctcatctcagatttcatctcatgacccgcagttgcaaacatcaatgctattcgcacgagccatgactcaagataaccccagattctacgacgaacgtatggtactggttattgcgcaatcattatgactggatttagtcaccaccggaaccgcgaacagccaaactaatattgccaacgattccaccatccccaacacgattccagatgaacgcgccattgctccaggcgatctatcttcgttggcgcactgcccgtttttgctgggcaatccgcaggacatcgatggccgcatcggcgagattctgttccgtcgtgccggattcgagccgaaagtcgccgcccgttcggacaacatattgacgctgctggaactatgccattacggcatgggtgcctgcttatgcccggagcggttcctgccagcgctgcttgacggcgaacggctgcgcaccttgcatgtgctggattgcgggccggagaccgaatacgccatccgattcgacgtttcggccacaccataccgctggagcgtcattgatgatttcattcgttgcgcccgcgaagtcaccaccggcgaaggcgtgaacgaccgcggcctgtcccgcaagcatatcttcgagagcattgatcagacactgaagaacatgcagaccgactatctggacatgtacttctgccaccgattcgacgagaccaccgatctgaccgagacgctgcgcgttgtggccaacgagctcggcacgaacctgccggtgctttccatggcgtggatcctgcagcacccggagatcagctgtgtgatcgccggcgcctccaagcccagccagctggagaacaacatgaaggccgcgggctttgtgattccggctgacgcgatggccgaaatcgacaagatcactggcttccaccactttgagcgtcacgtgggctgacggatctgcggcttcctccaacgggagcgattgttaagcgccgaaatcggtatcgccttgggcctcggcctgggcgatggcggtttcggcgttttttgctgtttgctcaatgacctggttgtatccggtcaaggccgcgaacggcatgaactgggcggcccgctggcgacgagacatatgcggatgcttgcgtgattggtggtgtggcaggttgatgatgtcgtcgtatgcatgggtttcttgcagggtcatgcgcgatggcctccgatctgacggttgcgagcctgaccggtggcaccgtcttccatatccatggctttgatgacggcgttgcggccgaatttacgtttcacatccagcaacgcacgctggatatcacgctctcgagccaacgtctgtgcggcggcatcgtccccacaagccggcatacgcccgcttccgtcgccaccggattccgtgctatcacagtcatatcgcatatcgccatcatcaccgaacaaatcaagctgctcatagcgtttgcccgccgccagttctttgggcgtggccacatcatcggcaacaactgtgagtcgacgcaccagcaaccgcgcatccacaatacgctcgtacagcatggtcatcgcctcgcgaatacgtgcggcagacgacgtaaaatcgcccaatccaatcgaccccacggccgacttaggcacccgacgaccgaaacggtcaacggtcaccggcccttgataggtctttgccgcgcgttcggcggcacgcctcatcgcccggtctgcgcatgaatcaagcttcgaagcatcgagactgccaatgtcatagccgaccgccagtgtcagccgattcgtcatcacccccttatcgaccagatcgagggcgagcgcatcggccatctccttggcgatcagccgagccgtatgccaatcggcgggcccggtgagcacctgcccgctgctgatgctgtgcgcacctggctcataggattggatgtccgcgatctcgcacggctcccagccccacgcatggtcgatgagcagttcggcattgacaccgaacatgtgatacagcaggtcttcgttgtagtaatccgaagcacgacccaccgagcatcgggcgatatcgcccatggtcatcagaccggcgtgctcgagtttcctggcatagccgcgcccaacccgccaaaaatcggtgagcggacgatggctccagagcagccgacgatatgacatttcattcagttcggccacgcgcacgccgtccttgtcggcgggcatgtgcttggcgacgatatccatggcgactttggccagatacatgttggagccgatgccggcagtggcggtgatgccggtttcatcgagaatttcgcgcacgatggttcgcgccatggcatgcggccccatacccagcgagcgcagatatggcgtgacgtcgatgaacacctcgtcaatcgagtagacatggatgtgctcgggtgcggcgtatttgaggtagatgccatatacctgcccgctgacctccaaatagtgcgccatgcgcggcttggcgatgaccatcgaggctttgagtctcggcgagcgttccaggtcgcacgcatcgcaggactccccgattaatcggccgccgggagcatggaccgcgcgctcgatgttgactccattcaggcgctgttttacctcgaatagccgcgcacgaccgggaatgccatagttcttcagcgagggtgagaccgccaaacatattgtcttatcggtgcgggtttcatcggccaccaccagatgcgtggtcaatgggtcgagtccgcgcgccgcgcactccaccgaggcatagaaggacttgagatcaatggcaatataggtatgctcgcgttgcgtcgataccgttccgctgcccatcgccatcacctccttaccaccgccggcccgaccagcatatcaatacggtcgaacatttgttcgatacaacatgtctgttcgaagctgccgaagtcgacgcacgcaacgcgcccaagcacgctcttcacccacaccacacgcacagcggcagagcagcggcagagcagcggcatgcatgcgtaccatgggaatatgaagaaaagcattacggcagacagcgattttgcggcgtgggcggcagcccgatcccagaaaacgaatcgatcactggcaggagcccgcctcgcgattccggagccgcagaagcgtgccgaaatcaagtctcaggcccagcaatggggcatgaccgtcgaagatgccacgatgaccgacgggcacagcgaggaattcctctgtgacggcacacaaagcattgattccattgccgacatgcgcacggcaagtgggctggaggcaatggagtacgcggaacagcacatgccggtattacgcgacaccatggatgacctcaccgcccgcgtcgatttctcaggcattcgtattgccgtctgcctgatactggagccaaaaaccgcgattctgctgcgcaagcttaaggccaccggcgcaatcgtcggcgtatattgcggcccggattccacggatccccgagtggcggaacagctgcgccgagaaggaatcacggtcgaatccagccgagcctggaccgcggaacaggcgcacgaggcagccctgcgcctgctggacaagatacagccgaacatcatcatcgacgatggtgccagcttcgcccgcctcgcctcgctcgaacgccccgagctcacggcgaatctcattggagtggccgaggaaacgaccagtggcgtacgcgcgttccagcagatgcaggaagcgggagcgctcacctacccggtcgtagccgttaacgacagtgtgctgaaaaccggattcgacaacgcccacggcactggggagacatgcgtgaccaccatgcagcgcattctcggcgagcatgcattcgacggcaagaacgtcaccgtcatcggctacggcccggtcggccaaggcttcgcacggcgtattcgcgcgcttggagccgaagtcaccatctgcgatatcgatccagtggcttcactcaaagcggtgttcgacggcttcgccgcacaagacattgacgaggcactcccttgcgcggatatggtggtgtccgccactggcgtgagacatacagtcacacttgagcacatgcgcgcaatgcacgagggcgcggcgctcgcagtgatcggcggcatcgccaacgaaatcgccttggacgaggtaagcgacttcaccccacaggtcaacagggacaccgtgcaactcaatgttcccgacggaccaacgctcacgctaatcgccgacggcgatggcgtgaactacacggtgggaggcggcaatccaatcgagatcatggatctgagcttcgccgtacaggccagcgccgtcgcatatcttctggaacatcgaggcacactggatcacacgcttatcagacttgacgcagcgaccgaccagcgcatcgccgccagcgcgctcgaggcgcgcggataccgagccagccatgccgtggaggacaacggctacgattggcgactgaccagattcgcggaaaacgaccgagagaacgccgaccgatagccatagacacggcaccgaacacaacgcagcgaggagaatatgaccgacaacacctggccgaccgtcgataccgagcttatcgatgatgtgacactgtattccgccaaactcatcatccccgtgacgggccccgtcatcatcgatggcgcagttgccatacatggcgaccgcgtggttcatgtaggtaaacgccgctgggtgctggaggcgctgaagcaggaaatgacgtctcacggcaccatccgtgaacggcattgggatggggtgctcacccccggattggtcaacgcgcacactcatctgcagtacagcggcatggtgcaggtcgggcaaggcacctacgatcggttccgcgcctgggaactggcattcaacgaggtgtacgccgaggcgcagaagacccagccatggaagcagtgggccgaggacggtgctcgccagatggtcgaatcgggaacgacggccgccgcagacatcgtcaccgatttggacgccgccggcgcgctggcttcgcagggcatgcacggcatcgcttattgggaggtaatgggctggcacaacgacgaatggatggaaaagggtcgcaccgagctcatccggcagttgcgccggatgaacgaggagcagctgccgaacctcggcatcagcccgcatgctccgtatacgctggagtccgaaccgttcgttgatcttccagacattgctcgtcagctgaacatgcgactgcatatccatctggcggagaccccgctcgaggccggcacttatccgccggtgctcaccacttattcggcgtccgactggcgtgaccacgattgggaaagctaccggcagctcaaggacgtgggcaaaggtgcctccgccatccagttcgtcgatcagcttggctcgcttggcccggatgtgcacattgcacacggcgtgtgggccaatggcgaggatcggcgtattctacgtcagcgcggcgtgggcgtggccttgtgcccccgatcgaatcgcattaccaacaccggcaaagatgcaccggtgcgcgaatacctcgaggaaggcaatctggtaagcgtgggcaccgattcgctctccagcacgccgaccctcgatctgctcgatgacgtgtcgatgctttacgacctggcccgcgaacaaggctatgccagcgacgatctgacacatcgcctgattcgtatgatgacgctgggcggtgccgcctccatgggcatgcacgtgggccgaaaccgcattggacagatcaacgcgggcgcattggctgatttcgcgttcttcgacatccccgtcgacacatcatctccggccggcatcgaagaaacgctggaaacactggtgaagcacggcgcaggcacgaaccgagccacggtgatatccgggcgcgaagcctacaacaacgcctggtgacaccgctgacctgacctgacctgatatcaagaagccaaaaaccagcaaacccgtcaagaacaggagatctcattatgagcgtcgctttgcgagacatgagtccatacgcccggtccatagtggaacgccttggactggaagcccaccccgaaggcggctggtacacgcgtgactggcaatccccgcacacggatgaggcctcaagccgaccgctatcgtcactgatttacttcctgctgcccgagggagatgccagcgcctggcataaggtcgatgcggatgaggtctggctgtggcatggcccggcatcggtcaagctggaactcggcggcagcggcgagactccggaatccgacgaatccaagcgaaccgtaatcaccctgggttccggcatcaccaccgatcaggccgacgtaaccgtatcgggacatgcggtcgtaccggctggcgtctggcagcgcacagtgccaggccagggcgatgcgctggtctcctgtgtggtcagtccgggattcgtattcgacggcttcacactcgaacagtgaacgccatttcgctctgcgccaatatgagatatccgttcgcttacgcgccagattgcgcggctctagccggccataagcaatggagataaccagcatccgagaatatcgctgttttgtagtaacccaatagccatacaattggcgcgcatgcatcaagcacggctttgaaccgtgtgcatgacgaacacttgaggagaggaagcccatgttcaataagcaacacatcgtccgtaccattgcggccaccgccagcatcctagctctgtcgttcaccgcagcctgcggttccggccagtccaccgcatccaattccgccgattcgaacgatatcacccagcagacgtacaagccgggcaagctgaccatcgccaccggacagccggcctacgagccgtgggttatgaacgacaagccggaaagcggtgagggctacgaggcggccgtcgcctacgcagtggccgacaagctcggtttcaagaagagcgacgtggtgtggacccgcaccgcattcgacaccgccatcgctcccggcgccaaggactgggatctcaacatccagcagttcggcatcaccgacgagcgcaagaaggccgttgacttctcgtccagctactacaacgacagccagtccgtcgtggtcaagaaagacagcaagttcgccaacgccaccaaggtatccgatctgaagaatgcgaccgtgggcgtcatggtcggcacccttgcctacgactacgccaaggcgaacatcaaggacgacatccagacgttcaatgatgatgccgcactggctcaggcacttgacgccggtcagatcgacgcactggtcaccagcaccgtggaatgcgtgtacatggtgcagtccgagcaggtcaaggacgccaaggtgctcggccgtctgcctgactccgaagacaagagtggcatgggcatcgtgctgccgaaggattccaagctgactgcagccgtgaccaaggcagtggatgacctgaacgccgacggcaccatcaagaagcttcaggacaagtggctggccgagtacaccaccgacctgaccgaactgaaaaagtaagtggagtaggctcacatcataaggtcacaacaccttggccgggcgctgcggaaattttcctgcgacacccggccattccggcattcaggaagcgagcgacattcatcacatgaccgcagcaccaaccgaaaccaggcagcacaatgcccctgacggacacgaggtaagtcaggtcgagctcaaacgacgccaatatcgtgttcatcagcaaattcaatcgacgattaccagtctgatcagcaccattgtgttcgttgtggtcatcgtcatcggcctgaagctctcccccggctggccacgagtcaaggagaccttcttctccggcgaatacttcgtcaaatcgtttccccatgtgcttgacggcctatggctcaacatccgcgttctgctcgtcgcagtggtcggcgtggcgattctaagcacgctgatcgcattggtgcgcaccagccgctcccctattctgttcccgctgcgtatcctggcattgatctacacgactgtgatgcgcggcgtgcctattatcgtcgtgctgtatctaatcggtttcggcattcccggcctaggcttgttcggccgtatcgatccctcggtactcggcaccattgcagtggtaatgggatacagcgcctacgtctccgaggtgctgcgtgccggttttaacgacgtacatccttctcagcgagcctcggcccgctcgttgggcctgacctccggccagacgacccgactgatcgtcattcctcaggcattgcgcaaagtcgcgcccgcactgatgaatgacttcatctccatgcaaaaggacgtcggcctgatttccgtgctgggtgcggtggatgccgtgcgcgccgcacagatcgacgtggccagcacctacaacttcacgccgtatgtggtcgccagcctgctgttcatcctgatgagcgtgccgttcatcctgctgaacgactggtacacggaacgtctgcgtaaacgcgaactcagcggaggaacggtatgagcgaaataaccaatatcaacaccgaggcgagtgactcccccgtgagcaacaagacggtgctgcgtcttgatgacgtgcgcaaatcctttggaaacacgcaggtgctgcgtggcatttcctttgacattcaccaacatgaggtggtggctttgctggggccttccggttcgggcaaatccacattgatgaaatgcgtcaacctgcttgagcaggtcgatgacggccggatttggctgggcaataccgatatcaccgacccgcgtgccgatcaggacaagattcgcgcacgtatcggcgtggtgttccagcagttcaacctcttcccccacatgtcggtgctcaggaacgtgacccttgccgcaatcaaggttcaccactggagcaaggatcgcgccgaaacccgcgctatggaactgcttgaacgcatcggcatgcgcgataaagccagcgcctaccctgatcagctctctggcggccagcagcagcgcgtggcgattgcgcgcgcactgatgaccgacccggaactgctgctgcttgacgagatcacatctgctcttgatccgatgctggtcggcgaagtgctcaacatggttgccgagttaaaggcccaaggcaccacaatcctcatggccacgcacgaaatgagcttcgcccacgacgcggccgaccgcatcgtactgctccgtcacggcgtcatcgccgagaacggcacacccgccgaggtgatggacgagtcgcaggatcccgagaccatcgagttcttcagccatttcaggcactgagacgaagccgaagaacaagcaccggattcatacgacgaaaggccaaaatcctaagccactattcatagtcaactgatctggtgcttaaaccgcgtccgcgaaccccaacaagttccaccaccccacaacacgcgatgtagccgccgattggtagggttggcagatagttaatcccctgtttgaaaaaggagctttggcttgtcggctgaactcgaagacattcatgaggaatgtggcatcttcggcgtatggggccaccccgacgcctcacgactcacctattttggcctgcacgcgctgcagcatcgcggtcaggaaggtgccggcatcgtctccaacgataacggtcatctcatcggtcatcgcggactcggcctgctcacccaggtgttcggcgatgagcgcgaaatcgaacgactgaagggcaattgcgccatcggccacgtgcgttacgcaacggccggctcgggcaccacggacaacatccagccgttcatcttccgcttccatgacggcgacgtggctctgtgccataacggcaacctgacgaactgcccgtcactgcgccgcaagcttgaagacgaaggcgccatcttccattcgaactccgacaccgaagtgctgatgcacttgattcgccgttcgatgcagcgcacctttatggacaagctcaaggaagcgctcaacacggtgcatggcggtttcgcctacctgctgatgaccgaagacgccatgatcggcgcactcgacccgaacggcttccgcccgctctccctcggcaagatgaagaacggcgcctacgtgctcgcctccgaaacctgcgcactggatgtcgtcggcgccgagctggtgcgcaacattcgtccgggcgaaatcgtggtggtcaacgatcacggctacaagatcgtgcagtacaccaacaacacgcagctggccatctgctcgatggaatacatctacttcgcacgcccggattccgatatctatggcgtcaacgtgcactccgcccgcaagcgcatgggcgcacgtctcgccgccgaatccccggtggaggccgatatggttatcggcgtgccgaactcctcattgtccgccgcatccggctatgcggaagcagcaggtctgcccaacgaaatgggcctaatcaaaaaccagtatgtggcccgcaccttcattcagcccacgcaggaactgcgcgagcagggtgtgcgtatgaagctctctgctgtgcgcagcgtggttaaaggcaagcgcgttatcgttatcgatgattccatcgtgcgcggcaccacgtccaagcgcatcgtgcagctgctcaaggaagccggcgccgctgaagtgcatatgcgcatcagctccccgccgctcaagtacccgtgcttctatggcattgatatctccaccaccaaggaactcatcgcagccaagatgagcgtggaggaaatccgcgaatacatcggcgcggattccttggcctacctttcgctcgacggtctggtcgaatccatcggactgaacgccgacgccccatacggtggcctgtgcgtcgcctacttcaacggcgactaccccactgcgctcgacgactacgaggccgacttcctgaagtccctcacgcccgaggaccgtgtgcgtctgcctgaattcgcgctgtacaagagcaagtacatcggcaacgagtacaacaccgtgcagccggacgtgcagtaggctcggccggtccttcgactacacctcagtcattggtctttacgactacccctcagtcagcttcgctgacagctcccctgacaaggggagcttagtacaaacgaaaatccgctttttgcaggtggctccccggcaagggagcttgaaaatagaacagaaaggccccaccaaatgccaaaagcatatgagaacgccggcgtgagcgtcgaagccgggtacgaagtcgtcaagcgcatcaagtcgcacgtggcccgcacgaaccgtcccggcgtggtcggcggcatcggtggcttcggcggcctgttcgacctagcctccctgggctacaaggagccggtcctcatctccggcaccgacggcgtaggcaccaagctcatggtcgccaagctggccaacaagcacgacaccatcggcatcgactgcgtggccatgtgcgtcaacgacatcgccgcccagggtgccgagccgctgttcttccttgactacatcgcttgcggcaagaacgacccggccctgcttgagcaggtcgtggccggtgtggccgacggctgcgtgcaggccggttccgcactggtcggcggtgagaccgctgaaatgccgggcatgtacgacgaggacgagtacgatctggccggtttctcggtcggcgttgccgaaaagtccgccattgtggacggttccaccatcactgagggcgacgtgcttatcggtctgccttccaccggcgtgcactccaacggcttctccctggtgcgcaaggccctgttcgagcaggctggctataccgtggacactgagctcgccgagctgggcggcgcaaagctcggcgacgtgctgctcacccccaccaagatctacgtcaaggccctctccccgctgttcaaggcgggcgtggtcaagggcgtggcccacatcaccggtggtggcttcatcgagaacatcccgcgcatgattccggacggtctggccgccgagatcgagcttggcacctggcctgtgctcccgatcttcgacgtgcttgagaaggccggcaacatcgatcacaaggagatgtacaacatcttcaacatgggtatcggcatggtgctggccatcgaccccgcccgcaaggacgaggcgctgaagctgctcgccgacaacaacgaacccgcctatgtgctcggccagatcaccaccgacaccaccgacacgcaaatcatactgaagtagctccagataccggctcccctcaaagaggggagccaaagactttaggaaggaaaaacatgggtcagaaagtattggtcatcggctccggtgcgcgtgagcataccattgcctacacgctgctcaaggcaccgagcattgacgaagtcaccgtggctcccggcaacccgggcatgctcaaggacggcatccacaccacgcagctgagccagtcgaaccacgccgcacttatcgaattcgtgaagaacaatggctatgactgggtgttcgtgggcccggaagtcccgctgatcgaaggcatcgtggacgatttcgccgccgccggcatcaaggcgttcggcccgtccaaggccgccgcccagatcgagggttccaaggacttcgccaagcagctcatggaccgtcacaacattccgaccgccaaatataagacgttcggagacttggacatggctcaggcttacgtacacgagcatggcgcgccgatcgtcatcaaggccgatggtctggccgccggcaagggcgtgaccgtggccatggacgagcacaccgcccagcgtgcgcttgaagacatcttcatcgatcatcgcttcggctccgccggtgccaaggtcgttatcgaggacttccttgacggccaggaattctccctgatgagcttcgtcaacggcaccgatttctggccgatgccgatctcccaggatcacaagcgcgcccacgatggcgacgaaggcccgaacaccggtggcatgggtgcctacagcccggtgccgcagattccgcagtccgtggtcgacgaggccatcgagaaaatcgtgcgccccaccgtcgaaggcatggccgaggaaggcacgccgttcaccggcatcctgtacgccggcctgatcgccaccgccgacggaccgaaggtcatcgaattcaacgctcgtttcggcgacccggaaaccgaagtcgtgctcccgaagctcacctccgacctcggtgccggcatctccgccattctcgacggcgaaatccccgaattcatctgggatgagtccaacgccaccctcggcgtggtcatcgcctccaacggctacccggagaacgtcatcaagggtgcccgtgtgcccgagatcgaggtcgacgaggattcgcatgtctactatgccggcgtcgcctccgacgacaagggtggtctgattgccaactccggccgtgtcctgctcgtcgaaacctccgccccggacatcaagtccgctcaggacaaggtctacgcgatcatcgacaagctcgagctgcgcggactgttctaccgccacgacatcggcttcaaagccctgaagtaacagaagcggcgcatctgccgcatatttttggcccggtggccatgtcaatcgattgacgtggctaccgggccagatttttctgtcccggtagctgatttcggctctttttcgcaaaccaggacagttgaacacctcgaatataggaatatttggaattcccttccatgcaaaaccgcactattccgccattttcgtaatacgcggacgatactttcggcgtcagttttgtcccggtaagcagaaaatgactcgaaatcaaataccaggacagaaaaatctggcccggtacacgaatcaatcgattgacgtggctgccgggacagcgaacgtcactatgacaacgccatcacccaatatcagcgagcgatatcacgctagctgaatttggcgatgatgttgaacagtttggccttggcttcattgaagggcgggtacacgaggcgcagagtgtcggggaactgcggcttggtaaccacggttttgacgtggctgaaggtgaggaagcctgctttaccgtggtaggcgtcgatgccggacgcgcccacgccaccgaacggcagtcggctggacagcaggtgacccaacggcaacgaatatcccaaagctccggagctggtctgacgttcgaaagtcagccgaacctcgtgatcgcgcgagaacacatatgcagccaacggccgggatcgcttgttgatgaatcggattgcggactcggcatcctcaaccaccaggatcggcagaatcgggccgaagatctcctccttcattaccggcgcatccggtgacgtgccgtatagcacggtaggcgcgatatatcgggcggcgcgatcgaccttgcctccgcaaacgattcgcccggccggatcgaatacgccgggcaccttgtgaatctcgctcggctcaacagcggccgaggcagtcgcatcactatcagcggctgccgtattcgaaccggccgccggcttcgccgcattgttcgcgctaccggtgccaccaccggctgtctcccccgcgcttccgcgtccggcagccgcgacattgaagcgccgcccgaccatatccatggccgcgcctaccgccgatgccacctgtaccagcggcgagctcggctcctcagacggcacggtgccgaccggcaatagcttgcacagtcgttcaaaatgacgatcgttgataatacgaccaaaatcaggcgaggccttcggatcttcgccatagaattcggtgatggctacggcgatgcgctcggccagagcctcggccacatccggcgtggcgagcacatagtcgggtgccacgcaggtctgtccggcattggtgaacttgccccatgcgatacgtcgtgcggccacattgatatccaccgtacgatccacgaagcacggtgatttgccgccgagttccaacgtgaccggtgtcaggtgctcggccgccgcacgcatgacgattttgccgacgtgcccgccgccggtgtagaagatatggttgaacggacatttcagcagttcgccggtttccttgggcccgcctccgaccacgcacacggactcggggtcaagatattgcggcacgagttcggcgatgaggcgcgaggtgttgggcgaaagctcggagggcttcaggcagatggcgttgcctgcggcgagcgcgtcggccattggctccagagccaacagcaccgggtaattccatggcgagatgatgagtaccacgcccttgggctcggcgatcgtccagccggcggcgggttgcagcatccaatgcatcgccttgggatggcgcgcggcccacagtccgagccggttgcggacgaactgcgcctcgccagccaccagattcagctccatcagtatggtttccgccgcgggtttgcccaaatcggccatggccgcagccacgaaagcatcacgattgtccgctaccagacggcatagcgcatccaattgcgcccgtcgccaagccaatggccgcgtacacccggattcgtaggcgtgacgcaactgagcgaaatccgcattgaccatggcacatccttcccgcaggatgcccgggtcggtttccgggcatcgactgtacctatcgtaccgtcatgacgatggcatgagggcgtttgtgctgcaggcaataccagacgtttcggctggtattcgccaaatagcttgggctcggccgaagtaggtggtgcaggtattgtcggcgagttcatcgacggtgatgggattggcgctggccacgccgagcagttcggcattggcaggcaggtcgtgttgtgcggccacagagtccacttgtacctccacatccacagcttcggcagaaggtccgacggcgatatgcccgcctgcatcaaccacaatgcggcggtcatcggtgacatgcacgatggcgtcgcggccctcatagcccgcccatgaccagctggccacgccgtcatgtcctcgttcgatgaatcgcgaggtgcggcccgcgagggtcgcgcgactcgtgaatcatcgcatcgtgcgggagcgtgactggctgccgcgttgccgtatcgcggtccttgccaattgaacggaaccgccagccatgattcacatcgatgcgcttcatggctttattgtaaggcgggagtgattggtctgtgggatctctccctcagtctcacttcgttcgacagctccctcatcagagggagctcacagcactatggcaacggtacagcaatcttggacgggcttcgcccgcgttttgctggctcgcctgtcggctcgcacgttgcctacagaccgaaaatcctccggattttccgtcgcggcacagccgctcccctcacctacggatagcccactgagctatccgctttacggttcggccgggctgtctgctttacggcaacgtcataaaatctgtgtctttgaggtagtttttgccggcggtgatgtcgtattggatgagcttgtagtcggcaagcaactgcttggtttccttgtcgaagtcatcggtggacatcgggttgccgttttggtcgagatagatgttctggccttcgggaatacgatcccagccttggaccttgttgaccacaggcggttccatagcggcaatcttggaatgcatttcggtcaggaacgccagatacgggctgaccttggcgttcatgtgatcggcggcctgtgccacgaagaagttcggcgaagagtaggctgcatcgcttgccttattgccttgggagctggaagccttattcgaccagatgaagtaatcggtcaggtgcagggccaaggagttgttgccatcctcgctggcggacgagtagatgcccggcaagtgatcgccgtagaacactacggtgacgggcttatccagcgcatccagttcgttcaggaactcctgagtggcctgatcggtaatctccacacccttttgataggtctcaatcgactgctgttcatcatcacccagcggcgtacccgtggtggattcagcggtgtagtcgttgttctcataccactcgtggtagggcatgtggttctgcatggtgatgatctgaatgaacttgttcgtcttgccggacctgatgccttccagcgcagaatcataggaagacttatcagagacgtacggcgactcgtcaatcttgtcctgatacttgatcacgtccggaccggtcagcgtgtagaagtgcgagaacccgaacttcttgtagttcgtagcgcgcgagtacatgctggactcgtacggatggtagccgagcgagttggcgggcgcaccccacatctggttgatggtgggggtccaatgctggctcgggaccagctgctggtacgggctggacagggaggaatcgaaattggccatgctcagaccggaaagtcccatgtattcgaggttggccgtaccgccgccgtagccggaggagagcatcaggccggaggtggtgcccgccttgatcttgcggatgttgggcatcgaatccttattggtcttcagtcccggcacgcggctcgggtcggagaaggattcggacagcacgtacaccactgtcgaatcagtgaggttgttggtgcgggaggcgttgattgtctccgcttccttctggtagcgagcggcgaccttcttcatggtctcctcggagtagttgctcggcttgtccatgatcttcgggttgagctgacgggtaaaggccacgagcggaccgttgcgctgcgcgtcatacacggaatcccacatggatggcgtgtcccccaaggcgcgggagaacttgttggccagcgaatcggtggtgctcacatgaatgcagtacaacgagaacaccagaatcggcagcagcagcagaatcagacgggaggtgaggttcaggctcaggttgtccgtacggatcatgcgacctttgcgcccgtcgaagtggcgcagcaccagaatcagggcgagcagcgcggcgaacgcgccaagtgccacgaggatggtcacgtgcgcgccggccggaatgaaggtgagcatattgccggtgttcgagccaaggaagccgaggtcggcgggcagaatggcctcgtaacggatctcgaccttgaaatgttcgatggcggccacgatgattccgaccgcaagaatcacgatgcttgccgtccagaatctgttgaacagcatcagcaacatgaggtacagcaacgcgacaagtatcacgttgagtacgaatacgaaattgccgtcggtccacatcttgctcacgaagccgaatccgacggtcggactggacagttgcacacgggtggagctggacgaaacgcccacttcgagcgccgtcacaacaataatgtcgaagataacgaagagcacgccgtacgcccagccggggaagggcttgtgggggtgctggggcgtgacttcattggcttcggcctttttgacccaaagcttgaaatggggtttcactgtggtgatactactagtgttctcgctcattcgcctgtttccgtatgtgacttttcaagggcatattgttgccgctgaaccttggaaaatccatagttccactatttttcttaccgtttcctaactattcaccctaacgcaaagggtgcctcgggacatccccgaagcaccctgatatataaggagccttccctgatagcgaagcgttctgttctcccctaggcaacgcctcgctatctgacttgattattccccttattgctgttgcggattgccggctaccgccgcattacttcacggcggcggcgaactggtcgaccagtgcgctcatccagtcgagcaggttggtgtactgcttcggcatctgctcggtgagctccacgatcggcacgttgacgtccttggcggcaccggtgatctggtcggtggtggagttggcttcctggctgttgaagacgagcatcttgatggagccgcccttcagggtgtcctggaagtccttgatgtcggccggggtcggctcgctctcgttggcggaagcctgggcgtagcccttcggggtggcgtcggtcatcttgaggtcgtcggccaagtgccaggccacggattcggtggcggcgtacggcaggccctcggtcttggcggaaatctccttgatcttggactcaagctggtcttccttggcgtgccattctttgttgagcttggcgtagtcgtccttgtgactcgggtcggccttctggtaggcggcggtgatggcgtcggcagcgttggaacgcaccttggcggagaaccagacgtgcgggttgtcgccttccttgatgccggcggtttcggcggcggtgaccagcgtggccttggtcgactgggcggccttggtggcccacgggtcgtaatcggcaccgttgaccacggccaccttggcagtgccgaacttggcaacatcctggctggtgggctcgtaatcgtgcgcctcaacgttggtcttggtcatgatgttggtgacttcgacgttgctgccgccgaggtcttcggccacggaaccccactggttgatggaggcgacgacctcgatcttgccggaagacgcggcgctgctggaatcggacttgttgccggcggcattgctggaaccgcaggcggccatcgagaacagggtcgccgcggcggccgcgatggcgagcgcgcgcttggcgttggacatgatggacatgattggattttcctctctaattcagctgtttggctgggcgatgttgctgttgctgcatcatcgctcggccacccacacgacagaataacatgtattgagaattattatcatttgcatttatatcggcgtgttgcacgcgcacacccgcgctgccggcggaaatcccgcgccccgacgatgacaacgcgggatcccgccgttttcggcagacgaaacggcagtatccccgcgtccgaacgatacccgcgcgggggttctgccgtttaaggcctcggaaacgacagaaatcccgcgccaccttcgttcggacgcgggggttctgccgtttgccgcacatgtcacaacggcatcgcggcacagaccgacgcctgcaccaggtcgacgagccccacggtgtgggcatcctcacagaccagcgcatcacgcaaggcgattgcacggatgatgtcgcggcaggcgcactccccgtctgtatccaaatggcgtgccaggcaaccggcaccaatgaccggcaattcgagcacgcacgaggcctcacggatcaggcgggagaccactacgccggtcgaacgctcgtcatagacgccgttctcctcgcccatgccgcacaggcacaaacggtcgtcgtcaaagaatcgctcttcgaattcgtcaaggcctacggcattggccaccgcacccacgaacatcgactcaccccactcgttgagacggaaggaatcggccagatactgcgcgaccggcgtggcctcaaggcccacaggcagcgagaccagaaacgcgccggcccgcccttgcagcgatccgagcgtccgttcaaggtcatgtttgaccgtgcagctcatgcagcacccctcgagcccgaacgaatcggactcgccgaacaccaccccgcttgcctggggcttcgcgacgttgcgcacgatatcgagaccggattccacggcttcgttcgggcgcacgtcataagcaatcgagcatacggacgggaaggaatcgatcaacgagaacgccacggagtccaggctcaggcggtcggcgccggtgagcagcaccacgggcgtgcgcccctccgcgtttccctgtgattgcaatgccggatgaatcatgacagcctttctaatttgataatggttatcattatgatatagttgcaggcatgtccaaaacatgtcaaattctgggaacacgcgccggggtcggcaaccgcgtctcccactcgcacaggaaaacacgccgaaccttcgccccgaacctgcagtccaagcggtactgggtgccgtccttgcagcggcacgtcacgcttaccgtgagcgccaagggcatcaagaccatcgaccgcatcggcatcgaggcggcgatcgcccgcatccgccgcgatcagaacgtcaactgaaccggccacggcatcacccccatgctcgggcagtcagtaggcccgccactgtgccggcgcgtaaccgcgcaacaaaccgcgctaacgagctgcatcacccacatggcaccgcgacgtacgcgacatacgtgacataacagcgtgacacccacacatagaaagcaccactcatggcaagcaaatcctccgcaatccgcccggtcatcaccctgaagtccacggccggcaccggattcacctacaccaccaccaagaatcgtcgtaatacgccggaccgtcttgagctcaccaagttcgatccggtagtccgcaaacgggtgctcttccgagagacccgctaatccatctgttcgttcattggacaccagtcgcgaggcgaggaagaggcttaagcacccgccgaaatcgtttcctcgttggcattccggcggtttcctctatcaccatttcatgaactcatcttccgaaccttgcggcatgcgcccaatgaacgaatgcactcgtcccagctccggccggcgcgattcccgcgccccggagccttatcaaggagccggacatggccaaaaccagtaagatcaaccgacaattgcagcgcgaacgcatggtcgccaagtatgccgaacgccgcgccgaacacaagcgcgacagcgtcaaccctcatctgaccaccgaagaacgcgccgaggcgatgcgcaagctgcaggccctcccccgcgacgccagccccacccgtctgcgcaaccgcgattccatcgacggccgcccgcgcgcctacaaccgcaagttcggcctgtcacgtatcaatctgcgtgagaaggcacacaagggcaaactgcccggcgtggtgaaatccagctggtgatcgggccggcacaaccggccgtcaggccgtctcaggccatctcaattcaccggattccacccgcgcgtccgacgccattctcatccatatcaccacacaacaccacacaaccaaaggtccataaccatgcaagagggcatccaccccgaatacggccccgtggtcttctatgaccgctccgccgacaagtacttcctcaccaagtccacactggtggccaaggccgtaaacctgccgaccatcgactgggaggacggcaacacctacccgctcgtcaatgtggaggtgtccagctacagccacccgttctacaccggcaagaatgtggtgatcgacgccgccggtcaggtgcagaagttcaacgctcgttacgggcgcaagtgattcgccgcacattccgcaaagaccgtaagacaagaagaaaggaacggacatgaaggtcaaggcatcggtccgctcattggcccgcaaggatggctcctatgtcgtccgccggcgcggccatctgtatgtaatcaacaagaagaacccccactggaaggcgaggcaaggctgatggcactgcccaagtacaaggcgtcccgagcaaacacgcattcgcgccgagccaactggaaggccaaggtgcctcagctggccacggtcagaacgcctgaaggcgaagtggttcaggttccgcagaatctggccgcagccgtacgaaaggggtatatgaagccataaccaacatcgtggattccgcaatccatcaagtctcgcaacaacaactcgacggtccgctccacaggccggcggcgtacgttctttctcccatttccttccgtatgccgtcacctgccggggcgaaccgccgttttatgaggccaccgcatccgatctggccaagctcgccaaggcagacatcgtggtgctcaacggcgccggctacgacggctgggcggaaaaggcgcagcttgacaagaaacgccagaccatcgtgaacgtgggcggcctcatgggcgtcaccgccaccgacgagcacgagcattcccacgaccacgccgagggcgaagaaggccgccatcaccaccatggtgctacgaacccgcacctgtggttcagcccggaagccgtgctgaaggccgccgaagccatcaacgccgcctacgcggacaaggccggggccggttctgccaccgccgccaccgtgcaacgtcacttcaacgacaggaagaaaccctcaaggaaatggacaactggcccacgtattacccggcatccatgagcaaggaggaagtggccaccgagatgctggcccaccgattcgccatcggcccaggcaaccatgtgcaaagttccccgcatatcgatgtgtaccatcggtatgcggggaactcgcatattatctcgaccactatcatgcgtacggtgctaatatgacggcgatatggcaggtgatattcgcatgaaagaacctcgcacgcagcgcacggaacaggtgaacaccgcgcaacaggaccattcggcgaactatctgtttctgattatcggcacgccgctggtggcgttcctgattgcggcttccgcgatgctcgagtcgcgtgggtttccggttccgctggtgcgtatcggcaccggtgccgcggggcttatcctgcaggcgattccgttcatgctgctgggcgcgatgatgtcggccgtggtcagcacgttcgtcagcaccgattctctggcccgccacataccgaaatcgttggccggcggactggccgcggcattggcggccggcctgtgcctaccggtgtgcgattgcatggtggtgcccacgttcgcgaatctgatgcgcaaacgcctgccgctgccgtgtgcggtgacgtttctgtgcgcggtgccggtgatgaacccgatggcgatatggtccacatggttcgcattcaccgacaaaccatggatagtggcggcccgcatggggttgggcatggtagtggcgatagtcgcgggggtgtcgttcgcggtgtggccgctccgctcccctgcggtgcgtgagaggccgctgacgattgggcggtcgttgatttgcgaggattgtgcaggggcgacgggtgattcgcctgagaaccacccccagtcggctttgccgacagcccccgccggcgggggcacggggcgcggattggagcggttcacgcatttcattcggcatacgcatgacgactttatgcggatgatgccgattctgctgttcggcacgatcattgcctccatcatgcgcaccgcattgtcgtcgttgaccaacggttcaagcacgctcgatgacgctggtgccatcgtactgattctggcggcgatgggactggcgttcctgtgttcgctgtgctctacgtccgatgcggtgatcgccgccagcatgattggcgcgctgccggtctccgccatgcttgccttcttggtcttcggcccgatgctcgacctcaagaacacgctgatgctggccacggaatgccggccacggttcatcatccggttcatcgcgaccgtggcggcggcctgcttcctcgccgcgattgccgcccatctggtgatgggagcgtagccatgaagcgcaaagtcacactccccgaccgcgtggaggcgctgtgtttcgcggcgctgggcgcggccatcgcctatgcggcggtgggcggatcatacaccacgctgaccacgccgcgttcgctgccgtatctcatcatcggtgcggtactgctgttcgtgctggcgaccgcagcatggctcggactgttccacgccacggagcgttcggttttgcggttcctgatcgccttgattattccggcgctgctgatcgtcgtgccgttccagcccagcagcggcagcggcggcttcgacgagtacgccggcggccgcgctatcgccattccccgcagttcgcacaagcctgatggcgcctcgcagctgcacggactcgacacggcgaacaagaccctgaccatcagcgacgacgaattcggctcatggttcgagcagatcgaccataatccgcagcgttacgtcggttaccatgtgcaggtcaccgggtttgtgagcaagtcgcgtacgttcggcgcgaacgagttcgagctgtcccgccagttcatgtcctgctgcattctcgacatgaccccattcgggttcatagccagctccggcaaggccggcaccccgcacaatcacgactgggtcaccgtcgacgccgtcatcaagcagggcgcctacggctccgccggccacgagcgccaaggcctgatactgcaggtccggtcggccagcaaagccgcagccgccccgaccggctacttctactggcagtaaatgacgcgtctcccgaaatggaaagcactgcgctgcgccatgactcgccccatatcggcagaaatcccgcgttacaacggaaggtacgcgggggctctgcctttatagggctcaaaactggcagaaatcccgcgcaggcctcgttgaaacgcgggatttctgccagttgattcaaatcatgtgacaacatgccgggcatctgattttctttaataacgataatgaatatcatttgttaacagaaagggacagaacgtcatgagcatcgagcaaaccgcgaccactcggcgcgtgacgcgaccccgactcctcatcacccaggtcctggcggaactatcccgattcgccacggcccaggaaatcaccgacatcctgcgcgagcgcggcacgcgcatcggcacggccaccgcctaccgcaatgtgcagatgatggcctcccaaggcgagctcgacgtaatccacgtcaacggcgaggccctctaccgcgagtgctcggaccagcatcaccaccatcacatcgtatgccacgaatgcgggcggaccatcgaaatcgagattcccggacttgagcagtggatcgacaaagccaccaagcagttgaagtaccagaccatcgcccacgaactggagattttcgacctgtgccccaagtgtgcggcgaagcatgccatcgaaccgcctctcagcgtcggcacctcaccaaaggatggaccactgacgacgccagacgatactggccgtcggcgctcgaacaaataatggcgcagtcccgacgctactggccttcagcatcggtgcccttccaatccttggcgcaatagcgacgatataagctccactcgcatcgttagattgccaacgcttggcgcagcaccgacgccagacacgctcatcgtcgtcgttccaccaatatttggattggtaccgccaccacctataccaggcgtcgacactcggccaacaatcggcccgttaccgacacaaaactgcatgaggtctcattgctcttaatagcagcaatgggcctgataatcactttcacccactttcgccgctgccgtctgccgccctacagtcgcagacgaacaaacgctgaaaggaacaacaatgactatcaagaccatcgatgagcatgcttacgagatcgttaccgaagagggcaccttcgccgtctgcaaggacacgctggccaagttcgacgccaccaagcacgagcacggcgtggccgcctgtggccgctgcggctgctgcttcaccggcgactgctgcgacgacaccggctgcgagcacaaccacaccgaagagtgcgggggcaaggcttgcctgcacgcttgccacgagaaccgcgaaggccacgagtgcgccttctgccaccttgccttcgacaccaacgagaagtgccacgatgagatcctggccgacctcaaggaactcaaggccgagctggctgtctgagttttaggtttccgatttctcctgcggattgactcctctcagggaggggagccagattccgacacgaaccaccgcgcttaccgtatgatgtctacgggcgcggtggttttgtttttctcgatgatggcgcagatttgctcgggcgcctccttgcagccgcgccggacccatagccagataatcgatgagacggcggagaccagaatttccagcgcataggcgcgcggaatgccgccgtagctcagctcggcacccacacgggccgcctgcccaagcagcatctgcttcaacacatccttgacccggtcatacatctgcatatcgttgcccgaacgggacagtgcgtcgaagaacgcatactcacgcttgacatagcgcaacgcctcggcttcgtgttccagttctacaatctggtggccaacctcacggccaaggagaacgtggagctcgcctccgaaatcatgaaagacgcgcaggaaccgacccaagcgcttatcgacgtggggcttcaggaccgtatcaacaacttccccgcgcagctttcgggcggcggacagcggcgcgcggccatcgcccgagcggtggccacgaacccgaagattctgctgtgcgacgagccgactggcgctctggactacaacaccggcaagcaggtgctgcagattctgcaggatcagagccgtaagaagggtgcgaccgtggtcattgtgacgcacaattccgccatcgcgccgattgccgaccgtgtgatccacatgcatgacgcgcgcgtcaaatcgatcgaagtgaacgagcacccgatggatatcaaggatctggagtggtaagcagtatgaccgatctcaatgatttcaccgaaacgaccaaccttacgcccgcgaccgactccgcagccgattccgccgcaaattcagcaaacgactcctataccgcgcccggcagaacgccccacgcgcacaaggccaagcgcaaccgccgacgcaacgggtcattccatagcgcatgctatggaaagacacccgcgtcaccatggccaaatccaagggtcgattcgcctccatcgtgagcctgatgacgcttggctcctttgcgctcgtaggcctgttcgtcaccggcccggacatgcaaataaccggcaccgacttctttaatcagaacaatctcgctgacataaccgtcatcagcgattatggcctgaccaaagctgacgaaaacattattcgcagcgcgccgaagtggccaaggcgatgaggggcggggccgtctccgagtccgcgccgatctactacgaggagatgtcgaaagtggccggcaaggagaacgacaaacagtcgattaccctgatcgccactgatgacgcctacaatttcggcgactacatcactgcgttcgcgcaccgggcacaagccgcaggtgctcaccgaccgtggtgcgatcatctccgaacgtatggcggggatgatggacgccaaggtaggcgacacgattaccgtcaccgattcgagcggtaccgagcgcaaggtgcgcgtggacggcatcaccgaaatgcatatcgggcatttcatgttcatgacttcgggtggctgtaagcacgtgttcggcgaacagtaccagtcgaacgcctatatggtgaggctcaagaaccatgagacctccaatgtggagtcgcgtagcgccaagctcataaagttggacggcgcgaagggcattgtgcagaacatgacttcgaagaaacaggtggccacaatcgtcgacttgccggatcagatcatggaagtgctgattctcgcggctgagctgctggccgtggtgatcctctacaatctgacgaatctcaacgtctccgaacgtatccgcgaactgccgaccatcaaggtgctcggcggactcggcgtgctggtctaccggcggttgaagacggtcgacatgctcggctccctgaagtcggtggaatagcagcggaatagcaaatgggatcggctttgaagccgatcccattcaattattcgctcactgctttctgagccttctgcgctttctgctccttttggcaatcagggcatagtccgaagacctccagggtgtgggattcgacggtgaagccgtggccgtcggccactttgcgcagccaagcctcgctgggcgggtcgatttccacggttttgccgcaccgcttgcacaccaagtggtggtgatgtccgtcgtcgccgcataggcggaacagctgctggccgtccaggcggatcgtgtcggcggcaccggcatcggccaaggcgttgagctggcggtacacggtggccaagccgattttcgagccttcgtcctccagcctgcggtgcaggtcctgagcggagatgaactcctcacagtcggccaaggcggcgcgaatcgcgtccttctgcttggtctggcgttcgatatgttcaaccatcgataaggtcacgccttctttttcaggtcgtcccagcagccggtggcctcaaggtcagcaaccgtggcatcagggttgtcggtgagcacggtgatgtggcccatcttgcggtcgtgacgcacttcggccttgccgtagtcgtgcacattccactccgggtgggtggcgatcagcgcgcgcgtcggctccacatgctggccgagtacgttgaccatcacggccggcgagagcagcttgggcttgggcatgggccagccggcgatgccgcggatgtgggcgtcgaactggtccatcgagcaggcctcgatggtgtagtggccggagttgtgcgggcgcggggcgagctcgttgacgatgacctgatcgtccttggtgatgaacagttcgatggccagcgtgccagccagttcgaagcccttggccaagcgaatcgccagttcatgcgcttcgcgagccacatgttcggacacttcggcgggggcgatggtcatgtgcaggatgttgttgcggtgctcgttacgcacgatggggaaggtgacgaagtccttgccgttgccggagaccaggatcgaagcctcgaatgcgaagtcgacgaagccttccaggatgctcggcgggaagccgccaccacggtcggaacgggagcggatcttctccaagtcggcgtcggaacgcagcacgagctgaccgtggccgtcgtagccgccggacacggtcttcagcacggccggataatgaatatcatccaatgcggcgtcaagctcatcgaagttgttgacggcgcgccacggtgcggtggcggtgccgtggtcgttgatgaaccgcttctcgtgcacgcggtgctgggtcacgcgcagcaggtcggtgccctgcggggtggcggtgatgccgcgcacctcgtcgatggcatcggcgtccacgttctcgaactcgtaggtgagcacgtcggactgcacggccagatcatggatggcggttttgtcatcgtattcggcggtgatctggaagtcggccacctgaccggtcgggcagttcggcgtcgggtcaagcacgccgacgcggaagcccatgtagcgggcggacaaagccatcatgcggccgagctggccgccgccgatgatgccgatggtcgatcccggcatcagcatcgaaacacgaccgcctgtttcctcagacaagctgggcattggattcagccaccttttctttcagttcgttacggtaatcctcaagcttgtcggccagttcgggctcgaaggcggagagcatctgcacggcgagcaggccggcgttggtggcaccggagttgccgacggcggtggtggccaccggaatgccgccgggcatctgcacgatggacagcagcgaatcccagccggacagggcgtgggagcgcacgggcacgccgattacgggcagtgtggtctgcgcggcgatcatgcccggcaggtgggcggcaccgccggcaccggcgataatgaccttcaggccattggcgcgggcgttgtgcgcgaactcggccatgagctcgggcgtgcggtgcgcggagatgacctgcttgtggtaggcgacgccgaactggtcgagaatatcgcaggcgcgcttcatggtctcccagtcgctggccgatcccatgaccactgcgacttcgggcttggattcatttgccattatcatttactccctagttattgagaataaggcccactgtactcctgatagcggagttaagccacgcagcgaatcgttctcaatacataattctgtgaggcttacagctcaataacgatcttgccgaacatgtcgccggcgatcattctggcgaacgcctcgggggcggcgtccaacccgctgaccacggaatcgatcaccggatgcaggtcggcgtgctccacgaagcgcagcaatcgtgcgaaatcctcgcgcgaacccatcgtgcagccctgcacgcggatgtcctggaagaacaaccgggtcagttcggcaccgggctggtcgccggtggtggcgccgcagatggcgatggtgccgccggggcgcacggatttcattgaatggctccaggtagccgcacccacggactcgatcaccgcatcgaccttgcgcggcaaccgcgcaccggtctccagcgcggcctgcgcgccgagtttcagcgctttggcgcgcttgtccgcgtcgcgtgaggtgacgaacacctccagaccggcggcatgggcgagctggatggccgcagtggacacgccgccgcccgcgccctgaatgagcacggagtcgcccggcttgatgccggcggcatcgaacaacagcgagtaggcggtcagccagctggtgccgagtgcggccgcctcggccgtggtgaggtttgcgggcttggcgaacacgttggcggacggcacggcagtcttctcggccatcgtgccggggtatttctcggagaggatcgtacggcgctcgcccggggccacgcccgccccatcggtgccgacgaacgtgtacagcaccacttcgctgccggccttgagcccatgcttgccgaggatgtcctcgtccagaatgcccacggcatcggtgcccaggatcatcggcgtctgttcggcggcgagacccacaccctgtagcgaccagacgtcgtgatggtttacggtcaccgcgcgcaccgaaacggtcgaccagaacgggcgggcctggggttcgggctgctcgcccaccgccaacgcggcaagcggatcgtcatggttgacggtggatgcgtatacggccttcattgcgcgctccttggtatcaaaaggaattaccgcattcattgtcccacatcgcgcagcgaacgaatcacccatttacggagatgttgggggcattgcttcgtcatgtggacctcggacaatgccgggcgttagcattcaacttcggaaagattagcgaagggagattcgagggtatgcgcaacgcgtcaggaaacggatttgattcaagcgattccttcgccgtctccggtgccgccgaggggaccgcgcgccttcacgacatccccccgagcattaccccttcccatggcgacgactcccatctgctgagccgcattgccagcccggccgatgtcaaggcccttgcccccgacgagctcgccgaactctgccgtgagattcgcgccacgctgctggcatatggccaccaacacggcggtcatatcggctccaatctgggcatggtggaggccacggtggccctgcatcgcgtattcgactcgccgtgcgaccgtatcgtgttcgacgtgtcccaccaaagctacgtgcataagatgctcacgggccgcgccgacgcctatctggacccggaccgtttcagtgaggtgactggcttcaccaatccggatgaaagcaaacacgaccagttcgtgctcggccacaccggtacctcgatttcactggcttgcggtttggcgaaaacccgcgatatggaaggcccgaacagcggcatcggcaatgtgatcgccgtgatcggcgacggttcgctgagttcgggcgtggcgtttgaaggactgaacaacgcggctgagcagggcggcaatctcatcattgtgttcaacgacaatgagatgtcgattgccggcgatttcggtggcatgtacggtccgctcgcccgcctgcgcgcgtccggcggcaccgcccagccgaatctgttcaacgcgtttggcttggattatcggtatgtggcggccggcaacgatgtttccgcgctggtcgcggctttcgaggaagtgcgcgatatcgaccatccggtggtggtccatatccacacgctgaagggcgcgggatatgacggcaccgatcacgtggccggcgcaccctcggcctcggccggtaacgtccatgagctggatccggcagtctccgacaccggcgtgcaccccaccgataacgtgaaccacagcgagccgtggcattcggatcactgcaacctgtccgatcacgaaccgcatgaaggccagtgcgaggcctcgcattggcagaatccggatgccgcaatcggcaagccggacgatccgcgcaagcattacggcaaaatggcgatggccgcgctcgaaccgcgtttcgccgccgagccgggactcgtggtcatctcccccgccacgccgggctccaacggcatcacccatgagttccgagagcgcgcgggcgcacattatgtagacacgggcatcaccgaatcgcatgccgtggcgtacgctgccggcatcgcacgggcgggtggcacgccggtggtggccaccacggcgtccttcttccagcgcgcgtacgaccagttcttccaggagatgagcctgaaccgttcgcgagtcacggtacttgattttctgggcggcttgtccggctcggacaatacgcattccggcgcgtatgacgtgacgatgttctccaatattccaggggttacgatgctggtgccgacttcggctcgcgactatctggccgatttggcatgggctaccgcgccggccggttcggcggacgcccctgctggtccggcggtgattcgggtgccgggcgaggcgattctggcggcggaacgggatgcgacgctgctgccggtgacgggtgggcagattgctgaccgcccccagtcagcttcgctgccagcctccgccagctccgccagcgggggcatatctgccgcaacagtccgcgggaccgttagcgtaacggctcagcatgccggtgcgcgtcacatgctggattggcgggtcaatcagacgggctcgcaagtcgcgatcatcggactgggcaatgcgtatccgttggcggagcagacggccgccgcattgtctgacgattatggcatcacggcaacggttatcgacccgcgccagtgcacgtcgctggattcagacgtactggagtcgttgcgtgatggccaccagcaggtcatcacccttgaagacgggcagcttgaaggcggctggggcgagaaagtgaccgcatactatgcgaatcatcatgtctcggacggcagccgtaatcctcgtgtgctgaacttcggcgcagccaaggaatttaccgaccgcgtgtcgctgggcgaactgaacgaacgttatggactaacggtggagcaggtgacagaggcgatcactcgttgtttttgatggcgtctagggccgggattttaacggctttattggccgggccgaagccgaatagcaagccgatcagcgtggaaaacagcacggcgaacaggaacagccaccacggaatcaccgaataacgggtcacattctcgccaccaactatcgcctgccagagtatggtccagatagatgttccgccaccggtaccgtcgccggagcccccgccggcaccgctgaccataccgccagacatgccgccgctcatgccgcccgcatacaacgcgccgacaacgttgatgcccagcgatatcagtccgctcagcacgcagccgatcaatccgccgaagaatccgatcgcgccggcctccgcaagaaacatgacgcgaatgtcacgaacgtagcagccaagcgccttcataatgccgatctcgcgcgtgcgctcggttacggacataaccattgtgttggcgatgccgatggccgcaaccaacagcgaaaccgcaccgataccgcccagaatcagctgaatcgcgcgcgactgttcttccaacgacttacgcatgtcttcataggaggaggtctcgtagcccaacgctttgatctgtgattcgacttcgggcacggacttgaggtcggcggccttgaccagcacttgatcataggcggtggcttttttggcggcggccggatcgactttggcggccagttccttcaacgcctgcaaatccatgaccagaccgtcggaggtggcatagcccttgttgtagtcgcccgccacaatgccggaagcccgcacatcgagggtgacgttttccgactgacccgcggcgctgccgcttgcgccgcctgtgccgccgccaccgccgccgtacatgttcatgctgtactggtcgccctgataattggtgccggtggtcagactaatttgcgtggcgagcgggtcgaagaacggatcttcgtcctgatctttctcgcactggccggtggcctggttaaacgtgcatgaggaatactgaccgccacgtgtgctggtgcgttgttcgccgttcttcagggtgtccatgaacccataggcgaaccattcgccggcaagcacctggtcttttttgaccggtttctcgccaccgacgagcttgtagcccatctggtcgaactgggtcatgtcgatgcccatgatctgcacgtaatcatagatgtaacggccgcccgcgccggctctggccgtcacgttataagggaagttcatcatcggcgtcacgccggatacgccgctcatcgcgcggaaggattccacggccttgtcgtcgagcttggtatcgcccatcttggacgagccgccatcgtccatcggaccggcataaccgttggtgtacacggtgacgatggacagatcgcccatcgatttgagcatcttctcgttctgctcgttaatgccttggcccaaagagaccatgagcacaatcgagcagcagccgacgataacgcccagcacggtcagaatcgtacgggatttacgccgccataggttttgtctgcagagccgcagtatgtcgccgaatcgcatggtcgggcctttcaggccttgtgggatgagccggctggtgcgactgatgaggctggggtgactggtgtgataggagcggtgtctgccgcagcaccatccgtcacgccggtatcggtcttatcatccttgccttcggaccaatcatcccagtcctcatcaatatcgttcttcttggccttctgcttgcgcctgcgacgcacgagcagcacaatcaccacgataatgaccacggcgatcacgacgatgaccacatacaccagcaccggcaatccctgattggcgttctggtccatgttcggatcggccatgccggaatcatccatcggctgcatatcggttacgggtatggtgagcgggaattccttggtcttggtctgtccgtcggaatcctcgtacgtgactttgagcgtggtcttcagctcgcctgacgcgtgcggtgtgaaggcgtaaccaatcgtgccggtggcgccggaagccacattgcccacgtactgggttttcatcgtggcatcgaaaccttcgccctccatcgtggcctcgacgttggcgatatcgcctttgcccttgttcacatattccatcgtgaccgtgttttcctggccggcgatcacctggtcgggcactacgggatcactgatttcgaaccggtcaggctgactgatcggcacggaaatcttgacgtcagactggcttgaggagcgggcgctggcgtccacatactcgtatcggaagttcacggtcacggactgggcaccgcttttcgcggaggcgagcgcctgcatcggcacgctttgcgtcatggcgtaaccggcccacagcgcgtcgacgtagaacgtgttcgtgcctcccgcgatggcgaagctctcgccgccgtccacggtgacgaccatgttcgtcaccgccacctgccccttgttctggaaggtgaagtcgagattgaatttggatccggcggccacggaatcacctccatacgcgaagttggtgatgatgatgttgggcaccggtccggcgatcggcgcggaatcgccgtcgcttccctgagacgtactgttcgtgccgcttgtgccgtctgtgccgtcgaccgcgtacgcctgatgcggaagggagatgacggcaagtgccagtgacagcgtggagagcaacgcgacgatgatggcgatggtgtggtgggagaggtgcttcatcggtcagttccttgggttctatgggcggacggcgtggacggtgtagttggtgtggttggggcggacggcgtggacggaacagttgggcgggaaaggtcggtgttgagccgatcgctggtgatgcggccatcgagcaaggtgacaatgcggtcggcgtatgaggccatctgcggatcgtgtgtgaccagcacgatggtctggttgaagtcatgggcgaatgcgcagatcatcgtcatgacctcggttttggttttggagtcaaggttgccggtcggctcatcggcgaacaccacctcgggcttggtcacaaacgcccgggcgatgccgacgcgctgctgttggccgcccgacatctggcgcgggtaatggctgagacgatggccgagcccgactcgtttgagtacgccacgcgccgcacgttcgcgctgttccttgggcacgccgcggaacattagcggcattgccacgttttcgagcgcggtcagattgggcagcaggttgtacgactggaatacgaagccgagatgcttctggcggaaggccgccagctcacgctcgtcgagtttgctgacgggtacgccgccgattctcacgccgccgcgcgtcggtttttccatgccggccaactggttgagcagcgtggatttgccggagccggattcgccgaaaatgcagcagatctggccttgcgggatactgagattgacacggtcaagcgccaccaccgtctcatcctcgacggggtattccttgcgtaggtttcttacctcgatgattgctcgcggcacgggcccttcttccttcgttcgtcgccattggcggacgcgcgatagctggttattatccagcacatctcaagtcagtgtataaccgttatgcaggagccgcaccccttaagggtgttcccggatggcagtgataagcatataaccgctgatctcaaggtcgacagttcaggctccagacggacccagaccggcataatactcaaaagcccctggcccccacagacgatgagggaccaagggtttattgcatcgtgaccccggacgggctcgaaccgtcgaccttgagattagaagtcacatgctctatccagctgagctacggggccaaactcatgtaagtctagccgtaggggtgtaaaacacctcggcgtaacgtcggcttgcaccggtaccatcggcgatatggggacaacggagagcaacgtagatcacgccgcatcgggccagaccgtcgcaggcgatagtggtgagctcactttcacatacgcacagggtcgttttgccagtgaaggcagggattgggaaagcccggttgtgaccaacatggctgcatccgtctctgccgatgccggcaatgcccccgccggcagcatcatcaacaccggcgccaacaacactttgaccagcaccaccgaatcgtcgcttgccaccctgctgtccgaccaatgcccgttcgttatcaaggccaccattttcgagggcaatggcaaaaacgccattcgcgaacgtcacacattcaccggctcggtgctgcgccagctcgaccaagccagcgccctgctgaacggcatcaacgaatccggccaacacccggccatagccctgcgcgaagcattggtcaacgcactggaacatcgcgattacacgtactccggccccacactgatcaatatcttcgattcccgcctggaaatcgtctcgctcggcggcctgaccgatggtttggaaatcaacgatctgctcaacggcgtatgccagccacgcaccccgcgtttggctgaattgttcgccgatctgggtctctgcgagaactgcggtaccggtattcaacgcattatggacgcctacgcgcagagcgcggtcagtccgcaactgcgcgtaggccccacttcggtggcaatggtgctgcccatcccggtatcggccgaggctgcatccttgcatcggaccgataccgatgcttccgccgcgcccagcaccactgacgaagcgcagcgcgccaaaatgtactcattccccacgattcagcgcatgacggataacgccgcagatgctttggccggcgcacgcatcatcggctgcgcgccattgcagacgctgattctcggcagtggattcggcgagcgcccggacggtgacgaccaggtcagtacccgcccgatcgatacggcgacgctggaaccgtcgcctcaaacgttggagcagttcacgctcaatttcctcgcgttccgcggcgtgaagctcagccgtaaaaccatgcagaaagcgcttggcctgaacaaggatcagatgacgcagctcttggaccagctggagttgagcggcaagatcgaacgtcatacgcacgccaagtccactacgtattcgctggcacatgcctcaggacggtaacgaccagagcggcaacaaagcggcaacgaccagagcaatacagcccaaggcacgataaagcagcagctcagttctcgaatacgcgatcgcgaatcatgcggccggattcgtcgagcgcggtggagaaacggccgtagtcggacagaatcacgcccatgtacagcatgtccacgagcgcggtatcggccacgcgcgagaaaatcgcattgccatagatcgtgtgcgagccacgacccgtcagcaacgtcacgtcggcccagctggccagcggcgcgccgatggcattggttatggcgatggttttcgcgccatgcgatttcgccaatcgcaacgctttgaccgtatccgccgaactgcccgaatgggagaaggcgacggccacagcgccgtggggcaggtgcccggcaccgatctgctgcagataagcgtcggtattgagacggcatgtcagtcccaggtagccgagcttggtgaacagatccatcgccggtgtcaacgagttctccacgccgaaaatatcgatgaactccgattcggcgagtagggcgaccgccttgcgataggccttggggtccaacgcactgtgcagctcatcgatcagcgccttcgcgacataggccgctttgccgggaatctcatcttcgccatcccacggattcagatcgaatccagccaacggattgaaggtcactttgtgctcggcggacggatggcgcaacacgtaccgcagttcacggtaaccgccgaaaccgagcttgcgggcgaaacgaatcaccgtcggctggctgacgtgggcgatgtcggccatctggccgacggtcaggtcggccgcctcctcgatatgatcccgaatatactgggccacggcgcgctccgccggacgcagcgacggatacacgtggtcgatgcgctcacgtattcccaccgaggattgcacagccgcgctcctagtcgtccgtattttccattcctgtttcgagggtaccggctgtataccggcgaacagtcgacttggattgaccgcaacatgaacggtgagcgaactcttccgtttacctttccgctccattccctctacaatcaaaaccatggtgcggattagcgtgggaagccccacccatcacacaagcgggcggctgtacggcgtgttcttcgaggacatcaaccatggtgcggatggcgggctgaacgccaacatggtgaacaactacagttttgacggcgtctatctcgaccatcacacgtggcgtatggccggcgccgaacgatggcgtacacaggccgattccctgcgtttctgggatttcatcaactgttccgccgccagcctcggcagtgagatacgcgggattcacggccagcgggtgaccaccgactgccccgccccgccaattcacacacatagccgatacgctcgcatcacgtccgatgttccttccgaaaccggccctgcatatctggaaaacctcggctataacggaggcggcgacaacgggggcgagcccgcgttctccatcgtcgccgaccacacctattccgtcagtctcgcggtacgtccggttcatgggcgggccaagctgtccgtcggcgtggtcgataggtacggtctgccgctcaccagcaccactcgattgtcgtatatcgtggacgcagatccgcttgacgatacggaagagaccggtctgaggcaggacgatggcgccaatgcgcaggattccggcgtttcgatcagtccggattcgtcggatggtgccatcgccatcggccgtgacggctggtaccggttcaacgccgacgtaaccggcctgaacaccgattacggcaagctgcgtatcaccattgacgccggcgaacgcaccacgttcgatctggatctggtgcagttcatggatgcggactattggggcgcgggcgacccgaaatggcgttacggcaagctgcgccgcgatctggtggaaaccattcaggcgttgcatccagcgtttctgcgattccccggcggctgcatcgtcgaaggtgtgacgcccggcaatgaatatcgctggaaggataccgtcggctccctggccgcgcgacgccaacagtattcgatgtggtcgttcaagatgccggatggttccagctattcgcagagctatcagatcggcttctacgagtatttctgcctgtgcgaggacctcaaggccaagccgctgcccactctgttcgccggcatcgcatgccagtcgcccggccgcgatccgcgccacatggatatcaattcggccactttccgcaacaatgtgattcaggactacctggacctcatcgaattcgcgaatggcgatccggagtccagctcgtgggccgcggtccggcgtgatatgggccatccagaaccgttcggcctggacatgatcggcgtgggcaacgaaaacttcggggctgactacgtggccaagtttgacatgatcagcgaggccattcacgaacgatacccggatatgctgtgtgtgatgagcgccggactgttccccttccagccgacgatgaaacgcagctgggaccatgcgcgagcgttggccgcaaccgattccggggcacatgattccgccaccggtgacgcgattatcgtcgacgaacattcttaccactcccccgaatggtttgcataccaagcgtcacgattcgacgcttacccgcgttgcggcgccggcgtctatttcggcgaatattcagccaacggctattttgccggccaaccgcagaccgaacagggcgcgaacacgtggaagtcggcactcggcgaggccgcgttcctgaccggttgcgagcgcaattccgacgtggtgcgcatgatctcctatgcaccgctgctcgcgcatatcccggctaaggggtgggcgcagaatcttatcgaactcaatccggcgcatgtgaaccccacggtgaattatgaggtggagcggctgttttccacgcatctgggcgacacgacatatgccgtgtccatcgagcagaccgcgtcacgccccgccaaacatctgtatgtcagtgccaccgggcatgacggggatgacgcctgccgttacatcaaaatcgtcaatacctccgattccccggtggatgtgacgttggaaatcgcgcgcggactggccgggctgggcgcctcgccatcgcgaccggtgcgtttggaggtgacgacgttaagcgccagtccgacggcgaaaaccactatcggataccgcggcgaggcttcgggggcgattgtgccggaacgtcgggcttacacattgccgtcgccgtcttcattgctggcgatgaagatcaagccgtacagcgtcacgctggtggcttcgcgctgattgacatcggccattaggccgattcctttgccgttagaatcaccctcaaggatgagggggaatcgtgcagattcagggaataataggggctatcccccatagcgaatacaagcacgggagggcaggatggaaaccacggcggccagaagaccgccggccaacgatgaaggagtatgcggtatgtttatcaatctgttccgcaggcagcgccctgcgctcgcccggctggcccgcaactccaacgcctatcgtcagccgatggttgcggccgtatcatcgtccgcagtcggcgtatccagcatcacctctgcatccaccacagccaacacaaacggcgtatccggcgtatccacgctggatgccaccatcggctgcatccacgacatcccgcagtcggccatgagccgactgaccggctcccccaccgtatacgcgcggtagaccggcccaacccacaacggcggctcagagactcggctcgatgatccagctcaaggtcagcaatacggccaaaaacagaacgttgacggcggagtagacggccagataccggcctttcttgtgcgggtattggcgcacgacgttcttgtaagaaataagcgaggccatcgaggcgatgagcgtacccatgccgcccaaattggtgccaatgatcagatcgcgccattggtcgcagaagccggaaagcagaatcgtggtgggcacattgctgatgacctggctggagccgaccgccacctccagcggatggccgccgaccagcgagcgcgccagttcgtagaattcgggcacgcgcttcatgttgccgatgaagatgaagaacatgcagaaggtgagcggcagtccccaatccacgtatttgaatacgcgccgatcggtgaacaggaacacgacgaccacgatcacgcacatcacccacaggggaatcacgtcggagacggccagtaggcagacgatgaacagcagcgagtagacgatggtgcgccagccgccataaccggcgccgtagccggtgatacgaatctcgtcgggctggtgtttgttgcgctcgggagccagcacgccggtttcgaggtcgcccaggtcgccgaccggtttgccgccaaacaccacggaaatcacgatgaccagcaacacggccgccgtgccggaatacggtgccatgatgccgaggaattccatggtcggcatgccggtcagggctttgagatacaggttgtgcgcgttgccgatcggggtgagcatactgcccacgttcgcgccaatggtcatcagcgtgaccacgaggatggtcttatcctcttgcccagccatgatgagcacggccaccgcgaacggcacaaacgtgaccagcgcaacgtcattggtgatgaacatcgcggaaaagaacgtcaaagcgacaagcgtaatgaccagtccgcgcatggtgctgaccttctccagcaatcgcgaaccgatgatgcggaacacgccgatacgctggaatccgcacaccacaatcatcaggcagatgagctggctgatggtgctggcgtgaatgtagcttttgtaatcggcgtccggcggcacaatgaaacacgaaatcagggcgagtattgcggcgacgatgagaatcgtctcatttttggctacattgatcagccagcgtcgcatccattcctccgtgaataacccaatatcgcagccgttctattctacgcgcagaccggcataaggtacgtagtcgcgttgcgctggcggacatgagtttttggaccggtaccgcacatcagccgcgctcgtttttttatttggacaagaaaacattgagtttgcatgtcttccatacaatgaactgccgcgcaatgctgtgcccgtatatacggctgcatcattgtgtggcaggccagacacgaataccgtacgtggctggctcaaaccaatggaacatagtttcattcgaggaagaggagcgatgaagttgcgtattaccccagtattcccggtcaaacgtttcgccgccgtgtctgcacagaacgtgaagaacgtgcagttcgattacacgaacatgcccacgtacaacacgatcaccgagtagcgcgcaccgccgcactgatcggcggcactcgccgcatacatgaatggccggtgtgctgcggattcctaaccacgaatccgcagcacaccggccattatgatatatgccgcaatacagggggcaatcagccctgcaccttaccgccttgcgcgctacggtatccgaagttcatcatctcgctgttgtaggcgaccacgccacggccgaccgccggcagaacgatcatgccgccatcgccatgatgcgcggcgacttcgtccaaagtggccgtcgcggcatcctcgacgttctcgccggcgaaacgcacacgatccgacacctgatgggcggcgaccaccttgatgaacgcctcgccgatgccggtgcaggacaccgccaccgtggactggttggcgaacgtgccgcaaccaggcagcggcgaatcacccacacgaccgtgcatctggttggtgatgccgccagtggacgtgccggcggcgatattgccctcggcatcgcgcgccacggcaccgatggtgccatgcttctcccactcatcgccaccggactgagcctcggccaaggactgacgacgctgttcggtgatgaagtactcgttgctttcggtcgcgacgccccaatcggcgatctcggcatcggtcgggtccgcgaacagcacatgcttggtctgctctttgacggcacgcgccgcatcgatcgggttcttcacggtgcttacgccggtgaccgcaccgacctcgccatcgccggtcatcaggcaggcgtccatctgggcgatgccatcgctggtcagggcggcaccacggccggcgttgaattcgggagcgtcttccatgacgtggatggcggcgaccacagcctcatgcgccggtgctccggattccaacaactggtatccggcatcgagggcgcgctgcagatcaagttcgacctgggcgatgcgttcaggcgtgctgtgcttgccacgactgcccgctccggcgtgaatgataagcgtgatgccggtttcgctgcccgccagttcagtggtcaccggcgaaacggaggatgtggtcatatcgtgtccctttctggagtcagatggatgtgctgacgccaacgtatcgttgctcccgcatgtatgatacccgttgatggccgcgaccggttccgcatttcgcatcatcggctcgcgatggcgtgactcgttactgcgccacctcgccactacgccaggggcaatgcgatgccggctcgatcggccaggtcacgcaacgaccacgtggtctgccccgttcgcccgacaacgctatgcgcatgccacagcgaactgatgatggcttcctcgcttattcattcgtcgaatgcacccatcgatgtgggtatgcagccatcaaaaaactcgacaaccgcaatgagccagtcacttggctacatctgtgctatcgtctcgccaatgattcgaatgccggtatcaatgtcagcagcatccgggcgcacaaagttgagacggatgtgggaatcatccatttcgtcaacgtcgaacacgctgcccggcatgaacgtgacgccttgggaacggcaggattccaatacatccagagagcgcacgccgtccggtaaggaaacccaaatatagtagccgcctgcaggcacggtccaatacacttcatccggcgcataccgctccaatgctgcgattgccgcatctcgtcgaatgcggtaagccttgatcaaaccgcgcaaatgttcggcgacgcggccttctttaagcagttccaggcagatgcgctgcgatgacgtgctcgtatgctggtcgaccatgcgccgcagagccgccagccggttaatcacatgcgggtcggccacaacccatcccgtgcgcaggcccgaagtgacggttttcgagaacgtcgacaaatacatcacgtatcccgcattctccatgcctttgagcggtatggggcgatgtgcgtcggatgatcccccgccgtaccacaaatcgccgtaagcatcgtcttccacgatcagacactgatagcgccgcgccacgtcaatgagttcgctgcgtcgttcgggcggcagcgtggtaccggtggggttttggaacgtcgggacggtgtagatgagcttgggccggaatcgcgcgcaatagccgtccaacaggtctgtacgcataccgtgctcgtccactggaacgccgatgatgcgcgcatccgccgagcggaaggtctgcaatgccgggaagaacgtggattgttcgaccagcacgcagtcgccggggttgatgaacgcgcgcacgatgaggtcgatgccctgctcggagccggagagcaccatcacgttgcggacgccgcattgtacgcctcgtgtgcgcatatgttcggcaagcagcgcacgcaactcttcgaatccctcgataggtgattccggttggccgtcgaattcccgcgattcgaacgcctcgatgctcaccttgcgcagcagatcgtccgggatatccgccgggttcggcgaaccggtggcgaaatcaataatggtgtcgccgcgctgcgcccgctcggccgaggcgatgtcatggtaggtaaaccggttggaataatcagagaacaacaccgaccatggcggacgcacgacggttggctccgggccctgaaccgagcggctttcacgaatcgtatggaccgccgcagagctgctgccctggtccgtcgtcaagaaatcagtggaggtagcacgttctacgtcgccggaagaggaggcttgcgatgttcccatttctgccgacgatcgtgttgttcgcgttattgcattcccgaagtcactgtttgacgtgtgcggtgttcggcttgcggaggcagccggcagcacgaacgtgcctttgccgactttggaggcgataagaccttcgtccttgagctgctgatacgcctgcaacaccgtggtgcgattgacttcgagacgtgaggacagctcgcgttcgggaggcaggcggtagccctcggccatcgcgccggagacgatctgttcacgcagcccggcggccagctgccggtacatcggcaccttgctgcgtcgattcagctcaagctgcatggcagatcgtctccttgattcgtcagtcggataccagtctaacggcagacgaatcgactacagcgacaggaagagctcgtggatgcgggtatcgtccgtgagttccgggtggaaggcggtggccaggatattgccttgacgcaagcccaccacgtggccatcgacttcggtttcgaccgtggcctcagggccgaccgacaccacgtacggtccgcggataaataccagtgggaagtccgtgatacgctgcggatcatccgctgcaccaaaatcggcggtggcctggaaactaccgagctgacgaccataggcgttgcggcgtacgacggcgtcgagcgcgccaaagtagacattgtcgtcattgtcgagctttttagccagcagaatcatgccggcgcaagtgccgaataccggtttgcctgccttgatgtgggcggcgatcggctcgaacagtccggtcgaatgcaggagcttgccctgtgtagtggattcgccgccaggcagaatcacgcggtcgatggattcatcgaaatcctcggccgcgcgcagcagtttccacggcgcaccgagcttgtccagcaccgccgcatgttcggcgaatgcgccttgtacggccaggatgccggtcacgccgtgcttgacgttttcgacgtccgcggactcttctttggaaatatattcaacagctacaaccatgttgtcctctccggcttcgactcccgtcactcgccgcgagcggccatgatggtctgaatctcgtcctcgttgatgccgaccatggcttcgccgaggttttcggacagcttggcgagcagatcggcgtcctgccagttggcggtggccttgacgatggcggcggcgcgcttggccgggtcgccggacttgaagatgccggagcccacgaacacgccttcggcaccgagctccatcatcagggcggcgtcggccggggtggccacgccaccggcggcgaagttcacgacgggcagacggccgttgtcgtgcacgtacttggccaggtcgtagggcacggccagctgcttggcggcctcgtagacctcgtcgtcgcgcaaggccacgagctcgcggatctgcttgttcatggtgcgcatgtggcgcacggcctgaatcacgtcgccggtgccgggctcgcccttggtacgaatcatggcagcaccctcggcgatgcggcgcagcgcctcgcccaggttcttcgcgccgcacacgaacggcacgtcgaactggttcttgtcgatgtggtacacgtcgtcggccggggaaagcacttcggattcgtcgatgtagtcgatgtcgatggcctgcagaatgcgggcctcggcgatgtggccgatgcgcaccttggccatgaccggaatcgagacagcttcctgaatgcccttgatcatggccgggtcgctcatacgggagacgccgccggcggcacgaatgtcagcggggatgcgctccagcgccatcaccgcgcacgcgccggcatcctgcgcgattttcgcctgttcgggcgtggtgacgtccatgatcacgccacccttgagcatctgggccagattacggttgagttccgcacgattctgcgtcatgagtttcccttcgttcgacgctgcttggtatcgcgcttcattattgaacggattggattggcccacccaaaccagtccaatttggatggggccaatccgcaacttctgcacccatccaatccggcaaccggttgtatggccttatgcatccggcacgtattcgaagatgcgcgcaatcagtgggaggtattagccgacggtgttgccgtagatttgggcttggaggtctttacgggcggtttccatgcgggtgatctggccgaggagggttatcttctcttcgccgtcgggcag

SEQ ID NO: 3901 - DNA, 12845 bp, Unknown
  R22_24m  MAG No. k141_9862
ccctcgatgatatgcggttcataaccgatcttcttcgtgtattccatggtcggatggtcgtacggcaccagcacgcggtcgttctcgaccttgagactcaggtggcggttgcccagttcgaagcacaggcgtcccatttccttcatcgagttaaccggaatctcaatcagctgtgcggttttaatgcgtgcgaaatagcgcttgtcttcggtttcggcgagcacatcgccatccttgatggtcttgccaaccatgatgccgaactcggtgccgtcctcggccaccttgcgcatgcgcttcttatcggtttcgaaccagtcgaaggcaatcgacacattaagtttgccgtcgctgtactgctgactgatgatgttgccggtgatttctttggcgatcatccgttctccttggagaaaattgcttgtggcgtgagaatccccacgtccttcatgccacagtgtagagagcctgttgcgtcactttgtaacgaatgatcgaaatatgcaaaaaatatagcggaaaaatatccgaaaacacggaaaccggatatatggtacacggtgtgtcgctagtaattgcaagctattttgcatggttgtgcattagacgaatcacagttgtgatattacatatcacgttcctggagcgggaggttgtggtcgagctccgaaatcaacaaaaagagggaagttggatataatcgaagtacctgacaccgtcacattggcgatgcacattccggataatttcatttcgccgtccaccggggcgttgttctacgtcatcatgattccggtgtgggtgctgtgcctacgctacgtgatccgcaacagcacgccggagaagatggcctacctgggcgccggcgcggcgttctcgttcctcatcatgatgttcaacgtgcccacgcccggcggcaccaccgcgcacggtgtcggcggcgcgctgatcgctctgctgctcggtccccagtacgcgacggtcgccgtgtcggtggccctgctgctgcaggcgctgctcttcggcgacggcggcctgatcacgctcggcgccaactgcttcaacatggcgttcgtgctgccgtttgtggcttacggactgtacgtgttgctacgcaaggtgctgcccgacggctggaaggaacgcgtggccgaattcgtgtccggctatatcggcatcacgctcgccgcattctgcgtggcgctggaactcggcgtgcagccgctgctgttcaaagccgctgacggccaggcgctctacttcccgttcacctttaacgtgacgattcccgccatgctgatcccgcacctggccgtagccagcgtggtcgagggtctggtgaccgtggtggttgtcgaattcgtgcgccgtaccgcaccggagattatcgaagacaatgcccgtgtgaacttcgccgagaccgccggtgctgacggcaaacaggtcgcgcacgccggactgcgcaagtctgcgtggattgcgctggccgtggtggcggtgctttccccgatcggcctgctcgccaccggcgacgcctggggcgagtggggcgccgaggacttcatgagtgccacggggctcaactacgtgccgcagtacatcgcccatggcttctcgtgggatgcgctgttgcctgactactcgctgcagggtctgccggacatcgccggctacattctctccgcagtgattggcatcgccgtgctcactatcgtgttccgtctgctggcgctcgcggtgagcggcaacggcaagacatccgcgcgttgacgatacctgcatggatgcgtgagtcggaggattacgatcctccggctgacaagtcatccttcatcgaacacaacctagggcatttcggcagcgtactcgagcaggttggtcatgcgttgccgattgagtcgagcccggtcgacaaggtgctgggctcggtcaatccgggcgtgcggctgctgggcatactggccgcgattgtctgcgtcaacatcacatgcaacatgctgttctcgtacatcatgctggcggtggtgctgctgatgatggcgacccggccggcgcgcctgatgagggcgttgctcggcccggtgctggccgtatgcatcctgagcctggtcgtggcggtgccgagcctgctgattgggcagtacagtgcgccggtccggctggtggtgcgtgcgttcgtggcggtgtcgctggtgatcgcactggcgcgtacggtgccgtggaatcgcctgattgccggactgcgcgcagttggctaccctgattcggtgatttatatctgcgacgtgacgattcagttcatcgatattctcggtcgttcgatggtggagttgctggatgcgctgcggttgcgcagcgtgggccgcgaccggaccaagctgacgtccgccggccagttgatgggcgcgctgtttctgcgtgcgaatacgcaggcgcggcaaatggctgaatcgatggtgtgccgggggtttgacggtacgtatcatatccaccacgagcgtctgctgacgtggcgcaacggggtgtatgccgtgtgcattgctgcaatgattgcgctggcggtgtattcgggatgagggtggttcgaatgaatggagcccaataatgttcggattaaagcgtaatcataaacaaactgcagccatgcagccagataactcatggttccgcggcgacccgctggtcgaactgaatcacatcgacttttcctataaagattacggcgacgccgacgatgaaacctcgtcgcacgccgtgctacgtgatttttcgctgaccgtcgaacgcggtgagcgcgtggcgctgctcgggccgaacggcagcggcaagaccacgctgatgcgcatcatcaatgcgctggaatttccggactcaggcgagtatcggtttggcggtactccggtggttcgcgaggaagtcgaggcgaagaacagcctgttcgccaaagcgctgcatcagcgcatcggattcgtgttccaaagctccgacacccagctgttctgcccgtcggtggaagaggagattgcgttcggtccgttgcagatggggttgccggatgccgaagtacagcgcagagtcgatgacatggtgacgttgttcggcttggatcggatgcgggagcgggcgccataccgtctgtctggcggtgaaaaaaagcgtgtggcgattgcctgctgcatgtcgatgaatccggacctgcttgttctggacgaaccgaccgacggcttggacgagcgcaataccgacgtagtggttgaggtattgcgcgccttcactgatgccggcaagactgtgctgttctccacgcatcaccacgacatcgtggagcggctcgacgctcgcatcgtgcgcgtgcatccgtcactatggcaatgacattcacgtggcgtctattggatatcttcatcgaaaaaagcagaaaggcgtcggcgaggatcgcgggtccggcgagaactgcgatagtcgctttggtgatggttgccttcatgagagtttccccaaggtgttgacgttgatttcatgagattcgaaaaagagcgtatctaggccgaaccggacagtaagtcaacggtttctggaaaccagctgaaaaagctacggtattgtgaaatatgtctcatcggaatgggtcaagtttggcctagcgctcgcagtcgtgcgcgaagattcgttggattgattctcggtggattaagtcagaggaagaaactagacaccttgcggtgtaaaaccgggaatcggaatggtgtaaaaccgggaatggaaatagtgtaaaatcgggaatgagaaaggtgtaaaatctatattgaggtgattgggtagctgagaaaggccggaaaatgaacgatttgaacaatcgtagtgataccttgactcaacctgattatcgtgctcgcgtggtcgatggcaggttaggtaagttacttaaagcattcggcgcggtggaaatcgtcgggccaaaatggtgtggaaagacatggacggcgctttcccgctcgcgaagtatggatcgtctggatgatgccgctacctttgcggccgcacagactgatccggcattggtactcatgggtaatgaaccgcatttggtggatgagtggcaagatgtgccgcaaatttgggatgccgctcgtcgtcatgtggatgacaatgcgaatcgcaaggggcagctgattcttacgggctcggccattccgaaggaccgagaaacaattcaccacagtggcacaggtcgaatttctcgcttgcgtatgtggcctatgagtctgtgcgagtcagggcaatctaccggtgtagtgagcttgtctggtttgtttgatggacaattcgagcctgccgaatgtgcaaccagcattgaagatattgccagatggtgctgtcgaggtgggtggcccgcaaatcttgatttggatgacgagtttgctctggaaattccgagtgaatatatcaagagtgtgcttgatatcagcgtgcccaagatgaacaagaaccctgaaaccgcgcgtgcactcatgcgtgcgctcgccgtgaacgtatcgcaggcaccaaaatatgcgacgctggctgcggatatggcctatggcgatgagcgccgtgaaccggatacgcagacagtaaagagctatttgggaatgctcaaggacttgtaccttctgacggatttggagggttgggagccgccactccgcgcaaagagtcgtgtgcgaaccaagcccaagcgatatttcgtggatccttcgttgcctgctgcggttttaggtgccgcgccgaatactctgatgcgcgatacacagacgctcggcgatctgtttgaaacgctgtgcattcgtgatttgaatgtatatctgtcggccatgccgggcgcgaacaatcgcatcgcctactaccgcgatgacaaggggcttgaagttgatgtcattatcgagttgtctgacggcaggtggggtgctatcgaaataaaactcagtgaccttaaggtgaacgatgacaatgcggataagctcaaatccttccgcgacaaaatctgtggcaaccccatggcccaagttcgcgaaccagagttcatgatgttccttaccggccgaggtgggaaggcctatcgccgcaatgacggcatactggtcgtgcccatcgcaacgttcggggcgtgaatcgggtaaaagaaaagaagcgccgaaccgcgaaagcgcctgtcggcgcaagggccgctcgcggcggcaaaaaatggagcccggggcttaagcacggtccgacgcggatacttagtatagcttgcgatggggctcgccgcgccgggggaggtgtggtgttggctggtagctgattgttggggtgcggttggtgggtctctccctcagtcacgggcatcgcccgtgacagctccctcatcagagggagcctggagcagggctactccaaccgtccgcgacgccagaggttggcaccgtgctggaaatccttggcggtggccatgaggctgccggcggtgtgcataaggcgggcggctttggtgcgcacggccttctcatcggcatccgaggagaaggcgccgttggcctcggcccgggtcaccatacgccgcgcctccacgcgcaagcccaacgccaccacatcggtaaacgccgccgcacgctcaagcgccacggcaaaatcgcccacaaaagcaccggagagaatcgaatcggccaatcgcacgatgtcatcttcactgggagcctgatccacgccggcgatggcggaggcggtagtggccaccggctcacccaagcgccacagatgcgcgatcgagtcgcgattcgatcgcatccacgtacgcaacatatacagtcgccacagcacaccaggcagcgaatccggctcggcatcgctccatagttcggcgatttcatccacgccgaccgtctccaccaacgtgagcacccgctcaacaaccgccgggtcttcgctatggcgcacacgatccagcaatgcggcagcagacagatgactcatctcgctcaacgcctgcgggtccatgccaccggccaatccatcggccacagccgggtcgagctgagccgggcgcgaggggcgtgaagaacccatgcgagcaggtccgaatgccgctccggccgcacgcaacgagccgaagcccgggcccagactgccggcggcaccattgtgcgcggcatgagctgcagcggcagcggccgaggagttggatgaatcaggaaatgcgggtctagtagacaagcggttgaaccttctgaatatcgatgattttgggaccatgaggcgtcggagtgacgaacagcgccaccgccgtgccggtcggcatgaacggtgtcttggcgatcaggcgtttgctcagagacggcgcaacgcacatgctgcgcaggtgtccgaacataccaccaatcaccggccggtgcatgcatatcgctatgggctgacggcgctcaagtgcgaactcgatttcgctgagtagacactcccatgcggtgtccggcgcagcggcgtatgcatcttcggtgagcggatcgagatgaaccatgtctcgtccggtctgccacgcgaacatctccaacgtctcctggcagcgcacccaaggcgacgtggccagtcgggtcggattgaaacacgccagctcgcggttcagcgcgtatgccgcagccgcgccgcgcggcgtgatcggacggttcgcgtccgaacccttccacagcttgcgcgcttccgctttgccgtggcgcacgataatcaccggcaccgcgtccagtgcaccttcttcgacccgatcaacgaatagcgcgaggatgtccttatcggtggaatggctgagcttcttgcgggcctcggccggcgtcagccacaaaacttcgtcgatttcgccgatgtccgcccgatgcaccgggccaaacgcatgggtgcgccgcaggttgtcgatggcgctgatcggcgtggccatccagaactggatatgcttggtatccgccgaccgatccttggtatggcgctgtttgctgccttcttcggacagcgggtactcgatgtcgcccagataagggccaagttccacggacaggcccgattcctcgccgatctcgcgtacggcggcatgccggtgcgattcgttcgggtcgaccttgcctttcggccagctccagtcgtcgtatttcgggcgatgcacgacgcacagttcgatgcggttgagtacgttgtccgccgcggccgggctgtcggcctgcgccaggtccggggtgggagccgcgtccgatgcgccgtgtgctgccgtggccttgccgtcagaatccgtggtgttcgcgatgatggtgccatcggtggcaatattggatttcgctgatggagatgatgcctgcgtcggctcggcatcatccttccaccggtacagaataccgccggcggcttccacgattcgtctcatactgttcgtacccatctcttgtattgtaggtcacgttggaccgctgctacgtagttttgcgcgctgaacaacgatgcccggcatcctctcgaaagaggagccgggcatcgtaaccaccctcagtcagcttgcgttgacagggagcatcgagtgaaatcagttgtgcgaattggggcggcgctggtgcttgcgaatcagatattcctgactgtcgaccagcgggcggccctcgtcgtccttggtgtgcagcacatacgtgccgtcgggctgcatgtgccagctcatggtggagtcggccatctgcaggtccacgtacttgatgagcccgtcaatctgctccggggcggtgacacgcaccagagcctccacacggcggtcaaggttacggtgcatgaggtcagccgaaccgatgtagacctccgggccggaagccggaccctcgccgatctgcgggccgtccgcattgcagaaggcgtagatgcgggagtgctccaggaagcggccgagaatcgaacgtacgcggatgttctcggacaggccgggaacgccgggcttcagagcgcagatgccgcgttcgacgatgtcgatcttcacgccggcctgagaggcacggtacagggcgtcgatggtcttctcgtccacgatggagttgaccttgatcttgatccaggcctccttgccggcgcgggcggcgtcctcctcgcggcggatgcgctggattagaccggtgcgcacggtgcgcggggccaccagcagacggtggaagctggactttggcgcgtaaccggagagctggttgaacagacgagtcagatcctggccgaccaccgggtcgcaggtcagcagacccagatcggtgtacagtcgcgcggtcttcgggttgtagttaccggtgcctacgtggcagtagcggcgtagaccgtccgcttcctgacgcacgacttcgatgagcttgcagtgggtcttcaagcccacgatgccgtacaccacgtgcacgccggcgcgttcgagcttgcgggcccacgcgatgttggcgtcctcgtcgaaacgagccttgatttccaccaaagccagcacctgcttgccggcatgagcggcgtcgatcagggcgtcgatgatcggcgagttggagctggtgcggtacagggtctgcttgatggccagcaccttcgggtccgcggcggcctgcgcaaggaaggcctgcacggaagtggagaaggagtcataggggtgatgcagcaggatgtcgcgctcgcggatggcggcgaaaatgtcctgtgcgcgggaggactcgacctcggcgatctgacggttcgtggtcggcacgaacggacggttcttcaggtccgggcggtccacgctgccgagctcaaagagcacggtcaggtccagcgggctgggcagacggtatacctcgtcctggcttacgccgagctggtcggcgagcagctgggagaggaacgggctagtggtgtccgtgatctccagacggatcggcggtccgaagcggcggcgcagcagctccttctccatggcgttgagcaggttctcggcgtcatcctcttccacgtcgatgtcctcgttacgagtcacgcggaaggagcgggcttccttgatgatcatgcccgggaacagggattccagatgcgcggcgatgagcttttccatggcgatgaagccgtaacgctcgtccttggactcctcgtcggtcatgtcgtccaccggcaccaggcgcggcaggttgcccgggatcttgacacgggcgaagtgcgacttgccggaggccgggttctccacaatcacggccaggttgatggaaccgccggaaatgtaggggaacgggtgggccggatccacggcgagcggcgtcaggaccgggaacacctgctggcggtagtaacgcgagagacgctcctgctcggaggaggtgagcttgtcccacgtcagcaggacgatgcgctccttctccaattccggcagaatggtgtcgatcgcgtaatgtgcgtgctcgtcttgcagacggtgtgcggtctcgctgatcgcgcgcagctgctgacgcgggctcaggccggcggcagacggcacggcgatgcccgagtcgatacggcgcttcaggccggcgacgcggaccatgaagaactcgtcaaggttcgaggcgaagatcgcggcgaagttggcgcgctcgagcaggggcatgtcttcgttctccgcgcattcgagcacgcgctggttgaacttgagccagctgagctcgcggtcgaagaaacggtccttgggcagcggtgcctcgccttcctgatcgacgcggcggtcgttgttgtcgttttcggcaatatgctctgcgatttggctgcgcagaattgccttcgagggtgcgtcaaatatctgtgccatagcttatatcgtaagctctggcgtggccggaaaacgactgaacgcgccagaattcaacgggtgttcatgttagttcggtgttggttggttttgagtgtgctagcgtgctcgcgacacgccgtgagcggcggtgaaacgaacgaaaccgaacatcagacgggttcgatgtgaacggttcagctcgttttccgatagtcagaaagtgcgattgaacagttgtgataaaaaacgcacaacgactctctgcaggttgcgagaaacgggagtgatgaatagattatgaggtacaagaacaactgaacagagcagagcccacaaatagtgtatggtcacgaggactgttacgttggacgggcattggaaagacttaccgttacgacgatgatgttgtgcagagattctgctccagtagttgaacttgtagaaaaggcccgctccggcgggccttttcgtttgtgtgtacagtggagggcatgacggaaacacagcgtacgccagaggggatgtcgtcgaaaccccgtatcaagccggccgatgccgaagacggccgcccggtctctatctctgcgcgtctcggacgactgcaattccactattccggcaagttccgcgtgctgcagattgccgacattcaggatgggccgaaagtctccaaagacaccatcgccctgattgaggccagccttgatgccacacggcctgatctggtgattttctccggcaaccagatcgccggctacgatccggcctttgccaagagcttccgcaaacgccgttggtgcgaagaggcgattcctgaatctgcgttgaaccatacgcgtgaattggtgcgcaaggccatcggtcaatttacctctcctttggcgtcacggggcataccgtgggcggtgacctacggcaaccacgatttccagtgcggtttgagcaatgccgaactcgacggaatctaccgcgagtttcccggttgcatcaatccgccgagcgatgcgctggccaagcagaccgtatatatgtgtcataaggacggctcgcctgcggcaaccaatggtgaagaaaccgatgcgccgatttccgcgtccaccattcccggcacttttgcattgccggtgatggatgtggattgcacgcgcaacgtactgggactggtactggtgaattccggtgactatgcgcatggaggcggtttcggcacgccttcgcccgagacattggccttcctcaaggctttgcccgaacatatcggagccaaatcaatggtgttccagcacatgccgctgccggagtattaccaggtactcaaaccggtggccgccaatgcggctttcgccatgcagggctaccgcaagcatgcggatacctattatgtgctggacgaggatcgcactcaagccggcgggtatctgggggaaggcatttcctgcccggatgagtcggacgagtttgaggcgctgcgcgaggggtatttcggcgtcgtagctggtcatgatcatcgcaacggtttcgtcggcgaacatgagggtctgttgcttatcgctacgccaacctgcggattcaatacgtacggaccggctccggccaaacgtgccacgcgattgatcgaatttgatatccgtcacccttacgagccgcgtacgcaattgctggagtttggcgaactggtgggcaagcccagttccaaacgcgcctacacctatgcggtgaaccaaaccgcgcctggcgagggcgagggtgatgatttgctgcgcaagccgtcgctatggagccaactgtccggtttattcaggtaacccggtttattcaggtaactgttcctgatagaagcggaaagcggcgcgaagtattcgtatacgcgcgcggccggaggcgcggccgtataccggttccatatcccggcacaaagatatgccgacatatgatacaagtgataacatttgttgaataaagggttacgttttcgcgtttagggacgtgtgcttcggcgcgcattcaaacaagcgcatcccttgcggtcactatctcacgatggttcgcgcgaagcgatgaaccgtcagtatgtgcggagttctggtatggtcacacgtttaacgcggttggcgacggctgtcgcgctggtcgtcggcatgatcgtaccggtcgccacggccgccgccgtcgatggggggggggttgtcgatgccgcgcaacagacgccggcgtgcggacgtccttggaatcaggacgaacaaggcaccgtcgttgattctagccagccttccggccgattggtcggctgcatcagcaatgccgcagtgcaatatcgattgcagaattcgacgcaatggcagaacgttcccgtggatgaacacggcaatgtctcgttcgattacagcacgaaaatagcccaattccgttttgacgcgcaattcgtcatacccaaaggaagcatcaccgaagacaaccacgtgttccgataccacatcgcgggattcaacggcaccggtaccgccatgtcgggcacgctcaacgacgatctcggcacgtacacgatcgctccagacggattggtgaccatcgtcttcagtgagcacgccatcagcaagaacgccgccgccccactggacaatggccgattgtacatcgaagccgatcgcaacaaggtgaccggcaataatccagggcagaccgtattggatttcggcaacggccataccaccaccatcaccatgtaccgcagaagcggcagcacctccaagcaggtcgtcggcacgccgacgctgcaaccggacggaacgctcagtaccagatggcaggcgcaatacgtcaacacgggaaccatcgaccagccaatcgtgaagatcgaggattggatggcgtatgagaacgttgcggaacagaacggttccacctcgtcaagccgaggatggtacacggctgagaacatcaacgatctgtaccaaacgttgaccacaacgatggggcacggcacgttgacggtatataaggtcacgctgccgaactacaagggcggacccgccgtcacatggccggccgg

SEQ ID NO: 3902 - DNA, 7504 bp, Unknown
  R22_24m  MAG No. k141_9884
cgtgccgattcccgaagagaagcgcctgccgaatatgaccgtactgtcttgcgcaccgctgctggccgcgggtattcgctccgtgttcgaggaaggttccgtggcgattctgctcgacggcctgcccgaggacatgcgtccacgcaatatctatgcgtgattgatacgccgaaaatccttacgaaaaaacgccgcttggctattgatcaagcggcgttttttcgtatagctccaatcagatgaaggcgcgctcgccgaagatggcggtgccgacgcgcacgatggtggagccttcttcgatggcgtaggccatgtcgtgggtcatgcccattgacagttcggtgcagtcggccgtgccttcggcaccggaggcaagaatctggtcgcgcgtgcggcgcagatgcgcgaagcccgcacgaatcgtgcgctcatcatccacatgggcgccgatagtcatcaatccctgcaagcgcagtccgcccatcgcaccgatgcgctgagccaagtcgatggcgtggctgggtgcacagccggacttcgattcctcgccggattcgttcacctccagcaacacgccgaccgtgatgccgcgcatggtggcacggcgggcgatcttttccgccagttcgatggaatccacggattcgatggtgtccactaccggcagcaccttgccgattttattggcttgcaattggcctatgagatggaagggaatgtggtgggcagcatcggccgcggcgcctccctcggtctcaaccacgcccaatgaatacccacgttcggccagcagccgggccagtcccggcgctttgacgataatctcctgcggccggttttcgccgatgcagcgcacgccggcgtcgatcgcggccaggatctcacccacgtcacgggtcttggtggcggccagcagccgcaccgacccgctcctgcgaccggcgacggcctcagcctcggcgatacggtcgagcacccgatgcacgccatcggcgatctcattcgcgcgcccgcgctcgatgacctcgttcgtcaggtccttatgctccatgtatgccatcattgctgtcctccccggtgaatcgacattccatcatacccatacgggaaggcgttgcgccggcgcctcatcgcttcttggttttgcggccctttaagtagatgtcgatgacgatccatacgccgagggcgaaggccacgacgtagcccatgaagccgatgaccggaatgccgaagataatcggcttcatgccggcgtagtagacaatcgacgagccaacgaacaaaccgaccacaatcagggccatcgtcagacgattcaccatatccgaaagcagctggaacggctcttcggagccgaccagttccatgttgacgcgcaactgaccacgggtcagcatacgggccacggtcttgagttcggtcatggtgccgagcgtggcatgcaaagcctgatgcccctcaacgcccagcgacttgatctcgtctttggtggcgttcttcagcgatttcgacgtggcgatatggtcggaaatgatttcgatcatattcacatcaggaatgaactcgtccagcaagccttcgagcgtaaccaacgcgcggccgacggtggtcaccgtactgggcacctcgatgttgtggcggccggccatctgcgtcagtgcggtcaggaaagcggcaatgtccagttcggccagatccacggtgccgaattccttgacgatcacgtccagatcggccaatagcgcgggatagtcctccggatcggcctcggtgccggcaaatcgcagcagcccctcggccagagcgggcgaatcctgtttggcgacggcgaaaatcatttctttgaggactgcacgggtgcgctggtcgagccgaccggtcataccgaggtcgataagtacgatctggccgccccggatgaggatattgccgggatgtgggtcggcgtggaagaagccgtcgtcgagaatctgtgtggcgtaattgtcgacgagcttggtgccgatctccttcaagtcataaccggcgtcgatgagctggcccgggtgggagacagagatgccgtcgatgtactccatgaccaccacatgctcggtgcacagttcggcgtacaccgtcgggcagtccatgtatttgaatcgggcggcgaaacgcttgaattcggcgagattgcgggcctcgatcagaaagtcagtctccgattcgaaggtgtcccacagctcctcgaccacgcccttcagatccacgatctgcgaggtgcgaatcaccttagtggcggccttggctatggagcgcatgatggagacgtcctgggccatgatttcgcgcacacccgggcgctgcactttaatggccacatcttcgccggttttcagcgtggcgcgatgcacttgcgccagtgaagcagagcccaacggcttgggatcgatatgcgcgaacacctcgtcggcgggacgcccgtattcggcggcaagcacatccaacaccgtggaatacggcatcgggtcggcgtcggcgcgcagtttggcgagttcgtcgcagaagctttgcggcagaatctcggagcgcatcgacagaatctggcccactttgacgaacgtggggccgagcgcctcgaacatgaggcgcatcttgaccggagtcaggccgtgcagcacgtcgaattgctcgacgattctggtgatctgccccagtcgtttgatcttgccacggcgcgtcagatggtagcgcgtggcgaaatcgttcctgcgtccgaacaatgccagcgtttcgtcggatacgctcggagtcgccttggtaacggcccgcttgagcgtgtccggcgtgtcgacggaccggttcgccgccgcctcacgttcggctttcgcaggcgtcagaatagggtcgaccctgctggaaagcggggtcgactctgattccggcgtagtgcgtgtgagcttggtcactcggccttgccctcgtcggcgggcttgtcggcggcactggtgtcggctgcggcagcagctttgtcgccggcttcggcggcggccttcttggcgtcatccaccgtctcgctcaccttgcgcttgagctcggtgttcagcgccttgccctgctcgaccgtaatctcacccttcttgacgagttcgtcgacgagctcgctgctcttctcatatccggtggcaagggctccgatgcccgccagcaggaccttgcgcaggccatcacccagaagatcaaaatcagccatgatacccctccttcgaggtccgacatggcctggtgccatgtctcgtaccaccaagcctagcgcaaacaacagggcaatgtactagaccctcagactgatttcgactgatttttcgctgattggtacttaccgaggactcaccgagaattcaccgaggacgttcggcggcagccttgcgcgcgttggtggctacttgatcaagccgggcgagctccttggcttgttcgggggtctgatcggacgtatcgaacgtaccgtaacgacgagtcacggcggtttcgataaggaaatcgctgatggcggggtttttaggcagcaacgagccgtgcatgtaggtgccgatcacgttgtgcacgcgcgcgccctcggtatggtcttcgccattgttgcctcggccgtcctgatcgacggtgccgagtggctgaacgccttcgcgcaggaaggtctggccggagtggttctcgtagccaatcacatcgccgaactggtcggaatgctcaacaagattgccgatcatacgcacgttctggcccacggtataagcaccgataacgccgatgccgtccagacgggtgccgtccacggtttcaaagtactcgccgaacagctggtacaggccgcagatcatcagcatcggcgtaccgtctgcggcaagcgagcgcagcaggtcggcgcgatggtagaagtcgtcgatgattttcttctggccggtgtcttggccgccgcctcccagaataaggtccacctggtcgggccagtcgtcgccttgattgtactggtggacgaccggttcgtaaccgtacagttccagccggcggcggatagtcagcacgttgccggaatcgccgtagatgttcatgtctttgggatacagggacaccacatcgattgttctggccatgtcacgttctccttgtcgatgtcttcccgctaaggggaagtcttattcctcaccatgtcctcctgcaggcgggaggtggcgcgcgggcgctagagggtggttacttgcccacgccagcgtcccgtacttcggtgatgcggcccagtacggcgcgggttttgagcatggcggtgtaggtgcagtagatgtgcttgcgtgtgccgggattggcgttgacgaatgcggtgaccgcctgttcgaggtcggtgttcgtatcggcgactggcacttggtcataccccaagcgcaatgccatgtcccaggcgcgcacgccggagaccatggcgacaccggacgcgcgcaaagaggtgaagtccacgtcccatagccagctcatgtcgcggccgtcggcatattcgtcgttgatggcgatcatggtgtccgcgttggccgggtcgaagctggcgagcgagaggcggaagcccatcgggttcttgaccagcagcagttcgaccggggaaccgttgacgtcgatgacctcgccacggccgaaagccggcgtgacgcgggaaacggcggcgatgagctcgtcggcggacacggcgcaggcgttggctgcggcagtggccttggatgcggcggcattgtcttgcatcaccgcacgtaccacggcgagcgcggcggccgcgttgtacaggttgtagacgccttcaagtttgacgtcggtggcgtagtcctggctgtccatctggaaggtggccttgtggtcgcccacggcggtaagtgtcacgtcggcggggagttctgccgtgcctgcggaagctcccctctccgaggggagctgtccgcgaagcggactgaggggagtactgactgaagggagcggcccggccataccttccaccgacacggtcgtggccatgtcgtcatcggacgggaaatagtggcgcaaatcgtcggcgaggccgaagtatcgcactgtggtgccagccggggccttcgcggcgagcgcggcgatacgcgggtcctcgcggttcagtaccacagtgccggtagtcgccgcagccacatggctgagcagtttggccgtggtgtcgatttcaccgaatcggtcaagctgatcgcgcatcacgttcagcagcaacgcataacggggcttgacctgcttgacgaagtggacggcgtacgcctcatcgagctcgagtacggcgatgtccgcgtccaatttgccgccgaaagtgacttcggtgagcagtgcggagaccacgccgcgcacgaagttcgagccggtcggattggtgaacaccttcaatcccagatcggagagcatcgaggcgaccatgcgggtggtggtggtcttgccgttcgtgccggacaccaataccacgccaagcggcaactgcccgagcgtacgggtcaggaagccggggtcaatcttttctacgactttgccgggcaaagccgaaccgccatgtttggtgacgcgggatgcaaaccgcacgaagcggcctgcggccacggtggcgaacgcataccacggtttgcgggtctgcaccacggacgattggtcttgcgaaacatcgcgtgaaacgttgcttgccatcatcacaccccctgattgctgttgtagtcctgcgacatgtccttgaatttggacgtggcaccgaggaaggcgaggtggaaggtttcggtcgggccgttacggtgcttggccatgatgatatcggcctcgccggggcggtcttccttgtcgtagaagtcagggcggtggaccaggaacaccacgtcggcgtcctgttcgattgagccggattcacgcaggtcggagagctgcggcttcttgtcgttacgcatttccgggccacggttcagctgggaaagggccacgaccggcacttcgagttccttggccaagagcttcagggcacgggagaattcggacacctcttgctgacgggattccacggccttgcccgaggtcatcagctgcaggtagtcgatgactacgagtttcagatcgttggtctgcttcagacgacggcatttcgcacggatctccatgaggctcatgttcgggctgtcgtcaatgaacagtggcgcattctgcatcttggtccagaactggttcagggtgttccagcgttcgggggtgatgtcgtcggcgcggcgcagggcggccatcggaatattggtttcggcggagataatacgctgagcgagctccaccttgctcatctccaagctgaagaccacggaagtcatgttgtggtgcaacgcggcggcgcgggcgaagtcgatgccgagcgtggacttacccatggccggacgtcctgcgacgacgaccatctgtccgggctgcaggccctgggtcacgtcgtcgatgtcgcggaatccggtcggcacgcccttgttgacgagaccctgctgcagtttgtccagctggtcgagcgcgtcgtggaccaccgggccgatggcggcatagtcctgacgcaccttgcccatcgacatctcgtagatctcggactgggcgaggttaaccacatcctcagcctgcgatccctcggcggaataaccgagctgggcgattttggtgccggcggcgatcacattgcgcaaaatggcccgctgatggacgatctccgcgtagtacatggcattggcggcggtcggtacggatgcgacgaggctgtgcagatagtccgcgccgccgaccttgtcgaggttgccgtccgccaacagctggttggccacgagcaccacgtccaccggctggctggcggaaaacagatcaatgattgcgttgtagatcgtctggtgcttgggctggtagaaatcggtgacgtcaatggtctgcgaaacttcgccgatggcatccttactcatcagcatgccgccgagcacggccatttccgcgtcgtcatcgtgcgggggcacgcggtcgaaaatcgggtcgccagctgccgccgcctgcgcgccgccccggcccgcgcggtcgccacgatcgccacgatccgagccactgccgaacccattctgatacgagtgttcacttccttctgccatagccctcaagtataggaggtggcgtggcgagcggaagatatcgcacgactacgttcattaggtcgattcctcactcattaggtcactgtgcttggtaacaccacaaaccatgcgcttggaatggcggcattctgaggcgctcgatcaatatctctcaaagtccaccgacctaatgaatgcacaatcgacctaatgaacgcatgaaagtgcaagtcgtgccgaatcatcgcgcaccaatttcatcgttggttcaccttgcggtcagcgcggcgacacgctgaagcgtcaaatgtggatagaaaaaatagttatccacattttggggataa

SEQ ID NO: 3903 - DNA, 32849 bp, Unknown
  R22_24m  MAG No. k141_9938
gacgaacgactcgagcgcctctaccggcaggcatgggaaaggagcccgcaaggccagtacgagacgttcggcatccccgcaagatacggcaccggcatcgactggaacgagttccacaccagggtcgaatggcagtcgaacgactagaccgccggacacacattttggcctataaccccgaataccgccccgtactttgctgttttgaaacacggggagtaaatggcggaatcgcaggtgaaagggagtaaaacggcaaagaaaaagcctccgtcccaacgtgggaacgaaggctcgattgccgtatgtattcatcgccgtcgctggcggctttgccgcgagtcgcatacgaaacgaaactcagcggcacagcggcactcgaaagcgcaggtaagccctatcggctcactcccattcaattgtggccggcggcttggacgtgcagtcgaggacgacgcggttgatctggcggcactcgttggtgatgcgcgtggagatcgtggcgagcacatcgtagggcacgcgagaccagtcggcggtcatggcgtcctccgagctcaccggacgcagcacgatgggggagccgtaggtgcgctcgtcgccttggacgcccaccgagtgaacgtcggcgagcagcacgaccgggcactgccagatgtcacggtcgagaccggccttggagagctcctcgcgggcgatggcgtcggcctcgcgcagcaggtcgaggcgctccttggtgatctcgccgatgatgcggatacccagacccgggcccgggaaaggctgacgccagacgatttcgtcgggcagaccgagctcggtgccgatggcacgcacctcatccttgaacagagtgcgcagcggttcgatgagctggaacttgatgtccttgggcaggccgccgacgttgtggtgggacttgatgttggccgcgccgtcgccgccgccggattcgacgacgtcggggtagagggtgccctgcacgaggaacttgacttccttgccgcgcgcgccggcctcttcaagcacttggcgctgggccttctcgaacgtgcggatgaacttctcaccgatgatcttgcgcttgcgctccggctcggagactcccttcagggcctcaaggaagtcgtcggccgcgtccacggtgatgagcttgatgccggtggcggcaacgaagtcgtgcttgacctgctcgacctcgcccttgcgcagcaggccgtggtccacgaacacgcaggtgagctggtcaccgatggccttgtgcaccagagcggcggccacggcggagtccacgccgccggacaggccgcagatcacctcggcgtcgccgaccttctcgcggatcttcttgacttgatcctcgataatcgaggaggcgtcccagtcgttgggcagcgcggcgcaacggtgcaggaagttttcgataagcttctggccaagcggggagtgcttgacttccgggtgccactgcacaccgtagagcttgcgggattcgtccgccatggcggccacgggcgcgccttcggtgtgggccagcacttcgaagccggccggggcctgttcgaccgccacaccgtggctcatccacgtggtctgctcggcgggggagtcggcgaggatgccgtcggcgtcgtcgatggtggctgaggtcttgccgtattcgccgagagcggccttatccaccttgccgccgagctcataggccatgacctggaagccgtagcagataccaagcaccggaacaccggattcgaataccttggtatctatggtcggcgcgccgggctcgaacacggaggccgggcctccggacagaataatcgccttcggatccttggccaggatctcgtcgaccggcatggaatgagggaccagctcggagtacacgcctgcttcgcgcacgcggcgggcgatgagctgggcgtactgggcgccgaagtcgacgacaagcacaggaccgtttgccattgatattcccctaacgttcattggaattttacgtgggctgaacacccctgattatcactggtcaaggcgacaaggccgacacgcagggactatgtgcgcaaatcgaacaaactacatgcctgtagtcggacaacacgccgatttcgaacatgggaaatcgaacgtgcgctgttctagccagatgctagatttccgcatgcttccgccgttctgaaaaagtatgttgaaaaaactaatgttgacaaacggtcagttgaaccgcacaaatactgaaatttccgtaacaatttcgaacacacccgcaagaaatcgttcaaaagtcgcgttgtcctcgtaccatgacgattgattgggaacggaaaaccttggcaccgcaagggtcaggaaccgtgaccgaacagaaataatcaatcgcacgatcacgtgcaggagtacaggagtacacatgacgagtcctgttattggcaccccttggaagaagctcaacgctccggtttccgaggaagccctcgaaggcgttgacaagtactggcgcgttgccaactacctttccatcggccagatttatctgcgttccaacccgctgatgaaggagcccttcacccgcgaagatgtgaagcaccgtctggtgggccactggggcactacccctggcctgaacttcctcatcggccacatcaaccgtttcattgctgatcacggccagaacaccgtgatcatcatgggcccgggccacggtggcccggccggtacctcccagtcctacctggacggcacctacaccgagaccttcccgaagatcaccaaggacgaagctggtctgcagaagttcttccgtcagttctcttacccgggcggtattccgtcccacttcgctccggagaccccgggctccatccacgagggtggtgagctgggttacgctctgtcccacgcttacggtgccatcatggacaacccgagcctgttcgtcccggccatcgtcggcgacggcgaggccgagaccggcccgctggctaccggttggcagtccaacaagctcgtgaacccgcgcaccgacggtatcgtgctgccgatcctgcacctcaacggctacaagatcgccaacccgaccatcctgtcccgcatctccgacgaagagctccacgagttcttccacggcatgggttacgagccctacgagttcgtcgctggcttcgatgatgaggaccacatgtccatccaccgccgcttcgccgagctgtgggagaccatctgggacgagatctgcgacatcaaggccgccgctcagaccgacaacgtgcaccgtccgttctacccgatgctgatcttccgcaccccgaagggttggacctgcccgaagtacatcgacggcaagaagaccgagggctcctggcgcgctcaccaggtgccgctggcttccgcccgcgacaccgaggcccacttcgaggttctcaagaactggctcgagtcctacaagccggaagagctgttcgacgccaacggcgctgtcaaggacgacgtccttgccttcatgccgaagggtgagctgcgtatcggtgccaacccgaacgccaacggtggtgtgattcgcgacgacctgaagctgccgaacctcgaggactacgaggtcaaggaagtggctgagtacggccacggctggggccagctcgaggccacccgtaccctgggtgcctacactcgcgacatcatcaagaacaacccgcgcgacttccgcatcttcggaccggatgagaccgcttccaaccgtctgcaggcttcctacgaagtcaccaacaagcagtgggatgccggctacatctccgacgaggtcgacgagcacatgcacgtctccggccaggtcgttgagcagctgtccgagcaccagatggaaggcttcctcgaggcctacctgctgaccggtcgtcacggcatctggagctcctacgagtccttcgtccacgtgatcgactccatgctgaaccagcacgccaagtggcttgaggctaccgtccgcgagattccgtggcgcaagccgatcgcctccatgaacctgctggtctcctcgcacgtgtggcgtcaggatcacaacggtttctcgcaccaggacccgggtgtcacctccgtcctgctgaacaagtgcttccacaacgatcacgtcatcggcatctacttcgcgaccgacgcgaacatgctgctggccatcgccgagaagtgctacaagtccaccaacaagatcaacgccatcatcgctggtaagcagcctgctgccacctggctgaccctggacgaggctcgtgccgagctcgagaagggtgccgccgcttgggattgggcttccaccgccaagaacaacgatgaggccgaggtcgtgcttgccgccgccggcgatgttccgactcaggagatcatggctgcttccgacaagctgaaggaactgggcgtcaagttcaaggttgtgaacgttgccgacctgctctccctgcagtccgccaaggagaacgacgaggctctgaccgacgaggagttcgccgacatcttcaccgccgacaagccggtgctgttcgcgtaccactcctacgctcacgacgtgcgcggcctgatctacgaccgtccgaaccacgacaacttcaacgtccacggctacgaggaggagggctccaccaccaccccgtacgacatggttcgtgtcaaccgcatcgaccgctacgagctgaccgctgaggccctgcgcatgatcgacgccgacaagtacgccgacaagatcgacgagctcgagaagttccgtgatgaggccttccagttcgccgtcgacaagggctacgaccacccggactacaccgactgggtgtactccggcgtgaacaccgacaagaagggtgccgtcaccgctaccgccgctaccgctggcgacaacgagtgataacacctccacggtgttgttagttcgctaacgccaaagggctcgggatccgtcccgagccctttgcttattcataagccccctctgacgaggaggctgtcatgcgaagcatgactgggggagagaaaagcggaagcgaaggcgagagccaagactgaaaacagcccataaattccccaccccaactaatccttaaggatgacaactccccatcaattcaatcctgcgcatgatggaaaccacgccattcctccataggcttggaaccagtatccgggcacgaggctcggagccagccatgggggagagcacatgcagaaggatcagcagcagaccgcaatcatacaaccgttggacgctaccgacaccgtggaatcaagtgtcgacgcccttgcccaaggcgaggcggagaacgcggaagtcgccgaattcaaccgattaatgcgcgaacgtgagacgcgcaagaaaaagcgcgtggtgcatcgcatcatcgccgtcgccgtcgtggcggtactgattatcggctttatggtggtgcacgcgattattaccccgtcagatgggggcgtgtctccggtatccacggcaacggtggaacgtggccatttcgtcgaccaagtcagctccaccggttccatagaacccatcaactccaccgtcgtcgccccgcagatcgacggcaccatcggcgaagtcaaggtgcaggaaggcgcaaccgtcaacgccggcgacgtactgtttaccatcaacaacgacaagctcgatagcgacgtgaatcaggccgatctggctctgcgagcagcgaactcaaaccttaatgccgcccagcagcaggtgaaccaaatcaatgcgaccataggtcaggcacgtaatcaggatggtgaggaaggccaagccgctgccgatgatgcggccggacagctgcccgctgcacaaagcggcgtggagagcgcgcaggtcgccgttcagcaagcacaagccacctatgacgaggcggtcgcccaagccaacaagcgtacggtcactgctccggtctcgggcacggtgctgaccatgagcgcggtgcccggtgccgccatcggagcttcctccgatggctcatccacttccgccggcgcagacggtaaaccattgtgtcagatcgccgacctgagtcagatgaaggtcaatgtcaacatcaatgagctggatatcactaaagtggccaaggaccagagcgccaaagtcacgttctccgcggtgccggggctgacgctcgatgccaaggtggataccatcgccagcaccacgtcgcagttggctgattcctcggcaggcgggcagagtggcaacggcggcgtgggatacgccgtgcgtctcatcattcccgcccctgatccgaaactgaagccgggcatgacggccagtgtgaaaatcaccatgcagagcattgacaacgctttgatggtgccgctcgccgccatcgtggatgagggtaaggagagcagcgcggtcatgctcgagaccaacgccgaaacccatgagttcaagcgggtgcgagtcacggtcaaagccaagaacaacaccaaagccgttgtggaaggcaatgtgagcaagggcgatgtcatcatgcttgatggcgcttcggctgccgacaatactggcgatgctgcttcttccacctcgcaaaccgcggcttcggacgaaagggcacgctgatatgttcccgtttcgttccgacgcgagccgggcaaatcgcggcaaacggcgtaatgagaccattgccgtgcccaccgccacagccaacgtcatcgaggttgaaaacatcaaccgcatcttcgagacaggcgacacctacacccatgtgctcaaaggcatcaccatgaacgtgcgccaaggcgagttcctcgccatcatgggaccatccggttccggcaaatccacgctgatgaacacgctgggcctgctcgaccgcccatcatccggcacctaccgcctgtgcggcatggacgtgcagaatctgagtgatgacgaacgctccgaactgcgcgggtggctcatcggcttcgtgttccaatccttcaatctgctgccgcgcaccagcgtgctgcgcaacgtgatgctgcccctggcctattccgactgcccggtgcgtgaacgggaagggcgtgccatcaaagcactccaatcagtggcgttgagtccggaactgttcgaccgcaaaaccaatgaactctccggtggtcagatgcagcgcgtggccatcgccagagcgttggtacaggacccgccgctgattctcggcgacgagccgaccggcaacctggactccaaaaccggcgatgcggtgatgcacacgttcgaacagctcaagcagcaaggcaaaaccatcgtgctcatcacccacagccccgaagtggccgaacgcgccgaccgatgcctgcacatgcgtgacggcgtactgcgtgaagggatgtaccgatgagaacacgggatctgctggcggaaaccggctccgcactgagggcgaacaaaggcaaaagcgcactgaccattctcggcatcgtcatcggcattgccgcggtgattaccatgacctcactgatcggtggcattcgagactctctggtcggcgaactgggtatgaacgcggcgcgcacgatttcgatttacacggacgtcggcacccttgacgacgaacagatcactgcgatgcgcgaggaactgaccgactacgagtacttctcgccgacgaactatggtgccgcctcgtcaatcgccgcgcccggtaccaccgacaaggtgtcggcgagcatcaccggtgtcgacgagcatttcttcgatgtatccggagtgacgattggtcgtggacgggccttcacatcgagtgaagcaacgagtggtgcaatggtggtgattctcgacgggcagggcgtgcagaagctgttcggcagcgcggacattgacgccatcggcagaaccgtcacgcttgacggcaatgaagcaaccgttgtgggtgtggtcgagtcgtctggattgatgggcggcatgggcggcgacagcgtgaatatctatatgcctgccaccactgtggcgctgcggtttgcgtcctcgaacatgggatacatgcagatctacggactggccaaggacggggttgatatcgaccagctcacggaacagacgaagaccgttgtcgctcgcatcatgcgtatcccaaccgaacagatcgaccagaatctgtcggtcgtaagcgcccaatcctccatcgaccagctttccagcttcatgagcgcattccaggtgctggcgggttcggtggccggggtctcgttgctggtgggcggcatcggcattatgaacatgatgctcaccaacgttaccgaacgcatccgcgaaattggcctgcgccgggcattgggtgccactcggcgtgacgtgaccgcgcagttcctcgccgaatccattgcaatcacagtgcttggaggtcttatcggcacgttgatcggctacttgctgtcgttgggcgccgctggattggtgtccggcatcgccggtggcatgagtatcgcgccagcagtttccgtgcagtccatcggactggcagtgggcatctgcatcgctgtcggcgtgattttcggctactatccagctaggcgcgcggcaaagctcgacccggtcgaagcgctacggcatcaataatcgcgtagcaccccgaaatgcagtagggcattgcgcacaccgtcgtggtccacgtcgtcggtgatgtaatcggcggcggcctttggctcggcggtcgcattgcccatcgcgaccccgatgccggcgtaggcgagcatatccgtgtcattgccgccatcgccgaaggccatggtctgcccgcgcgtgatgccgtaatgcgccatgaaccgctggatgccgcgcggcttgccgccatcggccggaatcagatccgtgaaatccggatgccaacgcaccccgcgcacattgctgcacagtcccaccagttcggcctccaactcgggtccgacaaagggactgatctggaaagtctcatgatccagcgcgcgggtgcgcgggtcctcaaaataccgggtcggtgcggttttgcccagtttgctccacgtggcgcgaagcagatcattggactggttgaagtacacgtaatccttctcgccgaaattgcacaccacatcggggtgacggtccagccagtcgagaatcacctcaatatcagcagtatccaaggcctgcgaggcaaagaagccggtgtcatcaaagcaatactgcccattgaacgccaccacgccatcgaacgtcaccggcatggtatccagcaccacgtgcatctgtgaaggcgcgcggcccgtgcaaatcagcaccttgacgcctgcggcctgcagccggtgaatcgcctcgattgtggaatccggcaccgtatgggtcgtgaaactggtgagcgtgccatcgatatcgaagaatacggctcggatatcggcattggcagtatcggtagtcatagcttccattgtcaaagcccctctcgacgtgctttccggcgtgtttggcacgcctatagcgggttatcaaacgcacgaatcccggccattgcatgcgcgccataaaagacacctatacggcaatcggccattttccgtcactttcgcggttcaagcgcgttatggtgttacccgacatcaattttggagagaggaaatccaatgacagcagcaacccagtcggcaactccggccgctcctaacaataacgagccggtgcgtgtgaaccacaccgtccgcaacgtcatcatcaccatcgtggtcgtggcgattatcgccgtggccgcgttcttcggctaccgcgcgtttgccggtgccaacgagtcgtccgccaagggcagcaagggcaacccggtcaagatcggcgtggtcggcgctaccaaccccgaatgggtcaagttcaagcaggacgccgagaaggccggcatctacgtcgacatcgtcgacttccaggactacacctccgaaaacccggcccttgactccggcgagctggacctcaacgaattccagcacctgctctacttggccaactacaacgtgagcaacaagaaggacctgcagcccatcggcggcaccgccatctacccgctcggcgtgtactccaccaaggtcaaggacatcaaggacctgaagcagggcgacaccgtcaccattccgaacgacgaaaccaaccaggcccgcgctatcggcgtgctcaaggccgccggtctcgtgacgctcaagggcgactggaccgccttctccactccggccgacatcgacgaagccaagagcaaggtcaaggtcaccccgctcaaggccgaacaggtggccaccaccctgaaggacccgaccatcgccgctggtgtgatcaacaacgactacgtggccgacgccggtctcaacccgaaggacgccatctaccaggatgacgccgaatccgaagaagctcgcccctacatcaacgtgtgggtggcccgcaaggcggacgtgaacaacgagacctacaagaagctcgtttccatctaccagcagaaggatgtgctcgacgccctgcaggagaactccggcggtaccgcggtgttcgccgacaagttcagcgccagcgagctgcaaggcttcctgtccgacattgagaaggacgccaaagcccagcagtgagccgtggctgatacgagtgcacgactaacctgtccatagccattaccaccaagcggagcgagtacccgagccaacaatcgggattcgctccgcttccgtgaccggacatcaacaaccagcatcagggagcactatgagcgaccccatcatcaccttcgaccatgtcgtgaaggaattcaaaacacgcggacgcggcgcgaacatcgcacgagccgtggatgacgtcagcctgaccatcgatcgcggcgacatcttcggcatcatcggctattccggtgcaggcaaatccacactggtccggcttatcaacgcgctcgaacgacccacctccggcaccgtgaccgtgctcggcaccgatatcacctctttgagtgagaccaagctgcggcccatccgccagaaaatcggcatgattttccagcagttcaacctgttctccaccaaaaccgtggcgcagaacatcgcctacccgctgcaactcgatcactggcgcaaggactatcaggatcgtcgcgtcaacgaacttctcgaattcgtgggccttagtgagcacgcaaacaaatacccctcgcagctgtccggcggccagaagcagcgcgtcggcatcgcccgcgcactggccactaatccggagattctgctcgccgacgaagccaccagcgcgctcgacccggaaaccaccaccgaagtgctggccttgctcaagcgtgtgaacgaggaattcggcatcaccattgtgcttatcacccatcagatgaacgtggtccagcagattgccggccgcgtggccgtaatgagcgccggacgcgtggtcgaatccggcgacgtatacgacgtgttcgccgcgccccagcagccggtgaccaagcgattcatcgccaccgccctgtccggcctgcccgaggaagaccgggtcgagcgattgcaccacgaatggtcgggccgcatcgtcaccgtgctcatccgccaaaaggacgtttccggcagccatggccacgaactcaaggcatccggacagaacatctccgaactcatctccaaatacggcgtcgaatccagcctgctctacggcggcatcgacacggtcaaggggaccgccatcggtgccatcacctacgaattcaacgggcccggctggcacgtggacgaattcctgcgcgagctcgccgccaatagcgacgtcattgacttcggcaccgccgcaaagcccgtggcttacgccgacgcagttgccggacatgcctcctacgccgaagaccgcgcccatgacccactggcggccgatactgccaccgcgcccgctgtatccgccgccgcacatgaaggagacaacgcatgatcatcctcgccaactcgcgtagcgactggaacgtgctgcgcccactattgttcgaatccatcggccagaccctgaccatggtgctcgtcaccctcgtcatcggcggattcctcggcctgatcctcggcgtggtgctctatggcacccgccccggcaacctgttcgagaacgcggtcgtctaccgcatccttgacatcatcgtcaacatcgtgcgcccgattccgttcatcattttcctggcagccatgcagccgctcaccatcgtcgtggtcggcacgtccatcggcaccgtggccgccatcttcccgatggtggtcatgtgcaccttcgccacttctcgtctggtcgaacagaatctcgtgccggtcgacccgggagtaatcgaggccgcgcgttcgatgggtgccggcaagctcaccatcatccgcaccgtactcatccccgaagccctggcaccgctgatcctggcctacgccttcctgttcatcggcgtgcttgacatgtctgccatggccggctacatcggcggtggcggtctcggtaacttcgccatcgcctacggctaccagaagttcgaccagaccgtcacctggacggccgtgatcatcatgatcgtactggtccaggtggtgcagggcatcgccaacgccatcgccaaacgactgctcaaacgccagcaataacaaggcatactgaccccatagatcgcggccctcgccaatatgaagcgagggccgcaatatattcttcgcgctactagaatcgggaaccatgagtgaacatatcgacatcgaccacgaactcatcaccatccgccactacctgcacgcccatccggagcgtagtttccgtgaattcgacaccagcatctatctgaccgaccagctcaaggcgcacggcatcgagatcctgcacaacccgctggagactggtgttgtggggctcattcagggcgaggccggtcccgggccgcgtatcgggctgcgcgccgacatcgacggcctgcccatcgtggaagactccggactggagttcagctccgtcaatgaaggcgtgatgcacggctgcggccacgacctgcacatgaccggtctgctcggtgccgccttctggctcgccgagcaccgtgacaagttcgccggctcaatcaagattctgttccagccgagtgaggagaccggccaaggcgctcgcgccatgatcgacgccggactcgtggatgacgtcgaagccattatcggcacgcacaacaaccccaactatgcgtccggccagctggccatcggcgtcgagccgatgatggccggctgcgtgaaattccgcgtgaccctccacgcccaaggcacccacgccggctacccgtacaagggcaccgggcccatcgaagcgctcgccagtattattctgagcctgcagaccatcgtgagccgcaacgtcacgcccttccacccgctggtgctgtccgttaccgaagtgcacggcggccatgtgtggaacgtggtgcccgccgaagccggattccaagggactgtgcgctatttccacaagtcggatggcaatctggtcggccgccgattcaaggaagtggtggaacacaccgccgaggcatacggtatcagcgccgatgtggtctgggatgatttccaagacccgctggtctccgatccaggtcttgccaaggccgtggcggcggatgtcaacgactacgcgcagctcgaaccgatacgtcagtcgatggcgggggaggacttctgcgaattcgccaaggtgacgttgccggtgttcgcgttcgtcgggtcaaacggccaggaaggttgcgccgactggcatagcccgcatttcgtgggtctcgacgaatccattcccaccttcgtcaacttctacgtcaacgccgccctgcgcgtgctcaacgagctgaggtaaatccttttttggctcccctctggaggctgaggcgttaggcagacagcccaatgggctgtctgcagccgaaggtgaggcgacagccgaaccagatatgcgcgggcctcgcccgtccataagtgcaggacgagctatcagcgaagctgactgaggggagtggcattcgttcattaggtcgattcatcgtccattaggtcggtgaacggcgatactggttgttggaatcgcgccattgcaacgactgatatcgcattgcagtgacctaatgaacgcaaaaacgacctaatgaatgacgccaagccggaagaacaggcaatccgacgccatacgcggctacactaagaagctatgacacagcttcgcttcgcactcgcccagatcgacacctgcgtcggcgcgctcgatgccaacgccgccaaagtgctcgactactcccgtaaagccgccgcagggaatgcccaagtggttgttttcccggaaatgaccctcaccggataccccatcgaagatctggccctgcgccgcaccttccgccaagccgcatgggacaaggccaacgaactcgccgcccagctcaacgacgacggcctcggcaatctgttcgtggtggttggcaccgtgggcactgatcgtaagacctccaagccgcgcaaccgactggtggtattgcatcagggcgtggtctgggccggctacgacaagcacttcctgcccaactacggcgtgttcgacgaattccgtatcttctccgccggcgaccgttccgtgaccctcgacgtggatggtgccaccatcggcgtggccatctgcgaggacatctggcaggatggtggcccggtggccgacctggccaccaagaacatcgacctgctgctcaccatcaacggctcgccgtatgaggaaggcaagaccaacacccgtttcgagctcgcccagcgtcgtgccgccgaagtcaacgccccggtcatctacctgaatcaggtcggcggtcaggacgacctggtcttcgacggtggcagcttcgtggtcgatgccgacggcacgcttatcgaacgcggcccgatgttcatggaaaacctgacgttctgggacttcgattccaccgccgaacatcaggtcaaggccgagatcgttccggaactcgacccggacgaagaggtatacactgcctgcgtgctcggcctcaaggactacatggccaagaaccacttcaccggcgtgacgctgggcctctcaggaggcatcgactccgcactggtagccgccatggcggccgacgcatgcggcggcgagaacgtctggggcatctccatgccctccatgtactcctccgatggttccaaagacgacgccgctgacctggcctccaacatcggtgcccattacgaggtccagcctattgagccattgttcaacgcctaccaacagcaacttgaccttgatggcgtctccgccgagaacctgcaggcccgcatccgcggtgtgatcgtgatggccagttccaattctcgcggcctgctcgccgtggccaccggcaacaagtcagagctcgcctgcggctactcaaccatctacggcgatgcggtcggcggctacgcacccatcaaggacctgctcaagacccgtgtctgggagatcagccgttggcgtaacaaggccgcggccgcaggcgtcggtatcggcgggctcaagatcgtgggcaacgaggacggcaacgccggcatcccgttgaaggacggcgtgatgattccggtctcatccatcgagaaggctccctcggccgagttgcgccccgggcagaaggactccgactccctgcccgaatacgcgctgctcgacaaggtgctcgctgcatacatcgagcacgcgcacggccgcgccgacctgttggccgacggcttcgaccaggccaccgtggacactgtgatgcgattggtggaccgcgccgaatggaagcgccgccaatacccgttgggaccgaaggtcacggccctcgcgttcggccgcgaccgccgactgcccgtcaccaacgcgttcagggaataaacatatattgctcccgccagcgggagcaagtaataccgttgaggaggtaccaatgacagacgataacaagaagcagtggtatttcaacaccgtcaagaagcaggccgagctgggcatggtctcaccgattgaacagcgcatgggcccgtacaagaccaaggaagatgccgaacacgcctgggacatcgtggtggaccgcaacgccagatgggaggaggagaactggcgctggaagaactacggtgtgaaatccgcgcaagcgaacgatgaagactgacggccaaaacagacggatacggttctgctgtcaatctcaagaccgaaccgctcaccaagccgctcatacgaacatcacagtatgagcggtttcccatatctggagacgtgcaatagtcccatcaatacctagaaaccattggaatggtagcgttcacaaaaaacaatgtgagatagctcactcccaatttcggcttttcccaagcaagtgccaactacactgttgaaccaagggttccgtgaagatgcgaaacctacaaccccatttaaggagtgacatgaccgcagtagaaaatgcagctgtctcccaagaggagctcgacgccaaggcatgggccggcttcaccgagggcaactggcagaaggatattgacgtccgcgacttcatccagaagaactacaccccgtacgagggcgacgagacattcctggctcctgccaccgagaagaccaagcacctgtggaagtacctcgacgacaactacctggccgtggagcgcaagcagcgcgtctacgacgtggacacccacaccccggctggcatcgatgccttcccggccggctacatcgactccccggaagtcgacaacgtgatcgtcggcttgcagaccgacgtgccctgcaagcgcgccatgatgccgaacggcggctggcgtatggtcgagcaggccatcaaggaagccggcaaggagccggatccggagatcaagaagatcttcaccaagtaccgcaagacccacaatgacggcgtgttcggcgtctacaccaagaacatcaaggtcgcccgccacaacaagatcctcaccggtctgccggatgcctacggccgtggccgcatcatcggcgactaccgtcgtgttgccctgtacggtgtcaacaagctgatcgccttcaagaagcgcgacaaggactccatcccgtaccgcaacgacttcaccgagccggagatcgagcactggatccgcttccgcgaggagcacgacgagcagatcaaggctctgaagcagctcatcaacctcggcaacgagtacggcctggacctgtcccgccctgctcagaccgcccaggaagccgtgcagtggacctacatgggctacctggcctccatcaagtcccaggacggcgccgccatgtccttcggccgtaactccgccttcctcgactgcttcatcgagcgcgacctcgaggccggcaagatcaccgagaccgacgcccaggagctcatcgacaacatcgtcatgaagctgcgtatcgtccgcttcctgcgcaccaaggactacgacaacatcttctccggcgacccgtactgggcgacctggtccgacgccggcttcggcgacgatggccgtccgatggtcaccaagacctccttccgtctgctcaacaccctgacccttgagcacctcggacctggccctgagccgaacatcaccatcttctgggatccgaagctgccggaaggctacaagcgcttctgcgccaagatctccatcgacacctcggccatccagtacgagtccgacaaggaaatccgttcccactggggcgacgacgccgccatcgcatgctgcgtctccccgatgcgcgtgggcaagcagatgcagttcttcgccgctcgcgtgaactccgccaaggccctgctgtacgccatcaacggcggccgcgatgagatgaccggcatgcaggtcatcgacaagggcgtcatcgacccgatcgccccggaggccgacggcaccttggactacgagaaggtcaagaacaactacgagaaggcgctcgagtggctgtccgaaacctacgtcgaagcgctgaacatcatccactacatgcacgataagtacgcctacgagtccatcgagatggccctacacgacaaggaggtgtaccgcaccctcggttgcggcatgtccggtctgtccatcgccgccgactccctgtccgccatcaagtacgccaaggtgtacccgatcaccaacaaggaagccaagaacctcgaaggccacgagtacgagtacgtcgaaggcgccgacgacgatctggtcgtcggctaccgcaccgagggcgagttcccggtctacggcaacgacgacgaccgcgccgacgacatcgccaagtgggtcgtctccaccgtgatgggccaggtcaagcgcctgcccgtctaccgtggcgccgtcccgacccagtccatcctgaccatcacctccaacgtggagtacggcaagaacaccggttccttcccgtcccgccacaagaagggcaccccgtacgctccgggcgccaacccggagaacggcatggactcccacggcatgctgccgtccatgttctccgtcggcaagatcgactacaacgacgctcttgacggcatctcgctgaccaacaccatcacccctgatggtctgggccgtgacgaggacgagcgcatcggcaacctggtcggcatcctggacgccggcaacggccacggcctctaccacgcgaacatcaacgttctgcgccgcgagaccatggaggacgccgtcgagcaccccgaaaagtacccgcacctgaccgtgcgcgtctccggctacgcggtgaacttcgtcaagctcaccaaggagcagcagctcgacgtcatctcccgtaccttccaccagggcgccgtcgtcgactgatgaccaaccccgcgaaccgcggcaatgactaactgaaggggtggggcacggctccaccccttccttattttccacagactttcgcatcatttggaacaggaggacaactatgcccgcaacacccacgttccgcaccacgaccaggcatatgctcaaggaatcgaagacctatgcctcgcagactttgatgggcggcctttccggctttgaatccccaatcggactcgaccgacgtgaccgcctttccgccctgaaatccggcgatatcggcttcgtccactcttgggacatcaacacctccgtggatggaccgggcacccgcatgaccgtgttcatgtccggctgcccgctgcgctgccagtactgccagaacccggacacttggaagatgcgcgacggcaagcccgtctaccttgacgccatgatcaagaaggtcgatcgttacaaggacctgttcaaggccacgcatggcggtatcaccttctccggcggcgaatccatgatgcagcccgccttcgtctcgcgtgtgttccatgccgccaaggagatgggcgtgcacacctgcctcgatacgtccggcttcctcaacacgagctacaccgacgagatgctcgaggacatcgacctgtgtctgctcgacgtcaaatccggcgacgaggagacctatcacaaggtcaccggcggcaccttgcagcccaccatcgattttggccagcgactggccaaggccggcaagaagatctgggtacgatttgtgctcgtgccgggcctgaccgactccgaagagaacgtcgaaaacgtggcgaagatctgcgagtccttcggtgatgccgtcgaacacatcgacgtgctgggattccaccagcttggccgcccgaagtggcacgaactgcgcatcccatacccgctggagaaccagaagggacccaacgccgccacccgcgaacgggtagccaaccagttcaaggaccacggcttcaccgtgtattaaattgcagggccgaaccgcgcgtaaataccacgattcggcccgttcgcccataccctagagatatggccgacatctacgcatttcctatgggagcgtccaacgacggacgccccgtacgccctcagggtgtgccggatgaagtatgggcagctgtcgaatccgtcagcaccatgaagcgcatccatgacgtgcgctatcgggagattcccgtgccttccaccttggccgattatggtatcggcgtggaattcgaagcgggagagcgtgccctcggcgatgccttttccgccggtcttggcaacgatgccgaatcacgaatcgccacaggctggatcatgatgctttatgctcatgagctgcgcattgaccgggattccaactggcgttgcgtggcgttcgcgcgacttccgctggaaaccgccgaaaacgattctctgacccccggcatgtactgggatgacatgtgcgactatttcgacggcatcgagccggattcggtatccggcacagtcaccgtgacccaaaacacggcttttggttcgatggccggctccaccagcgccgggtgtgagattcgcgtctcatggaccccgcttgacgggaccggaccggacggtactatggacgccggcgcacaaatccgctcgtgggccgcattcatcagatccaccatccgttttgaggaggatgacgccagttgagtgacgtccgtgacaccgaaccccgactgctgaaagagcctcgcgggggagtgcccgatgtcacttcgtcgctggatggctatcatcgtgcctgcgatgcgctggccgaggcgacgggctcgctggccgccgacgccgaacgggcgtccggattccgctatggacatgaggattggctgattcagttcaaacgtgaaggtgcgggcatcgccttgcttgatcccgtcgccctgacacgggccggagctgactggaatgaattcaatgacgccgtgggcgatgctacatggattctgcatgattctctgatggacttgcccggattcgccgaaatcggactcaaacccaaggccttgttcgacacggaaatagcggcgcgattgctcggcctgcaccgcttcggtctggccgccgtcaccgaacactacctcggcatcacgctggccaaagagcattccgccgccgattggtcctaccgtccgctgccgcgcgactggcgcaactatgcggcgctcgacgtggaggtgcttatcgaactcgaaaccttgatgcgtcgtgacctgaaagccgcaggcaaggacgagtgggccgctgaagagttttctcacgctttggttgcgggccttgccccgcgcaaacctcatccgattccttggctgcgtatctcgcgcatcacccagctgagtcgtgatccgaggggcttggccatcgccaaatccctatgggaggagcgcgaccggctcgcccggcgatacgacatcgctcccagcctgttattgaccgattcgtcaatcatcgaggccgcgaccaacaagccgcacaatgccgcccaattccgcgcactccgatccctgaacgagcgtgtgcgcattcataccggcaccgagcaggacaaaatgttcgagcggtacgcgccgattcagcgtacggtcaagccgaaggtctggaagcaggccatcgaccgcgccatggccctgaagcccacccaatggcctaccatgcccgcccccgaacaggacgaaaacggtgtggtgaacgcgccccgatccatgcgactgtggcaacagcgccatccggagcgttatgaccgtctgcagcgggtacggcgtgtgatcaaccgcatcgccgaagacacccgcacgccggccgagatgatcatcaagccacagatcctacgcaacctgtgctgggtggaagacccggtggaagtggacgtcgagacgttcctgatcgagcagggcgcaagaaactggcaggtgaaactcattgcaccgtccgtaagtggcgttatcatgtagaggttgccttacggcagaactgtaagaaataacgacttttgaggagtcattagcgtgaagatcagcgttcgtaacctcgagcccaccaaggtgaagctcaccgtcactgttgaaccggaagagctcaacccgtatctggatgcggcccgtaaggaaatcgccaagcaggtgaacgttcccggcttccgtaagggccacgttcccggcaagatcatcgaccagcgcatcggtttcgccgccgtcgccggtgaggccgtgaacgacgcggtcccggagctgtactccaaggccctggatgagaagaagattcgtccgatggctcagccggagttcgacgtgcaggatgttccgcagtccgccaacgacgaaaccaagctgaagttcaccgccaccgtcgagcgtcgtcctgacatcgaactgccggaaatcgacggtcttgagatcgccatctccaagccggaagtcaaggatgaggacgtcgacaagcgcctcgagaccctgcgtcagcgcttcggcaccttggtcggcgtggaccgcccggccgccaagggcgacttcgccaacatcgacctgactgctgagattgacggcgagaccgtcgactcccaggaaggcgtgagctacgagctcggctccaacaccatgctcgacggtctggacgaggcccttgacggcctgtccgccggcgaggagaccaccttcgaaggcatgctggaagccggcgagcacgagggccagaaggccaccgtgaaggtcaaggtcaactccgtcaaggctgaggaactgccggagctgaacgatgagttcgcttccgaagcttccgagttcgacactctggacgagctcaaggctgacatccgcaaggctgccgctcaggacgccgaaggtcgtcaggccaccgaggctcgcgatgccttcatcgccaagctgcaggaaggcctcgagatcccggtgccgaagggtgtcaaggccaacatggtcgaagagcagctcaagggcatgaccccggacccggagaaggccaccaaggagcagaaggctcaggccgaggagaccgtggagaaggatctgcgcgatcagatggtgctcgacgccctggccgagaagctggacgttcaggtgtcccagtccgacgtgttcaacttcctcgcttccatcgcccagcagtacggcatggacccgaacaacttcatccaggccatcatcaagaatggccagcttggctccgctgtgcaggaagtcggccgttccaagggtctgctcgccggcatgcgcgccgtcaagttcaccgctgatggcgaggttgtggacctctccggcttcctgggcgaggccgctgaggacgaagagtccgagtccgtcgaggccgcttccgctgctgccgccgtggccgacgaactgtccgccaaggatgacgccaaggacgctgagtgagcatagcctcatcgcgttagcgtgattgtttgagcccggaatcgtgtttcacggttccgggctcttcctattctggtaaaaggactatttctttggctcccctttggggggagctgtcgggcgtagcgagactgaggggagttcccaaggcatactcgttgcatagcgtgcggaggttgacatgcagccaacggttactatcaaacgccttggttggctcgctgcggcgaccattgtgctcggcgtgctcatcggtgtgggagcaggtctgctgaccctgttgctctacggcgttgaacatgtgctgctcggctacatcgaaggcccagaattgtctggtccattcggcgtgcccgctgcacgccgtgtgatatcggtgaccgtgggactcggcatcgcgggcattatctggtatctgctacgacacaaaacgactgtggtgccctcagtcaagaaggccgtggcgggagagcgaatgcctttctggcaaaccattgtgcatgtggtgttgcagattttcatcgtcggctccggtgcctcgatcggccgagaagtcgccccacgcgaactcggcgccatgatcgcgcaacgtttttgcgacctgttccatatcgagggcgttgatggtatcgaccggcgcatggtggtggcagtggctgccggtgccggtctaggaggcgtctatgacgcgccgctggccggcatgttcttcgccgtcgaaatcctgttggtggatgtgacgatcgaaaaggttgcgtttggactgggcgtgtctgccattgccgcattcgtggcggttgcgatcaaagggcattgcctgttctacgacatcaccgccatgcaaccggaatccacgccaacgttaatgctgttcgctctgatctgcggtgcggcatgtggagtaggcggcgcattgttccgaaaaggttcgcaatgggcggaagcgcacaagccgaccggcaaggccattctgtggcagatgccgctggctggtctcatcaccggtttggtggcgattgttgtgccgcaggtgatgggcaacggccgtgccgcagcgcaacttggattcagcacgttcattcctgaaaccgccggcactgctggtgccatgcagtcggcatcttcagcggccgcctctccatggaacttgctgacgggcggcggtaatgtatccgattcggcctctggcgggggagcgggctctggaatggcctcgttttgggccatgcttcagggtgggagcggctcttctggatccgtgatgaacgccggtttcccgctgtcccagtccaatatctggatgttgctgggtgtgttggcactcacctttgtcgccaaggcgctggtgacgctgatgaccattcgctccggtgcatcgggcggtgtgctgcagcccggcatcgcattaggttccacgctgggtgcgatgctcggcctcgtatggatactgatgtttccgactgattcggtaaccgcgtgtgccttgatcggtgcggcttcgttgctttcggcctcacagcaggcaccgcttatggccatgtgcttggtgatggagctgaccgaagcgccgattaccttcttcgtgccagtcggcatggccgtggccacgtcgtcgttgatatcaaagtggttgctgagtcgtaagtaagtaaatgcatatattctggctcccctctctgaggggagctgtcgaacacagtgagactgaggggagccgaggtaaagaaagctatgtcagaaaacaccgaagtccgtgcggcacttgaatcgcttgccgctgagccgctcactgagcagattgactactatcgaaagccattcatggtgttgtgggccgccattcaggaggccgccagcgatgtggccgaagactacgacttgcctgcggatatggcccaattatgggtggccgaacagatgcgccaagtcgccgattcactggtcgatcggctcgcggaaaaagccgtggcccatggtgccagcaagtccaacgtggcgcgagccgccggtgccagccccgccaatgccgcccgtcgcttcccgcgtctgggcgacgatgccgcctcccagacccgcctcctcattgacgacgtcctcgacaccttggaataacccgaaatccctacgctacccgccaaaaagcacgcgaaaagccgccttcagtcgcttcaaggcggtagtctgaacaatgttcgagtaattagaaggagaatcaaggtgagcaatacctttgcgaccttgccggtcatggcgggcgatgacgtcccggccggccccgtcgacccgattttcaaccgtctgctcaaagaccgcatcatctggatgggtgaagaggtcaaggacgatatggccaaccgcatctgcgctcagctgctgatgctggccgccgaggacccgaagaaggacatctggctgtacatcaactcgccgggcggctccatcaccgcaggcatggccatctacgacaccatgcagctcatcgagcctgacgtggcgaccgtgggcctgggcatgtgcgcttccatgggccagttcctgctgagctccggcaccaagggcaagcgttacctgacctcgcacgcccgtgtgctcatgcaccagccttccggcggcatcggcggcaccgccactgacgtgcgcatcaacgccgagctcatcatggacatgaagaaaaccatgagcgagctgaccgctgagcagaccggccacaccctcgaggagatctaccgcgacaacgaatacgaccactggttcaccgcccaggaagccctcgactatggcttcgtggacaagctcgtgaccacgccggacaccatcggcaacaaccagcagggggagtgagactcatggcaagtgaagaagcaaagttcgccgcccgtgccgaccgcttggccggccgtcatggcgtagccggtttcatgccggccgccgcccgcgcagcccagcccgcgccgaccaaccgttacatcatgccgcagttcgtggagaagaccccgtatggcatgaagacccaggacgcctactcccgcctgttcgaggatcgcatcatcttcctcggcgtgcaggtggacgacgcctccgccgacgacgtgatggcccagctgctggtccttgaatcccaggatccgaaccgtgacgtgatgatgtacatcaactcacccggcggttcgatgacggccatgaccgccatctacgacaccatgcagtacatcaagcccgacgtgcagaccgtgtgtctcggccaggccgcctccgccgccgccattctgctggcctccggcaccaagggcaagcgcctgatgctgccgaacgcccgtgtgctcatccaccagccggccatcgaccaaggattcggcaaggccacggagatcgagattcaggccaaggaaatgctgcgtatgcgcgaatggctggaggagaccctcgccaagcacaccggccaggatgtcgagaagattcgccgcgacatcgaagtggacactttcctgaccgctcctgaagccaaggaatacggcatcgtggacgaggtgctggaacaccgccagtaaaacttccgaacattgcaataccctcggtcggcaacgaccgggggtattgtatttcaaggatgacaatgataatgcgcagcgtggcggttcgacggtgcggcgcggtcggcaaaggagaatcatgggacgtgtggtgagctacaacgaggacgtaccccgttgcacgttctgcggcaaaaccgaacgtcaggtcagaaaactggtggccggtcccaacgcctccatctgcgatgaatgcatcgccctgtgcgtggacatcatctccgaggagcgtgtcaaagatgccgaggtcaattcgctgagcctgcccaagcccgctcagatcttcgattatctcaaccgctacgtcatcggtcaggagaacgccaagcgcgcattgtccgtggccgtatacaatcattacaaacgcgtcaatatggagcttcaggagtccgctgagcagcttgacgggaataacgggcacggtggccagaccggcaaacaagccaagcaatccgctcccgcccagacgcgtgctacccgccgcaacagtgaccctttggctgacgttgaggtcgccaaatcaaacattctgttgctcggccccaccggtgtgggcaaaacctatcttgcacaggcgttggcccgcgtaatgaacgtgccattcgtcatcaccgacgccaccaccctgaccgaggccggctatgtaggcgacgatgtggaaaccgtgctccaacgtcttctccaagccgcggatggcgacgtaagccgagcccagcacggcatcatctacattgacgaaatcgataagatcgcgcgcaaatcaggtgagaacacctccatcacccgtgacgtgtccggtgagggcgttcagcaggcgttgctgaagattttggaaggcaccatcgcctccgtgccgttggagggcacgcgcaagcataaggagcaggacactgcgcagatggacacacgcggcatcctattcatctgcggcggtgcgttcgtgggactgacggatattgttcgcaagcgattgggccgtcgagagaccggcttcggcgcgaattggcacgacgccgacatgaaagacgaggaattgctcgaacaggtcaatgccgatgatctggccgagttcgggctgttgcctgagttcatcggacgtttgccggtcaccagtgtgctgaaggaacttaccgtagacgatctgacggcgattctcacccagccagccaacgcgctgatcaagcagtaccgtaagctgttcgccgtcgacggcgtcgacctgcagttcaccgaacaggccattcgggcgattgctgatatcgccatcaagcaggggaccggcgcgcgcgggttgcgttcgattatcgaacgtacgttgcaggacacgatgttccagttgccgagtttggatgatgtgaagcaggtgattgtggacaaggcgtccgtagagggttccagtacgcccaaactcttgcgcgaagccgtggatgtgccgcagggacgcctcaaagttgcgtagtcggttttgcttgaccgagtccgtacacatgcggcgtgaggccagtaaatacgccgttgcggtggcgattaggatggtgcgactcgccgcaacacgccgagttgcattcatctgaacggcgtgtattatatatcgagttgtctgaaaagacaacatgcgccagtagcccagcggattagagcagctgactacggatcagcaggtcgcaggttcgaatcctgtctggcgcactcccgaaccacggggacaacagtggtatgcgccagtagcccagcggattagagcagctgactacggatcagcaggtcgcaggttcgaatcctgtctggcgcacagtaagcctcgaaagcgaaatgcttccgaggcttttccaattgtattggcccgtttgagtcggccacacaggggtggggtaaggttgcccttcgcgactcagcccggagcggaacgtcctgagatattccgtactattacatacgattcatccaagagagtacagcaaggagacgcgatggccacgaccgccggcgcgaagaagggactttggtccaccatcaggcgaatcgccgcctcagaccgtatttccggactcatcatgctcggcttcgcgctcaccggcctggtgctcgcgaacctgcccgccaccgcgcatgcgttcgagaccgtagcggaaacgcatctgttcatcccctacaccaatctcgacctgccgattggccattgggcccaggatggtctgcttaccatcttcttccttaccgtgggcctcgaactgaagcaggaactcaccaccggctcgctcgccaatccgaaagcggccgccgtgccgatgctgtgcgcggtgggcggcatgatcgccccgcccatcctgttcctggccgtcacggcattgttctctcagatcgggcctggtgaacccggcacgctgattctgaccaccaccggcagcagcattccgttctcggagatgtcgcacggctgggcagtgcccaccgccacggatatcgcgttctcactggccgtgctcgccctgtttgccaaggccctgcccggttcgatccgcgcgttcctgatgacgcttgccaccgtcgatgacttgctggccattattctgatcgccgtattcttctcctcgatcaacgcctggtattggttcatcggcatcgtcgtgtgcgccgtcatctgggcatacctcgtacgactgaaaaaagtgccgtggattgcggtcggcatcgtcggcgtcctcgcttggatcatgatgttcgaggcaggcgtgcatcccacactggccggcgtgctggttggcctgctgactccctcccgtgaaatgcacggcgaactttcaccgcgtgccgaacgctatgccaacaagcttcagccattctccgcactgctggccctgcccatcttcgccctgttcgccaccggcgtgcacttcgagtcggtgagcccgctgttgctggcttcgccgttggttatcgcactgattgtggctttggtggtcggcaaacctttgggcatcatcaccaccgcatggctggccacgcatgtgggcgggctcaagatggccaaggggctgcgcgtgcgcgacatgattcccgctgccgtcgcctgcggcattggcttcactgtgtccttcctcatcgcctcgctggcgtacaagaatgcggaactttccgctgaggcgcgcttcggcgtgctggtggcctccctgatcgccgctgcgatttccggtgtgctgctgagccgtcagtccaagagattcgagaaggccgcagccgcagcagcggccgatgcggaggatgacgaatcgattgatggcgatggcgctggtcagaccggtcgcaccacaaagtccaccacgcccacggaacaccccggcaccctcgccgacggcaccgccagtgtggagattgacttccgccactgatggcttagacgatccctactccattgttggccttgtttcgtgaaaaccgtacgctgaggcgcgctcaccgtacgttcttcacgagatgaggccttatttcgtgaaaaccgtacgctgagtgtcactcaccgtacgttcttcacgaagtcaaggatgatttcgcggaaaacgtatgcagagcttcaggcgctagaatgcgaagagtcgatagcaccgtacaggaggatattggatggcaaagaagcagaagaaatccaagaagaacgacggcaaaaaggccgctgaagcaaagaatccagccgaggccgcatccaagtccacagtcgtggacgatatggaaccattggaagccacagccgcgaatgatgcggcaacgttggaggccgagacggcaaccgaggctgccgcaacgccggtgaacccggtcgacttggaggacgtctcgccgctgggcgacacctatcatcgcggcccggtgattctacgcggccagatgattccctcggacaataccaccgccaatctgctgaaacccgaccaggacaccgactggctgcacatggacccatggcgtgtgctgcgcatccaatcggaattcgtggacggtttcggggcgctcgccgagctcggacctgcggtctctattttcggctccgcacgcacccagcgcaccgaatcgatctacaaggcggcccggcgcatgggtagccagatagccaagcgcaacatcgccgtcatcaccggcggtggtcccggcatcatggaagccgcgaataggggagcggcactggctggcggcaaatccgtgggactcggcatcgaattgccgcacgagcaggggttgaaccagtgggtgaacctcggcatgagcttccggtacttctttgtgcggaaaaccatgttcgtcaagtattcctccggcgtgatcgtgtgcccgggcggcttcggcacactggatgagatgttcgagctgctgaccttggtccagacccacaaggtggcgaatattccggtggtgctctacggcaaggaatactggcaggggctctttgactggctcaacggtccggtggccgagcacggcatgatttcggcaatcgacccgaaactggtcaccgtgaccgatgacgccgacgaagccgtggaggtggccgtcagtgcaattgtgaggtaagcgagatagagtggctcccctctccgaggggagccaagggcagagttactttttgtaggcgatgagcagacctgtgccgtcaggggtaagcgtggactcgaaaccttcgtcatcttcgacggtggtgagcagctcacgcatggcgatggccttgtcgctgcggtcggccggattaatcatgccgccctgaccgtcctccaacgccagcacatcagtgaacacgatcacgccgtgcgcgcgcagcagacgggaggcctgggcgaatgtggcggcatagttctcggcgtcgcccgccaccacgatcagatcgtaatcattggcgttgaggcgcggcagaaacacgctggccggggcgttcaccgcacgcaacgtggtgtcggtctcatcctgcagttcggcgaacgccttgcgaatcagcgcgatgccctgagcggtggaatcgaccgcagtcagcaggcccttgttatccagcgcatgggcgagctgcaaggtctccaccagcgagccggtgcctacggcgatgaccgaagcggcgtcggtgatgcgcaccagcatgcccagcagacgggcctgcgcggccgaaccctgcaactggccggacttgtcggcggccgtacgggcgtcggtcaacgcattggattcacgttcgcgcgcgtgttcctcggtgaattcccatgccttggcgaggttggtgtactgcgttctgtccataattcgttcctttatgtcttctctcgtgcgggcacccggtggatgtatcgactacgtgttgcagcgattgccgtagctggtcgtggcgcggcttagcgctcgcggaccttggccacgatctgccacatctcctcgcccacatcgatgccgcgcgggcagtggcgggagcaggcgcgcacggactggcaggcggccacgccgtcggcggtgtcgatggcgtccatacgctccatggccttggtgtcgcgcgaatcgttgacgaaacgggaggcccaaatcagcgaggccgggccgatgaaagcgtcgccgccggcgtacaccgggcaggcgccttcgcacacgccgcaggcgatgcagttgctcagcagctcgtatttggcgagttgttcggggttctgcaggtattcgaacacgtccaccttgccttcggcggtggtggcgagcacgccgtccgcctgaagatatggggtgagcttccttatttggttgagcatcgggtcgatgtcggcgatgaggtcgcgctgcggcgggaagccgggcagggatgccagttcgatgactcccagcgagccgtttgcggccgagtcctggtcggctgccgcgtttgcgtcgttttccgcggaatcgtcggattcttcggactcggtgccggtgtgccggaacccttcgtcatcgacttcggggatggcgccgggctgcttggcccaatcgcggatggtggccgtgcacagcagggtgggggtgccgttga

SEQ ID NO: 3904 - DNA, 9690 bp, Unknown
  R22_24m  MAG No. k141_10788
tccaaacatcttcggcatatgaagttccactccttgtatcgcgttacccgcaccatcgtagtcgttgtgctccaccctaggacccgactcggcaaaaaacgccacggaatctgctctaggaccagacaatggcattcccgagccacaccgaaccctacccaatcggacgaatcagcgaatcaggcgcgtcggccttgaatcactccacgggtgcagtgtatgccagctgtgccacgaacagcccatcatctctcgtgacgatttgcgcacggccgggaacggcacgcttcggcttgaccttgccgataagctgcccctcgttgggatcgccggacagcaaaataccggtcatgcccaaatcctggaacgattgcagcagaggatcatacatggctcggctggcaccaccggtacgccgggtaatcacgacgtgcaggcccaaatccgacgcttgcgccaaatatggtgccaacggcttcagcggattgccgcgactggtggcgaccaaatcgtagtcgtcgacgagtacgtacacttccgatccggtccaccatgaacggttgcgcagctgttccggggtcaagtccggccccggcatgcgggtcttgaggtaatccgcgaggtcgaggaactgttccgtggcagtgtcgtcattggtgatgtacgccccgagatgcgagtccggtatctgtgcgagattggctcggcggtaatcgaccatgaagatcttcgccttaccatccgggtagcctcgcacaatctcgtgcacgagaagtcgcaacagtgaggatttgccggatttggcgtcaccgaatgcgtagaagtgcggctctttctgcagatcgagcacgaccggtgccagcgcgttctcattaataccgaggacgacccttcctctggtcagcaattcggcggccttcggttgcttcataaccgcggaaatcatcggttcgtaaggaagcttcgtgggtagcaagcgcagctttggaccgggcttgcccttccacgcggcatgcaccttgttgacaagatcggcaatgccatccgacacggtggctgcctcgtgattgctgtcaatacgcggcaaaacggcaagcgtatgcagtttcgccgggctgagtccacggcctggcgcgcccttaggcacggtcgtcgcgatcctgcggtcgatttgggaatcgccgggatcgccgagacgcagttcgagcttggtgccgatgaggtcgccgatgttggctcggatttccatccaacggttggcgctaagaattacgtgaacgccgaaagtcaggcctcgcgccacgatttgctgcacctttggttccagctcatcgtaatcgccgcggaacacaccccatccgtcaatcaccaggaacacatcgccgtaaccatcatccacttggccggctgccctgcgcctgcgataagtatccatgccgtcgatgcgctgttctttgaagaaccgctcgcgagcgtcgataatgccggaaacctcggcgagcgtacggcgtactttctcttcctcattgcccgcggcaacaccgctgacatggtcgagtccttccagcgtggtgaacgtaccaccgccgcagtcgatgacgaagaactgcacctccaatggcgtgtgagacaacgacaacgaggtgacgatggatcgcagcatcatgctcttaccgctgagcgggccgccgacgaccgcaacatggccgccagcgccggacaggtcaagcgccatgacgtcgcgcttctgttcacgcggcttgtcttccaacgcacaaggtgccatcagcgcgccgcgcttacgccacgatggcgaaatcaggccatattgcgcagtgacggtgaggtccggcatgaactcgtccaaggtgttcggcacgaccagaggcggcagccacaccacgtgcgccggcctgcccttgcctcgcatctggtcgacggcgtactggaacgtcgtggtgtctccatccaagcccttgggtacgccggacacgtacgcagcacggaatctggtgatggttccggccggtgttttgaggtaaccgatacccggcaggcttggcagttcgtatgcgtcggggatacccagcactgcgcgggattcggacgcggagaacgttttgaggccaacacgatacgacaaatgttcgtcaaggccgcgcaacttgccctgttcgagtctctgagaagcgatgagcaggtgtacgccgagcgaacgtccaacagcaccgatacgcacgaaggactgtacgatgtcgggttttgccttaaggagttcggagaactcgtcgaccactaccagcagcgacggcagtggatcgaggtccgtgcgcccgccgttgacgcgcgcatcctcgtattcggtgatgttcgccagattaccggcgtcgcgcagcagttcctgacgccggttgatttcgccgtccagcgcatcttccatacgatccacgagggaggcctcgtctccaaggttggtgatgatggacgagatgtgcggcatgccgcccatgcccgcgaatgtggcaccacccttgaagtcgatgagcacgaagttgagctggtcgggcgaatggctgagcgccaaagacagcaccaatgtgcgcaacacctcggatttgcccgagcccgtggcgccgacgagcacaccgtgcgggcccatgccgtgctggcccatttccttgatgtcgagatatgcggtgctggtgtcgtcgtgcagtccgataggcacacgaagacgttccttgcccgtacggtaggcccacagtttggcaaggtcaatatgacgaatatcgtcaatacccagcaatgccggcaattcgttggatttcttgtgcccggcagacgaagcggcctgtgcggattccgcatcctccacttcgtccggggcgctggcgagccgctgagcgatggcgagggcttctcgcaccgtaagcgcatccggcttgatgtcgaatggcttgatggtcgtggagaacagctccacggtgccttcctcatgggtttcgagcacattgaggccctcttcaaccgttgtctgagagaacagcacacgcagtacattgtcttcttcaaggtcgccccattcgtcgggcaggtcgatcacggtgacgccgtcaagaccatccgaagcgaatagctgagtttccttggcgagttgctcccggtcaaacccgtcgttgaccaccagcacatgtggcacgatttcatagtcgctaccggtataccggttacggtcaagcgcctgcgatcccacgagcaggtcaaccgcgtgtatgttcgaggtgaccatataacgcccatgccccactgtggaggcaagtgcctccgccggttcttgggcgagttcgtcgttcaatcccgccgcttggggcagcaaccgcacccaatcccactggccgatgcgagcctcggaagccaatacgacgatacgcaggcaatccggggcatgccaggtagccgcttggcacaacaccgcgcgcgcaagcgcctccgtacgctcaagatcgcccagcagctccactcgtttgaactgccgcatgttgacaacgtatggcatattgcgcaacgattcgtgcgccagcatgaaccggtgagcggccgatgccgaaactgggtctagttgtgccaatggcggcagctcaggcgcttcgagcgtgatgcacagaggctcatcatgcacgccgaagcgcagttgcatgaagtccccatcggattggatacgctcccatcggcgtgcgggttcctgcgcgatggcggtaagcgattgcggtgccggagcattccacaacgccgcgttacgctgtttgcgcccggctgtgcgcactgttttacgcaagcccgacaagtaggtaaggtattcgcggcgtgacgaggtgaggttcgccatgcgctgggagcgttgacggaagccgttgaccaccacgaatcccagcgaggagaccatgaacatgccaccggtgagcatgccggtcaggccggaattggtcatgagcatcatcaccatggcgctggcggtacccagcaacggtaccagcgaggtcagcagcgtattgacgccgtcgctgggctcaagttcaggcggctgctggagcacgacccgcccttttggagccttaggcccttcaagcctgttctgttgggtttcggaagtcatgaacgccgccccctgcttttcgccatgatgatgctacagcccatatcgccgagtgagatacgcgcacctgattgaatggcatgtcgttgctgagcaacgagatcgatttcctcgccgtcttcattgacgacgcgggtgccattagtgctgttaaggtcggtaatccacatatgtccggcggtgatttccaaacgcacgtgattacgcgataccgtgccggtgcgatcgggaacagccaacaccatatcaccgttctgttgcggtgatgggttacgcccgagcaccacattggaaggaatgaccaacggctcgcgcgagccgtcttcgaagtaaatggtgatttgcttgggtggcacgggcggcactgtgccggggcgcgcaggcaaggcattgccaaccggattggcagccggggtgggcaacgcgacatgcttcgccctcttcgtggaaggctgcgacacgggaagcggcatgggtttcgccgcagatactgagggaacggagggcacggaaacggcagaagccctcggtgcggcgggaaccgcacgaacgttggggactggggaaacagccggcaccgatgacatcgacggcactgcaagtggtgccgcgggcgtctttgggatcactggagcgggtaccggtgccgaagcagatgcggatactacagatgctaaggccccggaggtagtcgactcgtgcatcgtggaggaggaaatcgtatggaaccgaagctcctgtgatggcatcgcagtcgtgacttgcttgtggatatccacctcggcgagtctggcgaccttatccgcccatccctgcttaagttcagatcgggagaacaacggcgaacatatcataatcaacaatccgatgacgaataccatcgaagagaccgtaagcaccagatatttgacgaaggctctactgagtcccgctggcagtattccattacggtggtcgttctggcattcaacacgcactgtacgcacaccaagtgctactttgcccggggtttcgccgcgcacggcctcccatacggcaagcacaagaaccatttccacggctatcatcacgcataccaccagattgtgagacagcaccatggccactacggtgcccagcgccacgcagcatacgtcgatcagtgaagcaacgcattgtttgccggccgaggccgcacgatatccggtaatggtacgttccttacgcgaaacgactgatgttgctgcggccgctaccatgacatactcctgagaaactcaagtgcgccacctgcgaggaacgaggctgccggtatcagcatcatggagatgaagcacaacgcatcgccgattcgcgatagcgccagagaatggaacccattgtgctgcaccaccatgctgaatcccaacaccagtcccaacgcggcgaacgtgaccatacaaatcaaggggatcattgcctccccttcgggaattgcctgagtggcgtgcccaacccagagcaggggaatcgcaataccggccgcgcgcatcacatatcgttcgaatggtcgcccggattgacgcggcttcagttcgaagaacagcatcagcagcatactcagcaccagaaagccgatacggtcatacaggctgtggtagtcggtccactgtgccaatgcggcatatcccaatacactcagcaccacgcatagcgtgaaccccgtggagtattgtgccaggaacgaatccatatcctgccgaacatccttgcgggtcagcactcgcgcttcctcgggaatgcttccgcgcaccgtccatcgccgggtcatgtaggtccgccattccaccagataacgatcgggcacatgcaccacgatgttcggcatcatctggataccgcagacgcttgcggcaaccaccatgccggcaagcaactgcactgacagatcaaacagtacggttgccgcgctggccaaggccaatggcaatgccacgaacgacaccgcgctcaccacaccacgcaccattggctcgcgcacgcatacggacatcaacgccatatccgccaccgcgatgcctgatgcgcagaacacggccacggttgccggattacccgactcaagcaatgtggagacggtagcgcccgcgcatatggaaaaacatgctccggctactaccaaccacaccgccatcacacggttatgccatacgatttggcggcggcaacggctattacataccaatgccgccacaatgaacacggcaacgagaacgaacgtcacccaccgagacgagcctgccatgcgcatggcaggagtcagacgcatgaacagcaacgaggtcatcgccgcaaacagtacggcgacaatcaacgccaccctgttgaggtcgcgtcgagttaccccctcgtgctcgctgtgcatatgtcgttccttctgccgcctcttctctcaagacgccattatatgggtttgcggcccggtgtgtgctcttccgtctaattacggccggcttgtgcctcgaaagcatgcagcttgcgcataccggcatcgagttcgctacgacctttggccgcctcgttgtcttcatcgtcggtgtccgtaacatagtcgcgcacatataccatgctagcttcgaggtagccacgcacttcacgggcctcgggcgatttgtcgatgccggcgtagatgtcgtcttcgcaggtcttgcccatatcgatgcgctgttgcagcacctgccaggcacggccgtactcacctttgcgccgcttctcctcgatgtccttgcttttttcggcgatggtagcgtcgacctttgccttctccttttcgaatcgggcacgttgctctttgatctggttggataaatcgtccatctgcttcatgaacgcttcaaattccggggatgccatggttgctccttttgctgttcttccgggtatgcgtatacgtccgaatagggattaacggccgccgaacgtaccgccgcctgaacctccgctggagcttcccccaactgcaacaactgaaccacccgtggaaccggatccactgccaaaggtcatcttcacgccttcggagacgttcaccaactgctgcatggtgccaatgcagttcgcgaatccgctaaatgcggtgtacaggttgttcaggcagttgacgatatccataccccactggatggcctgtgtgacttcggcggcagccgtcactgcgaccagcaccggacccgcaccggggatgatcagttcgccggcgataagcttcagcaaggatatgatttcgtcgatggtgtcgagaataaggtcgaatgcagcctctgcgttctgcgcgagcgcattcaatgcctgcgacatttcggtgcagggctggcaaccttgacctgccacctcacctacggcattgttgcgttcaacaaatttatcggcggaggcaccagaccatgacgtctcattcacattgctggacatatcttggatggctccttgtacgccggaaagcgaagccgacaatgcatcccacttggcggcagtgtcttggagctcgtcccagtcaccgaagaatggcttcttcacccactcatcaacaatgctcacgccaaagagatacttagagacgaagtccacaacggtcacggccatgcgcacacgggatattcctatgctgattttgccgcttaactcatgcgctgcttttcttaccgcattgttctttatgtctttagcaagctgatcggaggccgattggacactggcagatactcgtcctaaaggaaaagcatcaagatgcagcatattatcggcagcatccctcttataatcgatatgcttcaatatctctcttgggactgcaccggtattcgacagaccaactttctgcccaagcacgtcgataagttttccagcctgcttggtgtcggcgaactcacctacatgctggtaaaaccgtaaatcacgtttgatgtcgccgaggtcatccggcacatcgacagtaatgggaccgaactgaagatcgttgttgtagtcatcatcgttgctgtcagccattatgcgatgctccttacgttaccggtgttgatttcagtttgctcgggcaatgtcatgacatccctgtcggcgtagagcgcctgcagttcttccaccgagcgtccaagagggtcattgcgggagatttccgcccagacgctcgcctcggcctcctgctgcatcttctcgtaagcggccgccgagtctccgatgcgtacggaggcatcataatcgccgtcgttgtcgaagtcgatggcggcgtactgggaatcgccatcttcgaatacgctcacgcgggaatcatctccactgtccggagtgagggtgatgtcgtcacgaccgtcattgtcggcgtcaaccgtaaacgagttgcccttattcgcagtgttgttgtcgctacccgggggcaacggcacggtggacgagtcctgcttggacagggtgaccgatccatcgtcgtttatagaagcatgcgtaccgccctcggtgaggttcacggaatagtcgtcggtcgcatcgccatcggtgtccagaccaacggtattcgtggtgtccggtcgggtgactccaggaacatctggctgatgagttccagttccgggattggtgtttcccgttccgggagtagacgttccaggattccatggagttactggcacagtggtgttctgatcatcaccggaagcgtccacagaaccagtattctgccccgcattcacatcttgatcgtgacctggctgcgctgctgatggggtctgcggcgtcgccgacgattgaggagcctgttgcaccggctggtactggccggaatccgtgccggagccagctccaccgcccgagccagagccaccgccagaaccgcccgaaccggcaccgcctccgaaaccaccgcccccgccaccggtgcctccgggcattccaggatcaacagatgactcattgttgttcttgttctggttgtctcgaatttcttctagcagctggatgattttgttgagcagttccttattcgactgttccgtggctttggtgtctttggcggtgccttctactgcgctggaaatcgaattcagcatcgattcgatattgcccaaatagctgacggtggaatctttggcaatgccatagaacggcttaacaaaactcagcagaattccgaaattcggacttcctgaactgacaaattggcttttcgcgctggcgaattgagaggccgcctgattgaaggaatcagataccgtgcccaaatcatcagggtctacctgcataagcgatgcagccataacgcatcattgcctttccccctagttccttgtactcttcacaattggttaccccattgtgttctccattgtgccatatgtacagcgttcgtcaatgtttcctacagattcaatcggcgattcctaactgaattctggggaggcatgccatcataggcgtgttcgccgtaggtcaagccacctgaatacagccacatcccgtaatgcgcgccacgcggatcggacgacaaaggaaaacgaggatcacactgatccggccacctcaccgga

SEQ ID NO: 3905 - DNA, 8554 bp, Unknown
  R22_24m  MAG No. k141_10873
atgccggacaacggtttttgccaaagttgcgccatgccgttctatcgcccggaagaccatggcaccgaaccggatggaacgcgaagcggagattattgcaactactgctatgacgacggcgtttttcttcaggactatgccaatagcgatgaattggtcgccgcatgcgcgccgatgatggcggaatcctgccatatcagcgtcgaacaggccgaggattgcatgtcggcgctgctgccaaacctcaagcggtggcggcatcaggacgagatcgatgcggtggcggaaggggaatgagcgatggcgttcgattataagaaggagtataaggacctgtatcagccgaagaggatgcccgccatcgtcatggtaccggcgatgcggttcgtcgcggtggacggtgtgggcgacccgaacgaagaaggcggcgattacgccaaggcgatgcaactgctgtacggcatttcgttcaccgtcaaaatgagcaagaagtcaaagaacccggccgagcatatcgacgggtacttcgactacaccgtgcctccgctggagggcttatggagcatgggggagggtgtgcccggcgtcgattacgcgcacaaagccgacttccattggacttcgatgattcgtctgccggaattcgtgaccgatgaggtctttgcgtgggccaaggcatcgtttgccgccaagcatcccgaagtcgacatcaatcgtgcatatctcttcgacttcgatgaaggcgtggtcgcgcaggtcatgcacaaaggcccgtacgacgacgagcccgcaaccgtgacgattctggacggctacgcgcgttcgcaaggctacgggctcgacttctccgacacccgccgccatcacgagatctacctatccgacccgcgccgagccaaaccggaaaatctcaaaaccatcatccgtcatccggtagtgaaggtgggtcgactttcggcgaactgctcgaagcgctcaccgcgcagtagcgtgaacaatctgccggaatccttaccggggtcaaagagcgctaccaagaactcgataagcaaaataactagaagcacgggttcctctcggagagattctgcccgagcgaccttataaatccttgcgcgggtcacctttccctgtgcaggaagcatccaggctcatgtgcattgatgacgccgatggattgcagataggcgtagacgatggtggtaccgatgaatcgcatgccgtatgtcttgagatccgctgcgatggcgtcggacagaggggatgtagtcatgcctgtctcgtagatgacgtgacggccggtgaaccgccaaatatagtcgtcgaaactgccgtacgacgtctggatatcccggaatgcgttggcattgccgaccgtcgcgacgattttgcgacggttgcggatgatgcccggatcgttcatgagttcggcgatcttgttctcgtcatagcgccggatccgttcgatgtcgaacccatcgaacgcctgacggaaacgcttgcgtttgttcagtatcgtctcccatgacagtccggcttggaaggtctcgagcaccagcatctcaaagaggtggtggtcatcatgcgacggaaccgcccattcggcatcgtgataggcaacatagacgggattgctgagattgcaccagccgcagcgtgggttcatgtcatccatgtgttctccctatggattgtcggagacggttggttttagccgttagtgtgatgtgcgattcagtataatcggatttttactccagccgtggatactgtgaactgaaatcgatgtctgtgttcgcgtcgccatgctgatttgaccctcacatgatgtcatactttagcctgtaaccatgaatgaccggcaatcacacgacatggacactccggcggagcgtatttcccatctcaacgtaggggatgtgtcgcggctgacgaacatcagtattcgcatgctgcggcattgggacgaaatgggtctggtgtctccgcaacgcgactggaatggataccggctgtattccgattcggatctcagacgactgcgcaggctgctgctgtacagggagctcggcatacccgtgccgcgtatcaagcagctgctcgatgccaagccgagtgaggtaatacgcgagttggcggatcgtcggggccaacttgcacgcaaggcggaacatatcaatcaggcattggccgatatcgatcggcttatgaacgttgcacagaaaggaatcgatatgaatgatgcgacgcagcaatcccgagaatgggccgaagaagcgcagagccgttggggcgggagccggcagtggatgcaggttgcggaataccaggtgaggagaacgtctgatatgcaggagcgcgacatgaagcaattcgaagccatcgagcagcggctcgccgatgccatgcgtcacggcgtgaagcccggcagcgatgagggcaatgagctggcggaagcccaccgtcgttccttggtatggttcgatgtcaccccgtcaatgcacgtgtgcctcggccgcatgtacgtggccgacgagcgtttcgtacagcattacgatgctttggaaccgggtttggcccagtggctgcttgcactgattgaagccaacgcgacaagattcggtgtggatctcgacaatttgacgtggcagtgagatgtgatcgggaggtatcggaattatcgtgacatgaatgtcgttccggtcagttggctcacgaattggctcacagcgtgtgagggattgcgacgatccatcgatcataccgaaaccattggaatcacaaggattacaggcaccaagctgcgttaacagaaaatgttaacggattcagccaatccgttaacactggaattgtgttagcaaacgcccccagagcaaaaaagaagaagccctacatcccaagtgggagtagggctttcattgtcgggctgacaggatttgaacctgcgacgtcttgctcccaaagcaagcgcgctaccaaactgcgccacagcccgttttcatgccttaaggcataactttttaattatacgcaccgagtgggacactctgtaccttcaggcacccaagggatcaagccctgaaacatccgcaaactcggaggtctgcggtcattgttaaccattgttaacggatgccatttttcagtttttaccgaagtcccaaaacctaagcggcagtagacctcagcgagggtcatagttttgctggtttggtatcatcctgctcccaaagcaggcgcgctaccaaactgcgctatagcccgatgcgccattaaggcacaatgaatcattgtaaacgacgctggatacattgcgtgtcgagcatatgaattcaaaaaggttctggattctcttgatagcttatgagtgacatctttattcattgatgctctacaacgactaggtttggatctgcatcgatatccggcgcatccgctggactaacaaggaccgtgcaaacgatgtggcccccgacttcctgcgaggaagtcgggggccacatcgtttgcacggtggactatcggatcaattctgatcagatcagctcgaggtcgacatcgaggctgatcggcttgtccgccgggatatggtactgggggtgcaccggcgacatccaggaatcatcgccgccaacgcccatctgtgcggcaaggacgcgcaggaacatgtgcttcggcttcggcagctcgtcctggtgctgagcctcctcaagcatgaagctggagtacggcaacaggcttaccgcgaacggcgcggcaccatcggcgcggctgacgcgcatgccgtggccgtgatcgtcggtaatctcggcccaacgcacatcctcatggttgcccgtctcctgcggcatgaggtacggcgcatgatcggcgaaggcgttggtgctccacacgccgagcttggcgtgcttgcggtccaggtacgtctcctccgggccggtgccgaagaacctcaggttcgtgtactgcacaggcagcgtccattcgatgccgaacgccgggatggtgggcaggtcaccctgctctccagggtattcgacgtgcaggttcacgcggccatcggtgtgggccgtgtaggagacggtcaccttggtgcgctgcgcggtggcgagctcatacgtgtacgtgcccttgagcgtgctgtcgtcgatctgctcgagcacgttgtccacgcagcgggcgtagcggccggcgcccagccactggacgcgctcgaagccatgaccggcaccgcgatcgttgtcggtcagcggacggaaggtggtgattgcgggacggcgcagcacgaactcgttgccggcgaaggtgtaggagaccatgccgccctgggtgcgcgacagcaggacctcgcgtccggcgcctcgcacgccggcgttccaacggcccacggtgatggtcccatcggccggcttcgcgtcgggcgtcgcggtggcgtccgcgggcaccaccgcctgtccgaaggcaagctcgtagccgctctcggcccaatcggtcgccttggcgagacgctgcgaaacctgcagcaccagttcgcgggcgtcggcgcggtacgccgccaccggccatgcgacatcgaacgtgcgggtctcaccggcgggcacgtcgaaacgtcgggtggactgccagaccggcttgccgtcggcgagaacgctcaggacgaacacgtagtcgccggtggcggtgaacaggttgtcgttcttgacggacaccgagtccttcgtcacgtcgatgtggacgttcgagtacagctgcttgacttcctgggccttgggggacggcttgcggtcggcgaacagcaggccgtcgccggagaactcgtagtcggacggacggtcgccgaagtctccgccgtagcgcaggctcctggtgccgtcgggctgggtggcgtagatggcctggtcgatgaagtcccagatgaagccgccctgatacttcgggtagcgttcgagcgccgtgtattcgtccatgttgcccacggagttgcccatggcgtgcatgtattcgcaggagaggtacggcttcttcgggtcgtccttcaggtacttctcgatctcgtcggcatgcgagtacatacgggtctcgatgtcggtgacgtcatcgtagtcacggttgtgggtcacgccctcgtagtgcaccggacggttcgggtcgatgtcgtgcacgtgcttgtacatggcgcggaacacgtcacccacgtaggattcgttgcccagtgaccagatcagcacgctcgggtggttgtagtcacggcgcatcatgctgttgacgcggtcgacgcaggcgccttcccattcgcgcttgctgcccggcacgatggtgtcctcggtgaggacgtctccgggcagggaccagctgccgtgggcttcgaggttggcttcgtcgatcaggtagatgccgtactcgtcgcacagttcgtaccagcgttcctggttcgggtagtgcgaggtgcggatggagttgatgttgtggcgcttgcagaagaccacgtcatcgatcatgtcctgctcggtgatggcgcggccgcgttcggcgtcgaactcgtggcggtcggcgcccttgaacacgatgcgcttgccgttgatggtcaggatgccgtcctcgatgcggaagcggcggaaaccgaccttctgggacgtgcattcgatgacgtctcccgcttggtcgatgacgtcgacgtcaagttcgtacagcgtcgggctttcggcgctccagggttcgatgccctgcagcggctcgctggagatcgcggtctgcgcctccgcgtcgcccgtcgtctgccacaccgtgttgccgtcggcgtccttcagggtcgcgcggaccgtggccgcgtcggccgcgttgagcacggtcagcgcggcgtcgagggaagcggtgccggcctcgggatcccaatcggcttcgatttgcgtgttctcgatgtgcacgtgcgggcgggcggcgagttcgacggagcggaacaggccgtgcagacgccagaagtcctgatcctcaagccaggaggcgctggagtattcgtagcaggcgacggccacgacgttctccccgtcgtgcagcagttcggtgatgtcgaactcattggtcgtgaagccgtcctcgccatagccgacgaacgcgccgttgacccacacgtagatcgccgtggccatgccgtggaacacgatcgacaccgatccgccggcctgcttggcgtttgctacgggggcggagacggtgaacttcctgcggtagagcgcgacgtgattgttctccgggatgttcggttccaacgggttctcgtggccgtcccacggatactggacgttcacgtacttgtggttcatcagaccggccgtctgcaggtggcccggaacctggatacgctcgaacgaggagtcgtcgaacgactcggccgtcgcgggttcctcttcgaggttgatgtcggcggcctgaacgacctcgacccgccactcgccgtcaaggctctgcttgagatcggaccattgtccgctctgggggtcgcgggcgtaccacttgtggctggaatgggccggagtccggttcacctcgaacaccgtcgggtcggtcagccaagcctgcgatgcgcgatcgacatgtgtgacgtctgtcatgctctcctgctttctgtcattacctcgttgtgaatgatattatggaggaggtcggggcctcctttaccgaaaagaataaacagtttttatataaaacgcaaatcctgtttaccgcttccaaatcactggcactgcttgccgtcgacgctacgccgcgtccatgcaatgtctcggttcagcccatgttatcccatccttgcgacacgctgtttatctccttgtttactaatgctttttacttttggtgataaaacttgtatgcttactttacaaaatcaatgagtgattccatgctctgggttcttaaggagaagattaatgagcaacgaaaatgccgcggacggtgacgtccgcaggaagagtgggttaggccagcgcatcgcctacgcgttcggcaacctcggtcaggccgccttctacaacgcgatgagcacgtacttcatcgtgtatgtcaccagctgcctgttctcgggcgttgacaaggcgcttgcggccaagctgatcggcgtcatcaccagcctcgtggtgatcatccgcatcgccgagatcttcgtcgatccgctgctgggcaacctcgtggacaacaccaccaccaagtggggccgtttccgcccgtggcagttcttcggcggactggtctcctccgtgctgcttgccgtggttttcagcggcatgtttggcctggtgaacgttaactccacattgttcatcgtcgtgttcgtcatcacgttcatcgtgcttgacgtgttctactccctgcgtgacatctcctactggggcatgatcccggcattgtcctccgactcccacgaacgttccacctacactgccctcggctccttcaccggctccatcggcggcaacgccatcaccatcctcgtgattccggtcgtcacctatttcagctgggtgttcaccggcgagaacgccgagcaccagtcgggttggaccgctttcggcatcatcgtcgcggtgctcggcatcatgaccgcctggaccgtcgccttcggcaccagggaaaaccaaagcgcccttcgcgccaacgccgaagacaacggtggtccgttgcaggcgttcaaggccgtgttccagaacgaccagctgctgtgggtcgccctgtcctacctgctgtacgccatcgcgaacgtgaccaccaccggtgtgcttctcttcctgttcaagttcgtccttgacaatcaggccgctttctccgcgaccggtgtcatcgccatgattgcgggcctggtcatgtccccgctgtacccgattctgaacaggtacattccgcgccgctacctgtacatcggcggcatggtctccatgatcgtggcttatgtgatgctcgccctgttctccagcaacatcgtcctggtcttcatcgcgctggtgctcttctacgttcccggcacgctcatcatgatgacggtcatcctctccctgaccgactccatcgagtacggccagctgaagaacggcaagcgcaacgaggccgttacgctttccatccgcccgatgcttgataagatcggcggcgctctgtcgaacggcatcgtcggcttcatcgcccttgcggccggcatgacgggtgacgcaaccgccgccgatatgaccccgacgaatatccacgtcttcaagatctgcgcgttctatgccccgctcatcctgatcgtgctcagcctggtggtgttcgtctccaaggtcaagatcaccgagaagatgcacgcgcagatcgttgacgagctcgaagccaagctcgcttccggcgagatcgtcgacgatgaggcgcagcccgtggcggccgttgaagccgccgcagccgtcggcgatgagacgcagacagtcaagaactgatctcccgttcccatccctcccataaggcccgtccgcctgaaccgcaagatgcggtccgtggcggacgggcctgttcgttcctgcggtcggcg

SEQ ID NO: 3906 - DNA, 22735 bp, Unknown
  R22_24m  MAG No. k141_10962
cacggttgcaccggcaagggcaacgaccaggttcgtttcgaggtctccatcgcctccatcgacccgacgctgaaggccatcagcccgattcgcgacctgtccctgacccgcgacgtcgagatcgcgttcgccaaggagcacaagctgccgatcacccagaccgagaagtccccgtactccatcgaccagaatgtgtggggccgcgccattgagaccggcttcctcgaggatccgtggaacggcccgaccaaggactgctactcctacaccgacgacccggccttcccgccggtcgaagatgaagtcgtcatcgagttcaaggaaggtgtgccggtcaagatcgacggacgtgacgtcaccccgttgcaggccatcgaagagatgaaccgccgcgccggagcccagggcatcggccgcatcgacctcatcgaggaccgcctggtcggcatcaagtcccgcgagctgtacgaggctccgggtgccgtggctctgatcaccgctcaccaggaactcgaaaactgctgcctcgaacgcgaacagcaccgcatcaagcgcgacatcgacaagcgctggggcgagctggtttacgatgcgcagtggttctccccggcaacccagtcgctcaacgccttcatcgaagacacccagaagtacgtgtccggtgagattcgcatggtcctgcacggtggccgcgccgtggtgaccggccgtcgttccgactcctcgctgtacgactacaagctcgccacctacgattccggcgataccttcgaccagaggtcctccaacggcttcatcgacatctatggcctgccgtcccgcgtggccgcagcccgcgacgtcaagttcggcaacggcatcgaggtcccgaagaacaccgtcgagtaattcttactcagtcgcccccgctgcgaggctgtcggcatagctgactgggagtggtctttgaaaggactgtcctcagtcacactccatgtgacagccctcgccagcgggggcaactgtatgtttgaacacattgctacgcttaaacacagctattttcacttttcaaggagccttcatgactgagaacaacgaacatctggccctgtggggtggtcgctttacgtccggtccgtcgccggaactggcccgactgtccaagtccacgcagttcgactggcgcttggccgacgacgatatcgccggttcccgcgcccacgcccgtgctctcggccgtgcgggacttttgaccgccgacgagctgcagcgcatggaggatgcgctcgacacgctccagcgtcatgtggatgacggctccttcgcccccatcgaagacgatgaggacgaggccaccgccctcgaacgcggactgattgacattgccggcgacgaactcggcggcaaactgcgtgccggacgctcccgcaacgaccagatcgcctgcctgattcgtatgtggctgcgccgccactcccgtgcgattgccggactcctgcttgacctcgtcaacgccctggtcgagcagagcgaaaaggccggccgcaccgtgatgccgggccgcacccacatgcagcacgcccagcccgtgctgctcgcgcaccagctcatggcccacgcttggccgctgattcgcgacgtgcagcgactgatcgactgggacaagcgcatcaacgcctctccgtacggctccggcgcactggccggcaacacgctcggcctcgacccggaggccgtggcgcgtgagctcggcttctcccgcgtgaccgacaactccatcgacggcaccgccgcacgtgatctcgtggccgaattcgcgttcgtggccgccatgaccggcgtggacatctcccgcctgtccgaggagatcatcatctggaacacccaggagttcgccttcgtcaagctcgacgacggctattccaccggctcctccatcatgccgcagaagaagaacccggatatcgccgagctcgcccgcggcaagtccggccgactcatcggcgatctgaccggtctgctggccaccctgaagggcctgcccaccgcctacgctcgcgacctgcaggaggacaaggaggccgtgttcgaccaggtcgatacgctcgaagtgctgctgcccgccttcaccggcatggtcaagaccatgcacttcgacagcgagcggcttgaagaggaagccccgaccggcttcgcgctggccaccgacatcgccgaatggcttgtcaagaacggtgtgccgttccgccatgcgcacgagctctctggtgcctgcgtcaagctcgccgaaggccgcggccaggaactgtgggatctgaccgacaatgacttcatcgagaccttcgccgcgttcctgccggccgacaaggctccgggagtacgcgaagtgctctccagccacggttcggtcgactcccgcaacggcaagggcggcaccgcttacggtcgcgtgcgcgagcagatcgccgacgccaaggccgaggtcgaagaactcaagctcttccccgcatccacgtcggatggctccgcctacaaagcccccggcacgttctagtcccaatagagctccctcgtcagagggagctctattttgctgttgtcactgcaacggcatacactgagaaatcgtaacgaacgggagccgtgaggctgagaggaagtcgccagacttcgaccggggaacttgacgcgggtcatgccgccgtaaggaatcgttgttgcagatttgccgggttctccgatacagctttcattccgtttgcataattcagccgtgagacggtcgtgatggagccaatacatcacagcggtcgaacggtcgcatgattgggttcatgaatgggcgcaccacttaaggtacggttcgtttcgtgcacccttttttactatctgaaaggatattatgcaggtcaacggagagcaggtcacgctcgagacgccggtcagcgtcgccgattatctcgaagcgcacggattccgcgccgagcgtgtggccatcgaactcaatggtgagattatcccgcgcgataagcgtgccgacgccatgctcgacgaccagtgcgtcatggaaattgtgcagtttgtacagggtggatgaaaggaaaagctatgagcaatattaatccggttactgaagcatctgttgaggcgactccgctgccgccgcagcccgccgtcaccaatccggtcggtaccgccgcgccgattctgccagtggaagacaagccgctgaccctgggcggtcacgagttccagtcgcgattcattctgggctccggccgctacgacctgaacctcatcaaggccacggtcgaacatgcaggcacgcaaatcgtcaccatggcactgcgccgcgcgcagaccaccgagaacagcgtgctcgactacattcccgaaggcatcacgttgctgcccaacacctccggtgcgcgcaacgccgaggaagccgtgcgtatcgcccgactggcacgcgaagtgtgccacaccgacttcgtcaaggtcgaaatcgaacacgagaccaagtacctcctgccggacaacgccgaaaccatccgagccaccgaaatgctggccaaggaaggcttcgtggtcatgccctacatgttcccggacccgattgccgcacgccagctggaggaggccggtgccgccgccgttatgccgctcggttcgctgatcggctccaacatgggcctgcgcatgcgtgacttcatcgagatcatcatcgccaatgcgcatgtgccggtcatcatcgatgccggcatcggccgtccgagccaggcctgcgatgcgatggagatgggtgcggatgcggtgatggcgtacacggccgttgcctctgctggcaatatcccgctgatggctgaggcgttcaagcacgccatcgatgctggtcgtgcggcgtatctgtccggtctgggcaaggtgaccgagggacaggccgtgccgtccagtccgactacgggatatttgcactgacacttttattagctcccctctctgaggggagctggccgcgtagcggactgaggggagctggaaacatggagaaaacatggcattgactgatgaacaggtggagcggtacgcgcgccatctgattttgaaggggctgggcgtcaaagggcagaagcggttgttggcctccagcgtgctcattattggagcgggcgggcttggctctccggccgccctgtatctggcggcggccggcgtcggccatatcggactggtggacggcgatgtggtggatatgagcaatctgcaacgtcagatcatccataccactgcacgtgtcggagcgcccaaagtggaatccgcggccacggccatccgcgcgctcaacccagatgtgacggtcgacacctactacgagctcgtcgatgccagcaacatcgccggcctcatcgaaccgtacgatctggtgatcgatgccaccgacaacttcgccgcaaaattcctcatcaatgacgcatgtgtgctggtcaacaagccgtatatccatgcgggcgtggtcgggttctccggccaggtgatgaccgtcatcccaggcgaaggcccctgctaccgctgcatcttccgcgatatgcccgccgcaggtgaaattccgacctgcaaggaggccggcgtgctgggcgcggtggtcggcgtgttcggcagtctggaggcgactgaggccgtcaagctgattgccggcgtgggggagccgctcgtggctcgtatgctcactgtggatgccctgaccatgaacatccgccgtgtgccgttgccgaaccatgtgcccgactgcccggtgtgcggtgagcagccgaccattactgctattgatccggccaactatattcagccggcttgcgcgatttagagctatgtggcacccctccttgaggggagccaagatcggaacgagaggggaagaacatgcctattgctttgcgtaatgcggtcgatgacgatgagagcagtgaagcatcgtaccgccgcatcacgccggcggaatttgccaagctcgacccgaatacggtcacgctgctcgacttgagggaaccagccgacttcgccgcacacccggtcgaaggtgccatcaatgcaccactcgaccctctggcccatgtgctcaaaaccgtgcccacagatcgaactgtcgtagtctattgtgctcaaggatggtggagcgaggaagtagctgaaatccttgccgatcgcggttacgatgtagcaagcctcgatggcggttttcagggttatctcgactatcttgaaacccaccacgattaacggttcccgttgtcgttcttttggatgagtgtgcacggacatacgtgtgccctacaatcggtcacggtattactcgatggattcttgaatatcgtcgggtaatcgtaattcacaacaagggattgcactgaaccaacccgaacggagggtcgaaaccgtgggacatctgctcacccgaacgcagattcaacgcctggtcgccaagcacggccgtgaggtcatcgagcatcgccacatgcagatcgaacgctgctactaccagcacggcaacgtcaccacgttcgaacattccgtgcgtgtcgcctgcctggctgtgtggatggccgaccgcgcgcacctgtggtaccgcgtcgacctcaaatccctgattcgcgcggccctcctgcacgattacttcctgtacgactggcacgactgggataacggcgaacaccagtggcatggcttcacccatggccacgccgccctggtcaatgccctgaaggacttcaagctcaacgatatcgaacgcaacagcatcgagaaccacatgttcccgatgaccctggtgccgccgcgctatatcgaaggctatctggtcaccttggcggacaaatgctccgccaccgccgagaccttctcgctcgaccggttcaacaagcgcgcgttgcccgccgcgaagccctacgccgagatcgaagcccgtcgatgatcatcacactcgaacattatttcctctggtttctgttctacagtttcgtcggctggatgtacgaatccattctcgtctcctgccaacagcaccgcttggtcaaccgagggttcctcaacggcccgctgtgcccgatctacggcaccggcgcgatactcggcgtcgccattctcggcaacgtacataacccgatcatcatcttcctgatttcgatggtgggcgccacgatactcgaatacacaacctcgtgggtcatggagcagctgttccacgcccgctggtgggattactcgaatttccgcttcaacctccaaggccgcgtctgcctgctgggcgcgttgattttcggtctcggcggcgtgggcgtggtacttggttcgcagccatatgtcgagcgggtcacggatatgattccgctgccgatgctgcatacgctggtcacggtcctggccctgatcaccatcatcgacttggcggtcacggttgcgggcatgctcggattcgagcaggtgctcgattccgtctctcaggtggtgcaggatgtggcggcacgcgccggtggcacgtggcagtggggctcccgtgcggtatccgacaggatgcgtgagctttcgcaggatacggttgagcgtctgcgctgggccgtcaatggcgtcatcaacgcacagcagaagcgtatgctcaagtccttcccgaagttccaggtgccggatcgtcaggacatcatcgactctttgcgcgaacttatgggcccgcgccgctagaataaggcgttttactgaatcgcgcggctcggctggtgttcggcactgtcgccatgttctgcgaaacttgactgtgcccaattgggcagtctcattcacaattcgatagggagaagcgacaagctatggctcacgtcaccgacttcaaggaagcgggtttcaacaccctgcttgaggaactggaatggcgcgggttgatttcccagtccacggaccgggatcgactcgcagaagcactgaacggcgagcccatcacctattattgcggcttcgaccccaccgctgcatcgttgcatatcggcaacctcgtgcagctcatcaacatgcgtcacctgcagcttgcgggccatcatccgattgctctggtcggcggcgccaccggactcatcggcgacccgcgccagtccggcgaacgcacgctcaacccgaaggacgtggtggccggctgggccgatcgtctgaagaaccagatcggcggcattctggacaccgaaggcgcgaacgccgtacgtttcgtgtccaattacgattggaccgcctcgatgaccgtcatcgacttcctgcgtgacgtcggcaagaacttccgtctgggcaccatgctcgccaaggacacggtcgcccgccgcctgaactctgaggaaggcatctccttcaccgagttcagctaccaggtgctgcagggcaacgacttcctccacctgtttgacgaataccactgcacgctggaactcggcggctccgaccagtggggcaacctcacctccggcctggacctgatccacaaggtgcgcggtgtggacgtcaacgtgttcaccagcccgatcatcactgatgcttccggcaagaagttcggcaagtccgagggcaacgccgtctggctcgacgccacgatgctcagcccgtacaagttctaccagttctggatcaaccgcccggacgtggagatggaaagcctgctgaaggcgttcaccttcctgcccaaggccgaaatcgaacgattggtcgaggaatccaagaccaaccccggcaagcgcgaggcccagaagacgctcgcctgggaggtcaccagcttcgtgcatggcgaggccgctacccaggctgccatcgatgcttccggtgcgctgttcggccgcggtggcaacctcgaagacatcgacgaggaaacgctggaatccgtgctcgacggcttcaaggtggtcgacgagaacggcgagcacgtcttccccgtctccaagccgggcgatcgcgtaatcgacgccgcccaggctgccggactgttcaagtccgcttccgaggcacgccgcgccatcaagtccggtggcgtgtatctcaacaacaaccgtatcgaggatgaggagcaggtgctggccgaagccgacttcctggcaggccgcttcgcgctcatccgtcgtggcaagaaggcgctcggcgccgtggaaaaccgttaatcaacaacgaattaaggaaaacaagtaatggcagaaggtaacgagcgttccggcaagtcctacggcggcggccataaggggtatggcgatcgccgaccgggcaaccgcggcggcaagggtttcaagccgcgcggcaagggcggtttcaagccgcgtcatgacggtgagggtttcaagccgcgccgtcgtgaggatggcgaaggctacgcgccgcgccgtgatggtgacggcgagggccacggcggctaccgcaagtcgtacggcaagggtggcgacttccacaagggcggccgctctggtttcggtggcaagggtggctatcgcggcaacggtccgcgccgcgatggcgacggcttccgtccgcgccgcgaccgcgatggcgagggcttcaagccgcgccgtcgtgaggatggtgagggttacgcgccgcgccgtgatggtgatggcgagggccacggcggctaccgcaagtcgtacggcaagtccggtggcttccacaagggtggttaccgcggcagtggtccgcgccgtgacggtgaaggtttcaagccgcgccgcgaaggcggctaccgttcccacgaaggcgagaacggcgagaacccgcgctaccagcaccgtgacaacgatcgtcgtgatttccgtcgcgatgatcgccgtgacttccaccgcgatggtgagcgtcgtgacttccgtcgtgacaatgatcgtcgtgacttccgccgcgatgaccgaagggataacgatcgccgtgatttccatcgtgatggtgagcgtcgcaacttccgccgcgacgacgatcgccgtgatggcgatcgccgcaacttccgcagggacgaccgccgcgacaacaaccgtcgtgacggcgaattccgcgagttttcgcaggaagagaagcgccagtaccgtgaggagaagcgctctgaatacatgaggcgtccgcgccgtaactccgacggcacgatgagcttcccctcgcagaacccgtacaccgaccgtcgtcccgacgagcccaagatgcccaagggcatggaatggtcgatgctgtccaaggatgagcgcgaacgtctgcgcggcctgtccaaggagcatgcggagaacattggtctgcacatcctcgccgctttcgcgctggaggagagcgatcccgaacttgccttggaacacgccaagtgggtggcccgtcaggcctcccgcatcgactttgcccgcgagacgctcgcgttcgtggcctaccgtcagggcgactacaagctgtccctgcgtgagttccgtaccgcctaccgtatgaacggcttcctcgactacctgccgttcatcgctgactgcgagcgtggtgtcggtgaaccgaagaaggccgtggaactggcgctgtccgatgagggcaagcagctgcatggcgctcccaaggtcgagatgttcctggtgtatgccggtgcccttggcgatttggagatgtgggacaaggccattgaagtggttcataccgtcggccgctctcagggtcttccgggtgagtaccgtatgcgtgccgtgcaggccgagcagtacttccttgaagaggccggccgcagcaaggaagccgagcagcttaatgacctgctggaccgtcttgaggatcagtatgccgacgaggagattgacgaaaacagcgacgacgtggtgattgaccacgatctcgaagacatcaccgacgactccgacgtgctcgagaagctcggcatcgatccggacgaggcgcagtacgccccggatctggagcaggaatacggcgatgaggacgacgaggctgaagacggcgatgccgagtctgatgaggccgatgtcgaaaatgctgagtccgaggatgcatcggaagaatctgaggaatctgaagccgaggagtcttccgagtccgctgacgatgccgttgaaccggctgagtccgacgagaccgagaccgaaaccgaggagtgagcggcgtaatgacccgtttcctcaaaggcaccgatcgcccgctcgccgaggcctatcagcttgcgctgctggacctcgacggcgtggtgtatcgcggcaagaatccggtcgaatacgcagccgattccattcgtgcggccgaagccgccggcatgaccatcgaatacaccacgaacaactcctcgcgcttccagcacgtggtggccgaccagctcaagggcttcggcttggacgtggagccgtggcaggtcatcacctcttcggtggtggccgcccgtgtggtggccaaggcgttgcccgccggcgcgcgcgtacaggtattgggcgccgagcatttgcgcgatgaggtcacccgcaacggcctgaccatcgtggacggtcctcaggaccgcccgcaggccgttattcagggctggtatccggatatgacttggcagatgatggccgatgccgcgttcgcggtcgaggccggagccacgtatttcgtgaccaaccgcgacctgacgattcctcgtgaactgggcatcgcccccggttgcggatcgatgattcgcgccgtgatcacggccactggcgtcgaaccggtcgcctccgctggcaaaccggaagcgtacatgtacgatgaggcccgcgaactgaacgccgccgaaggccacgatctggtgcccaaggaggcgtccatcgccattggcgaccgactcgacactgatatcgaggccggtaaccgcggtgactatgattcgctggcggtgctgaccggtgtcaccaacccgaccgaactgatgctggctccggcacacctgaggcccacattcatcgcccttgatctgcgtgaactcggcaaagcccaaccggagccggtccgcgacgagagcggtacttgggaatgccgcaaggctagcgcttggtttgaaaacggccaggtacacgtcagcgaccccaccagtatggacggcctgcgtgccgccgtatgcgccgcatgggaagccgccgaccaaggcgcacagctcagcgaggccacggtaccggtgttcgccatcgaggcatagtcctatgcctacggatagcgaacacgcgccggtcaccgagcgataccccgaacttgcggatattgatgaacaagacaacgaccgcaagcttgagacctatcgcaacgtgctggaatcgttacaacacgagcttgataacagccgcagctagcagaggagattcattctcccgccagcggaagatgacgtgaagtgctggatggtgggtccatgccgagccaccccgttggtggatggtgggtcgaaaggaaggtatatgaccgagcaacatatcgatccctcgaccccacttgatcgcctcgacatgatgctcgtggcttcgggactggtcgaatcgcgggccaaagcgcagcgactcatcaaagccgggcatgtgcgcgtggacggcgagaccatcaccaagccatcgttcatggtcaaagccgggcacagcgaactcgccgtggataagggcgacgactacgtctcccgaggcgcttacaaactcttgggcgcgttcgagacctttgccggcaatggccttaccgggccggaaagcttggaatgtctggacatcggtgcctccaccggtggcttcaccgatgtactgttgcgcgggggagcggccaaagtcgtggcgctcgacgtcggccacggccagctcgacccgcgcatcgccaatgacgagcacgtcatcgaaatgagcggcgtcaacattcgcgaagtagaggccgacgacctgccttaccggccggcgatgatcgtctccgacgtctcctttatttccctgacctatgtgattccggtaatcgcgcgcatcgcggctcccggtgcgcagattgtgttactggtcaaaccgcagttcgaggtcgggcgggcaggactcggcaaaaacggcatcgtggaagatccggcattgcgggagcgggcattgcacgacgtggtcgcctgtgctgaacagcacggacttgacgtggtggccactgccgatagtcccatcatcggcacccacggtaatgaggaatacctgctttacgctgtcttgagatgaatgcgtcggcagtctccgttcaccagcagcacgctggaggtacggtcgatgcctattgcggtggcacacgtggcgctttccaccgcactgccgttgcgtagcatggcggagtccgccgtcaaagtccggcattgcagatggttggcttcaaccgtgacggctgtgatatggcgaaccatgctgccatcctcatacccatccatatcaaaacgagaaaacatcgtactgcgcagtggatgaacttccagagccctgctgttgacgtcatgacccttcaacacgccgttcaagcggactgtctgaccgctaatatgacgggtgcctagggagccattgacggacagatttccggaacaaacgatatcgctgttgcatcgcagtttgccggtaaaggttatttcatcgcaaataatgtcgccgccgacttcgatgtcgccgctgccgctgatgctggatacgcgaatatcaccatcacaccgcacaatgccactcttgatgaccagtttgtccccttctataactgaggcctcgagggtgctggtcacaatcatggtgtgaaaatgcgcgccatcggcaagacgggaacgttggtccactcctatggtgccgtagactcctttgcctatcaacgtgcaattctgcgtatgcttgcccatgatgataaagccccctcaatatggacgtacagctttatggcttattgccccaataatgagcgcatccatgttgaggggggttatatcggtcacgatgtgagcagatagggggtatagcgagcgcagttaggggggttagccttggatgaagtggtcgatctgatcctgcttgcccatgaggatgagttcgtcgttgcgatgcatgaccagttccttggagccgtactggaactccttgcctggggccttgaggcccaccacggtcacgccgtatttgtcgtgcacctgcacgtcctcgatgctgcgacccaccgcgtataggggcgtgtggatcttgacgacggtgtacgggccgtcgatttcgatgtaatccagataattgccggccaccagatgacccacgcgcttgccggcatcggtctccgcattgatgatgtgacgggcgccgatgcgctgcagaatgcgcgcatgctcctgggacacggacttggcccacagatcggaaacgccggcatccagcaggttgccggtgatgatcaccgaagcctcgatgctgtcgccgatggccacgacggccgtgtcgaactgggaggcgtcgatctgctcgatggccagcacatcggtcatgtcggcctgaatggtgggcagatgcgcggaccaacgggccacaagctccgggttcttatccacggcgagcacatcctgacccatctggtcgagggtggcggccacggacccgccgaaacggcctaggccgatgaccagcacgcttttgttgccgctcggttttgctgccatgatgatggtcctctctatgccggatttctgtgtgccgattgaatggccgatcagccaacgataatgttttcctgcggataacgaataggttcgggagccatcggtctgctgatggagtaggcgatggtcaacgggccaagtcgtccgacaatcatctcggcggacagaataaacaggctggccggattgccggcgcttgccacgcccaccgaataaccgcccaacgagaaggccgagcaggcctcgaacacggcgtccacgaacgcgcagccggtggtgaacatcagcatcatcgcaccgaccataaccagcgcaaagcaggccgtggtcacggacacggcggtcatctggatgcggcgggggatacggcggcggaacacggtgacatcgcgatggccggtgaatgcggcgcggcaaatcaagagaatcaccgcgaacgtggtgacacggatgccgccggcggtggatgaggagcctgcgccgatgaacatgagtatgctcatgaacaccttggtctcattcgtgacttcgggcacccaggaaatatcgaaaccggcggagcggggcatgacggcggcgctcatcgcacggcgcatcttcatgccgggaccgtctgcggggaacaggccggtattgccccactcgaccagcaggaaccaagccagtgaggtggccaccagcacagcggtggtcaccaaagtgagtttggtgtgcaacgtccaacgtttcgggctgagatgtcggcgtgcgcactgcaccagattcagcaccacggggaagccgagcgttcctatgaatgcgctgatgagaatcggcagtcccacgccccaacggttcacatgcaggccggtggcgtcaggcgtgaaaccggtgttgttgtaggccgataccgcgtagaacagcgcctgccacaatgtacgtcccatattgccgtggttcacgcggaacaggtcgggcagcagcagcacgaaggtaagcacctcggcgatgatggaggtgcccaataccacggtgagtacgcctttgacctcggaaagcttcgtggtgcccagttcgttcgcggtaagcatgcgctgggagaccttgagtctgcgggaagtgccaagagccaccatcgaggcgaaggtcatgacgcccaggccgccgaactggatggagaataggatgacaacttggccgaacgtcgaccagtattcgccggtgttcaccaccggaatgccgcaggtggacagggccgagacggcggtgaagaacgcgaccgggaagttggtgaagatgatgtccgatgtggagatcggcagcagcagcaagccggtgacgatgatgatcagtgcgccgaaatacaccatggacagacggcccgggtgcctgagcagacggtcggtgatgctgatgcggcgaatgcgcttggcggttttatcgcttttgtctcggctcagtacatcggccgaataccaccatgacaggcccttcgaggcctcctcattggcggaggattcgtcgaagtcattggccatgggtcctcaagctcctcaactgatactgctgtatggtcatacggcatgccatcgcgctgcgcacggcacgcgtacggtgatcgcgcggctgtatgccattgtatgccgaagccttacgttaatcgactctgcggaacgttgtcggcgacgcgccacgaagcggcatttttcgaacacctgtacgagtgatgacggtgtctgcggctagaataatgagcagtgcgaccgaatcgacaggaggatgccatggccaagcgcaacgcggtggtggtgacgcataccaggctcaggcagaccggaaccgtagtggccgaggcggtgagccagctgcgagtggccggtttcgaagtcaccatcatcgacaacaccgaggcccccgatttcggtgtgcagccgccgtgcgtgtcggacgacaccgaaatcgtcgtggtcctgggcggcgacggcacgatactgcgcgccgccgaactcgtccactgcacccaggtgccgattctcggcgtgaacatggggcatgtcggcttcctggccgaattcgaaagcttccagatcgacgaggcgatccgccgggtcgccacccacgactattcgatcgacgaacgcatgatcgcccatgtggacgtctggctgcccggtgccaccaagcccatcgaggattgggcgctgaacgatatcacgctggaacgcgccgaccgaggcaagatggtcgaactgtccatccgcgtggacgatgtggagatgaactcgttcggcgcggacggcgtcatcgtatccacgcccaccggttccaccgcctacgccttctccgcgggcggtccggtcatgtggccgaacgtcaaggccctgcagttgattccgttggccgcgcacgccctgttcgccaggccgctgatcatcggctccggctcgaccttcaccatcgatattctggacgaatccatgtccgaaggctggatttgctgcgatggacgccgccagcgcgccctgccgcagggtacgcgcgtcatggtgcgcgaatcgcgcgataccttgcgcctcgcccgactctccggcgtgccgttcaccaaccgtctggtctccaagttcgatctgcccgtggtcggttggcgcgagcacgcgcgcaacgaggcctcgagccagccgctgcatcacgggcacacgttcccggcggccgcgtatgcggctggcgttgccggtgacgctggcgtcgctggtaccgagcccgacaagccgggcgaacgcgacggcaaggcaggagcctgatgctcgaagaactcgatatccgcaatctgggaccgattcgagaagccgccattgcgccggccgcaggcatgaccgccatcaccggtgagaccggcgccggcaaatccatgctgctctccgcgatccgactggtctccggtggggccgccgaatcctcgcgcgtctcggccggggcggacgaggcttgggcccaggcgattttcgcgctctcggatgatgccgtcgcatctgaacattccggcgacaccaacgatgccggtgacgatgccggttctgacgattctgacagcgggctcaccggtgctgccgcggccgtggccaaagcccacgacgcgggcgtcgaccccgaagacggcgaactgttcctttcccgcaccgtacgcgcttccggacgttcgcgggccgtgctcggcggcaagtccgtaccgcgttcggtgctgggggccatcgccggcgaactggtcatcattcatggccagaccgatcagctgaaaatcgcggccgccgcacggcaacgcgagtttctggaccgggtggccggagacgaagccgaactggccgcctaccgcaaggcgtgggatgcgctggccgccatggatgagcggctggaacgcctgcgctcgcaggaatcctctgcccgccaacaggccgactacctgcgcgaatccatcgaccgcatcaaccgaaccgacccgcagccgggggaggacgaggagctgaaggcgtgccgcgaacgcatcgaaaacgcggccgacatcgcccaaggcgtgggttcggcgctgggcgcgctggatgcctcgcaggtggatgtggacgccgccgacggcgcttcggccgtggaactcatcaatcatgcggtgacctcgttgcgcgcgattcgcgtcggcggcacgttcgccgagcaggccgatcggcttgaatccatcaatgccgatttgggcgacgtggtgttcgccctgagccaggagctgggcgacgaaggcagcgtggaggatctggaccagatcaacggccgtatccacgagcttggcgacctcacccgtcggtggggccccaccttggccgacgtgctcgcttggcgggacaaggcggcgttcgatttggaggatctggacgcctcgccggaaaaggtcgccgaactcgaatccgaacggcagacgctgtacgatgcggccctcgccgccgccgacgtgctgagcgccgcgcgcgtggctgccgctgccgacttgggcgcgcgcgtcactgaagaactcggctcgctcgccatgctgggcgcctccttggaagtgcgtgtcacgccgcgagacaaggccgatgatccgctcggtccgtatggtcgcgacgatatcgcgttcctgtttacgccgttcgaggggtcgccgcagttgccgatgggcaaaagcgcttcgggcggtgaactgagtcgactgatgctggccttggagctggtggccgccgacacgcgcggcggtgccgaccagaccttcatcttcgacgaggttgacgccggcgtgggtggcaaggccgcggtcgaattgggcaaacgtctggcacggctggcccgcagcgcgcaggtcatcgttgtcacccacttggcgcaggtcgcttcgtgggcggacgcgcagttcgtggtcaccaaggagccgccggatgccgatgacgacgatttgggcgtggtcaccaccatcgccgaagtcaacggcgaaacccgcgtccacgaaatcgcccgcatgctctccggcagcgaatccgaagcctcactagaccacgcccgagaactcctatccgattctcggcttacgctcccgctggcgggagctggcgccgcaggcgactgagggtggttgaagaagaaggggattagcaaatgaccaaagccgccatattcgacctcgacggcaccctcctagactccatgggagtctgggaccaagtcgacatcgacttcctgaacaagcgcggaatcgaagtgccgcccgactacatgaccaaagtctccgccatgcaattccgccagatcgccgaatacaccatcgcacgcttcggccttacagacacgcccgaagagctcatgcaggaatgggacgacatggccagcgtcgcctattccaccacggtcgaagccaaacccggcgcgcttgactatctgcgcgatctgaaagcctccggtgtcaaactgggtgtcgccacctcgctgcccccgcatctgcgtgagccggcgctacgccacgtcggcatgttcgatctgttcaacgatatcgtctccgtcgatgacgcgaacgacgtcggcaaggaccagcccgacgtctacctgcttgccgccaagcgcctaggcgccgcgccggtcgactgcacggtgttcgaagacctgctggtcggcatgaagtcggccaaatcggtcggcatgaaggtctgggccatgcacgacgactcctccgcctccgattggcccgaaatctgccacctggccgacggcgtcctcttcgacttccacgacgctccgcgcgtgctgtgataaaaaaaattacacccccgctggcggggctgtcggcgtaacggcgttgtttggcataggtgccccttcccgaggccattgtaggcgcggcccatgtttcgacactgtatgttggcaaggtgtttgttcactgtttagctgttatgtaacacaccttgacagttaagcagaacagttatattgtgttgtataacagctaaacagctggggtgctagtcaaccacaatcgaaaggggcataggtgaaactgatcatctcatccgtgtccggtgaacccatctacgagcaaatcaaaacccaaatccgttcggcggtgctcagcggcgagttgaaggcgggcgaggccttgccttccttgagaaagctcgccaaggaactgcgcatctccgtactcaccgtcaccagggcgtacaacgaactggccgatgagggcgtggtacagaacattcaaggcaaaggcactttcgtgatggacaagggcaacgaactgatgcaacgtcagctcaaaacccagattcgcgaaagcctggccgaggcaagccggggcgccaaagccgccggcattccgctggacgcattgggccgcatgctcgaagaggaataccgcaagaaataacctcaagaaaggaccatggccatgaccgccatatccgaatccgacgcgatggcgttgcaggtcaccgacgtcaccaaacactatgattccggcttcacgctggacgacgtgaccttcgacctgcccaagggctacatcatgggactgatcggcccgaacggcgccggcaaatccaccctcatcaaactcatcctcaacatgatccaccgcgacgccggttcgattcacgtactcggcctcgacaacatcgccaacgaggagcccgtcaaagaacaactcggcgtggtgttcgacttcagctacatgcatgaacagtggcaagtcaagaacattgaacgtatcgtcgcgccactgtatccatcatgggacggtggatgctatcgcaagtatctggatactttcggtcttggtgacgcacagaacggcaagaaacatatcaaggatctttcccgcggcatgcagatgaagctgatgctggccatcgcattgagtcatgatgccaagctgctgattctcgacgagccgaccagcggactcgatgtgcttgcccgcgacgaactcatggatatcctgcatgcctacattgaggatggcgaacattcggtactgttcagcacccatatcactgccgacctcgaacgtgctgctgacttcattacctacatcaccgatggccgtctctactacaccggtccgaaagacgagtttgaggaatcgttccgcctgattaagggcggtccagacgaactggcacaactgcctgcggacgtggtgctgggctcacatacgtatgccaccggattcgatgcgctggtccggtcagacaggcttgatgctgttgcgtcggtggtttcggggcttgtcgttgaatcggcttccattgatgacatcattcgactgaccaatgcccatgattccaatcgtgacttgagcgggaggtgagcggccatggaggcaatactgagggtgtcgcggtctcggcaacatgcattgaccactgcattgcgcgtcgatatggcctacctgtgcgtcggcgaacggactgtgttctcgttgttgttggcaccgttgttctccgtcatctttcaaggtgaagcttatggggatggcttcggctatcgcatgggtgtcatcatgacggtattcacctgcgccatgtgggtgctgaccatggcggttgctgacttacagaacggatatcgacttcgtggcattattccggcttcgaggaagagtcaggtggccgcgcgatatgtggttggattggtgatttccgtattgtcgatagcgatgattgttctgattgacgggttgcaagtgctggtcaatccggattggtcattcgcgggcaatctgtgggcggctccgttgggaggtttctgcaccgcgctgatggtcgcgcttatcgtgcccacgggttatctgtggaccaaactaggcggtcttcaagtcacgatgatggtgatctatgtcgttgtattggctggatccatactgctatctatttcgcctgcttcggtgaccagaggattggcccatgccgcgaatgccatcatcgcgcaacgattgtggctggttattgcggtattggcaacgacggttgtggcatatggaatctcgtatgtaattgcctctcgcatatttgcttcaagggaatggtgacgatgagctggaaatccgtagtaaagcaatgtcgattcgattgtgttgggacaggtctgtttagcgtagcgaatatggtatttctgctggttttcccggtgctgtctatcgtggtatcgctggtgatgatatcgacccacgtcgatgaacacgttgccagtggtctgatgggcggactcggaggtctggcatcggtgatggcatgtatgagtgcattggggcctgcgtcatccgaggaatctgcagggcacagtgccatgcgagggctgattcctgtttcacgcactgcacaagttgtaggtcggtacctttttctgttggtggttggcctgctctgggctttggacgtggtgatatgcggcggcgtcttcattgtctttggcgatatagcagatatggggtggattggtaccttggcagcaggtgcttccatcttcgctttggctatcattcttgggtcggtgctgctggcctgtgcataccggttcacctcccgcaagatgatgatggcctctggcgcggtcattgtcggcttgtatgcagtcattgcgctgctggcccgattgcctgttgactggcaatggctattgctgaatattgccgatttcctgacgatctggtggcatacggcgcttgttctcgccgtgttgtgtctgctcgcatattttggctccatgcttatagccatccgcatctaccgagccaaagaactctaaccgcgcatctgtccgaccgcgatgatcttcagccacatgtcgatcggcagcggcacggtgcggaacatcgctccgccgaactgcaccaccagcacctgaagtgcgaacatcagcgcgaacacgccgatcatcaccttattgcgtagcagattggcgaacaggctggcgttgcccagctcgcggctgttgaaggcgttgaacagctggaatactacgaacagcgtgaacagaatggtcgactgctgaacagctggaataccacgaacagcgtgaacagaatggtcgactgctgttcggcggtgccgcccatgaagttcgtccagcttcgcgagcttctcctgcagcggcgtcataccggtgttggcggctttggcgctcggcacgctttattgcggtttgggccgagcccttcgccgcaatgctgtctactccctcatgggactattcagttgcaggaacagaatctgacaagccacatggattttcccattcgccggcagcatggcgattcccgccttcctagaaaattcaagcaacacgccgttggcccattgccggatgttcaaccgagattcgcatatcttgactcatacggcaaaactgttatatttgatgtagaacaaatagaacagttcttgagaggggtggaattgaccgtgattgtggaaatcgatcagcgcagtgacgtgccgatttacgagcagctgcaccggcagttcatcgcagccatcgcgggcgatgagctgtcgccaggcgattcgttaccgtccgtgcgctcgctggccgtggaccttggca

SEQ ID NO: 3907 - DNA, 34444 bp, Unknown
  R22_24m  MAG No. k141_11137
caacacgtgtcttcagtttggcggcgctgccggtaccgcactgttctccacgattctttccgtggctcaggccggcgcaggagaagaaggcaccgctgagtttgctcacgccactgccgtcggcggcacatggacgtttgccacgatgacggttatctgcctgattggctggtgctgtctggccaccgcgttccgcattcgcgcctcacgccggcgcgcctaagaccgtcagtccgcggcccgcgacgcctcccgcccggattcgtcaccgtgcagtatcgggcgaatcttggcaagacgctggctgacttcgtgttcatagccgcgatcgttgggatggtagtactcggtgccacgcagctcttcgggcatatattcctgtggcgccacggcaccgggccaatcgtgcgcatacttgtagccctcgtggttgccccactctttcataagcttggtgggggcgttcctcaaatacagcggaacagcgccgatcttgccggtatccacgtccgcgagcgcctggttaatggcgttatagctggcatttgatttgggcgcggtggccacggcaatcgtggcttcggccaaaataatacgtgcctcgggcatgccgaccagcgccacggcctgcgccgcggccacggtgacctgcaaaatctgcggggcggccatgccgacttcctcgctggcggcaatcatgatgcgacgggcgatgaagcgcggatcttcacccgctttcagcatgcgcgccagataatggatggcggcatccggatcggagccccgcatggatttgatgaatgcggaaatcacgtcgtaatggtcatcgccgtctttgtcgtagcgcacggtggcggtgtccattaccgtagccacgatttcggaggtgatgatgggtcggcgtgcgccctttttgcgggcttcgtcgccggtgaccgcgccagccgcggcctccagaatcgtgagactcttgcgtgcgtcgccaccggccatgcgcacgatatcggcgatggcttcgtccgtggctttgacctcgtccctgagaccgcggtcatcagtcagcgcgcgctgcaccagttcggtgagctgatcaggctccaatgactcaagcttgacgaccaccgaacgggagagcaacggtttgatgatggaaaagctcgggttctcggtggtggcgccgataaaggtcacgtcgcggttttcgacggcgggaagcagcgcatcctgctgggatttggagaagcgatgcacctcgtcgatgaacagtacggtttcccggccgcgtgacacgagccgttcgtgagcgcgggtgagtacgtcgcgcacgtctttgacgccggaggtcacggcggagagttcctcaaacacgcggccggattggccggccacgatggtggcgagcgtggtcttgccgacgcctggagggccgaacaggattacggagctcggcgcggtgagactgcctttgctggccggattggcgaggcggcgcagcggcgagccctggcccaacacctgcgtttggccaatcacctcgtccaaagtgcgtggacgcatgcgcaccgccaacggccgtgtcatcgactccggcgcatcagccgccccaaacaaatcgttctcactcataacgtcctatagtaccccagtgttcgaacagacgttcgagctgcaccttggcttccctcagagaggggagccaggaatcagttactcaccttgtagtcgtggaagactacttcgccggtgtcttgggtggcgtcaaggtccacgatgccttcgatggcccagtcgtggtcgccatcggaatcatcgataatctgacgcaccttccacgtatgctcgtcgttctcgtgcttgtcatccaacatgaacagttcgggcgagcgcgcttcggcgccgatgcccacgtactcgtgctcgtcgtagtagtcgtcgagcacatcttcccattcgtgcacgccgtagccccagtccttgtcgagcgcgccgagcttgtccggctggtcaaggtccataagccacacacggcggaacaaggcattgcgcaccagcacggtaagaccacgacggtcctcgaccaccgcgctttttgcgccgggcgcggccagggatgccgcagcctcggattggtcagccgagtcaccggcgttctcccattcgtccaccagcgaggagtcgatggagcgcacgagcacgcgcagccacgagatgatgtcttcgagttgctcgtcacgcttttcgggcggcacggtgcgcgccagcgtgcggtaggcgtccgagaggtagcgcaacagggtgccttcggagcgggcgatgttgtatcgggtgatgtatccggtgaagtcggaggcggtttccaccatgtcgcgcaccacggatttcggcgacagccagtagtcgttggcccacgggacatcgtggcggtactgatcgaacgcggcttcgagcatgtcttccagtggcttcggatacgtaatctcctgcagcttatccatacgctcgtcatagtcgagtccgtcggccttcatatcggccatcgccttgtctcgggcctgacgctcctgggcacgcagcacctgcttggggtcttcgagcgtggcctcggccatggagatcacgtccagcgcataggtgtcggactcggggtcgagcagttcgagcgcggccagcaggaacggggagagcggctggtcgagggcgaagtcgtccggcatatcaagggtcatgtagtagtccttgccgccgtccttgcggtcctcggtttcgatgacttcggtatcgaacagggtttggaagatctcgtcggcccgctggtgcagatgctccttctggtcgggggtctgcgcggaatcgtcgatgagatcgtcgatacgggcacgggcgtcaccgccctgcgccacttcattgagcaccatcgaatgcgtgattttcaggtgcgggaccagggtctccggttcagcgtcgatgagcttatcaaacgtgctctggttccaggtcacaaaaccttccggcgccttcttgcgcttgaccttcttgagtttcttcggatctcccccggccttggcgatggctttctggttttcgatttcatattcgggagcctcggcgatcaccagtccctcggtatcgaatcccatacggccagctcgtccggcaatctggtggaattcgcgggcgcgcaggcggcgcatcttggtgccgtcgaacttggtcagggccgtgagcaccacggagtgaatcggcacattgatgccgacgcccaatgtatcggtgccgcaaatcaccggcagcaaaccctgctgggcgagctgttcgaccaggcggcggtagcgaggcagcatgccggcatgatggatgccgacaccggtgcgcagcagtcgctgcagaatcttgccgaaggctgtggtgaacttgacgcctttgatggcttctgcgatggcttggcgctgttccttgctggatacaccggtggaggcgagcgcttgcgcggtctccaatgcggcgtcctgcgaaaagtggaccacgtaaatcggggtttcgccgttacggaaggcgagttccacggttttttccatcgggtcgagcgtgtattcgtagctcaacggcaccggtcgcggcgcgtcggcgattacatccacgtccggggtgtcgttcagatcggagagcttgtcggcgatggcgtccacattgccgagtgtggcgctcatcagcaggaactgggtctgcggcagcgtgagcagtggcacctgccacgcccagccgcgctccggatcaccgtaataatggaattcgtccatcgccacgaggcccacatcggcatgggtgccttcgcgcaaagcctgattggcgaggatttcggcggtgcagcagatgatcggcgcgtccgcgttgatgtggctgtcgccggtgatcatgccgacattgtcgcggccgaacacttcgaccaagtcgaagaatttctccgacaccagcgccttgatcggagcggtgtaataggagcggcggccagtgcatagggcggcgaagtgcatgccgagcgccaccagcgatttgcccgaaccggtcggggtattcaaaatcacatggtcgccggccaagaggtccataatggcctcttcctgatgcggccacggctcgatgcccttgacgtcttccacccagccgaagaaccgttcgtagatgtcgtcggccgtaagattccgttcgcgtccgtcgccgtcccattcgggggccagccgccccagggatccgtattccttctcgtcagtcataatgctcagtctacctagtggcctattccgacggcacgagccgccctccgtcgctatgcgacgcctcccgccagcgggcggagccatgcgaagagctgtgccatgcacttggctccgccaatgggaggatcgctcacgccaaccggcggcgcacctcgtcggggtccacctcgggttcgaggggaggccaggtcatgttcatgttcttcaaggtggtgcgcagcagttcggagaccacggctcgcgaataccagcggttatcggccggaacgaggtaccacggtgcggcggccgtgctggttttctcgaacacttcctgccaagcgaacatgtactcatcccatcggtcgcgggcctcgaggtcggagatatcgaatttccagaacttggtgggatcatccagcctcccaagaaagtgttttttctgttcttcctggcttaccacgaggaagatcttgaggatggcgcatccgctggcggccagttcacgttcgaaatcgttgatctggtcgtagcgggcacgccatacgtcttcgggataggtgccatagacgtgcggcatgaccacatcttcataatgggagcggtcgaatacggcaatccaccccggcttgggcaattcacgcttcacacgccagaggaagtcgtggtcgagctcctcggccgtaggcttgccgaagccatggtaatggatgcccatcgggtcgccttggctgaacacgtgacgcacaatgccgcccttgccggaggcatccatgccttgcagcacgatgagcagccgccgtgtcgagcctttgacgccattcgcgtacatgagccgctggtatcgggcgatttcggaggagctgatcgaaatgaacttctcggcgtcctctttattgccgtcgaatccgggagtggaatcgccttcgacatcagtgacctgcatgccgtggtggaacataagacgttgagcgggcggcaacgaccatacggcgctgagcagttcactggatttcgccgcacgcgccagtcgttcaggcacgctggcactggagtcgatggtgtctatgcgatccaccgcgagctgtaataccttgtcgatccgtcgatcggttttggattcctttcccttgccgttcttgttgttctttcctgaggattttccggccgtaccccacttgccggcctcttcaggctcgttggttctgtcgtcgtccttggtcatgctcccgattgtacgtcttgtaactcaggagacctagcaacgtagcgacattcacatttcgcttgttactgcaaatctataggcatgcagtcgttcggaccgtaattgttggctttgcaccaattccaagcctcatctgtcgagtcgaagccctcaccggcaagaatcacatagtatttgtcggaattgctgctgtaggcgggccagtcacccgaccagataagcagtacgtttgaattcttgttgtgcatcgtgatgaattgcgcaagaatatcgcggtagttccaggtcttgccttcagcctccatacccttacgcttgctggacagctgtgcggtatacgtggaatagaacagctctgcggagtccttgtcgtgctcgacctgccaatccaatgccttgcttgcattattttcggcttcgtcatccgtaacgttgctgccgcttatcacgcctggatcagacgatccccagcaatatcttctttccggcagacccaccggaacgcggctgcgcagcgccaccgttgcctggcgccgtcgacaatgtcgaagtaggtgcggtcaccgtgttgaaacttgggggcaacggcatcgaacccgctggcacctgctggggagcagccggtaccagcgtcgggccatccatcgactgaggacttgggcttggcgcagactgtgccatcggcgcaccgcattccgtgcagaatcggcttccctccggcatctccgttccacatacctggcacttcatactctctccgttctctctcatccctatcggccaatcccccgtccgtttgcagtacataaagaagcggcaaacggcccgaaacatacctgagccatcaggaagacggcacgatctgctacgagaaagagatcatcaccgaccggcaaatcgtcggcatcatgctgaagcatccgaccagcgcacgcggcttcaagcgctacttgcgcgccgcatcatgacgcttgaccacgatgatgacgccacccgcagcgaacagcgtcgccagaaccacaaccaacgcaaccgaggcaccggtattggccgtatgttcggtctgctgtggcttggtgctgccattggcattgacgctaccgtcatggttgccgttatccttgtcgtccgtcccggtggacactccggtaacggcaacgggcagagcgaccgtggtcttattggtcgcaccggtcactgtcaggcttatatcaccggtcttggttccggcgggaatcgtgaccttgagctcggcggtatcgccattcgcaacctgtgcttcgccgaccatctgctcgccgatggtggcggtcagcttcgtctcgtcaggcacgcccagcgaggtgagcgtgagcttcgagaagtgcagggtgaacgagccaccggccttgaccgcaccggtcgggataccggtgacggccactgcacggcggtcgtagcgcggggcaaccggattgttgtccttgagatagtcgatccaggcgtcgcggtccaccaaaccggtgtccttggtgttcgtgccttgggcgaaggcgcggaagttatcgccgccctccaacaggaagctgaacgaaccgatacggtagttgcgtttcaggtccagaggctcaccgttgacggtcaccgaggtgatgtgatggccttgcgcggcatccggatcatacgtgtagctcacgttgtgggacagtccgagttgcagatacgcgcgcgatggcgtgctgccgtccgcgttcgtctgccactgctgttccagcgcttccttgaactgcgcgccggtaagcgtggtggtccacaggttgttcaggaacggcagtaccgcgttggcctgggcgtaggtgatattgccgtcggcatcgagcgtgcaggcgtcattggtgccggacttgcagaattcggcacgcagaccgccggggttgaccacaccgatttcggccgcgccgcggtcctcgcctttgagcgaatcgagcagcgcatcggccaccagattgcccatggtcgattcggaggcgcggtcgtcacgcttgccgtccttgaatgcggtggtgatatccgcagacaccttgccgaccttctcgctgcccttttcatcggccaccttaagggcctggtacacgatgtccttcaccttggcgacagtcgggttcgcggcggcgagcaggccatcgttgtattcggcgtaatcgttgtagtgcggatcatttttgtcggcgggctgcgaagccacctgcacggccgtgttgccggacttgtcgtaagacaccgcaccggtggccgtgttgtaggtgagcaccacttggccgatgttggcggcatagctaccggtctggatgatcggccggttgttgtgcgcgggatcggtgtacgagtacttcatgtgggtgtgtgcagtgaagatcacgttcactgccgcatcggtatcgtccacgatcttcttgaacacggggctggcagccttctgctcgtcaagcgtgggcttggcggtggcgtcatcttcattagaggctgcaccctcatggtattcggccacaatcacgtcagcctcgccattggattcgtcaccgtcggtgagctgcttggccacacggttcacggcctccaccggatcgccgaattcaatgtccttgacaccaccgggagccaccaatgtgccggtttcctgagtgaccgcaccgatgatgccgaccttcacgccgttcacttcctgaatactgtactcgggcagagccggggttgtggtgcccttcttgtacacgttggcaccgaggtaatcccattgggcgttgcgcgcgccctccttgccaatcacacgatcggtaaggtcggcatagccttgatcgaactcgtggttgcccaccgccgaagccttgacgcccaaagcattgagtacatcgatggtcggctggtcctgctgtaccgaagagttgaacagcgaagcaccgatattatcgccggtggacagcagcagtgatgagtcagggtattcgcccttgagctgctcgatggtggcggcgaacggcacggtgaggttcttgtcgatacggccgtggaaatcgttgaagttcagcagattgatggtggtgctggcgggaaccggctgattggttgccatatagcccatacgcaatgaatggccattggtcacgccgtcgtctgcccagaacaccggcttgtacaccttgccatttactaccttggtggcttcggtatcaggggtgatggcaaaaccttcggtgttctgcgtacggatttcatccggagtgtcggtcagcttggtcagctgcagcacaccgttcttgaattcgtaggtgccgattttggcaccggtgttcgcgtcattgtcgctttgggcgagcaactggttgtgctcggcgtcccaagtcagatcgcgcgggccatcatagccggcgttcaccgcggactgcggcaggtcgatgtcggccaccggatgcaccaggtcctcatcattcacggtttgcagtgcgaaagcgtagatatggccggttttctccagtgcggcgaagaacagaccgccgaaatcattgccgaaaccgtccgggtcgtaggtcattacgttcttcgggtcaaggttggactggaatccgttggcggtcaggaccgagtcgggaataaaggctatgccttccaccccaagattggcgtccgctccgtggcccagcgtcacgccgaactgcgtgagtgctgcggtgagattccactcgtgcgtagcggtcagctcttgcgctccgtcgccgttggcgtcggtggttttcgcggtcacgtcatactgcagaatggaaggccgcggcacattcttgttttcgttgtcgcgctcggcgccgatgaatatgcccttggatgaatctccgttgatcagcgtgatgccttcggagtccacaccgcccttgccgtccttgaagtgcagctgcttgccgcccttggtctgaccgttgttggtgaaggtccagccatcagtgggatcctgctgccatgtgccgttctggtagacgaacttgttgatggagccagggcccttatcagcggtgttgccgagcgtggggttcagatcgttgtcggccgcccacagcacgccttgcttgccgtctttaccggcttcatacaccagaccagacagattgccgtcagtgtggtcgccgccttgtcctttggcgccaaattcgccttcggcacccactgtggtcacatcggccaatcccgaccatgcgtccacggtcatggtctcgccggcgggcggagtcggagtcgggtcatcgaacacgttctgtgcaccgggcgtgggcgtatcggaaagcgcgaaagtgccatcgtccttacgggaccacgactgactgtcgctcatcttcttcacgccggttgtatcggtattccatgacgtggaatccaccacatcgctatcggtaaagtcgccgctggtagtggtcagataggcttcgtcggcatcggaacccaggccgggctcggccttgtcggggtcgatgtatgccaccagatatccgccggctttgatgacggtgtccgtattcgttacttcgctggtgccgatggtgtagtgcttcttggctttcttgccgctgtcgtagatgccccagcccttcacgtcaacgtctgtggagccggtgttcttgagctcgacccaatcgcaacgcttgctatccgggtctccggcagctttcgtattgccggcatagacctcgttgatgattacggatggtttggcagccgtgttctgttcggcagtggcctgctgctcgtccgcagccgcagcgggcacgccgatcagggcgatgctgctcagtgtcaccgcagcggtgagcagcgcgatggcgcgccgcgacatcgcggtgaaattgttggtgtggaacattactcccgttccttcctcgggttgtgccgccgcagcatgatgctcttcggcggatgacaccccgagagtatgagagagaaatgaagccgacaccgtatgaaggcaaactcggcagatctccaaactgaactttggctgaattaccgctgaagctggttcttggatttgcgtcgaaccgtccgtattccgccgacaatcgcgattacagcggtaccgatggctacgctgatcaacgccggtcgttgcgcggcatggagggtggcgagatccggtccggccgcaatggcgctgttttcacccgccgagccatcagacgccgggtgattgcccgcgtcggcgtactgggcattgaccacactcgggccggtaagcgccacttggtcggcggtctcgaccttggccacatcgccgtgcttatccaaggtgacgcgggcgcacagggctttggcccagttgatacgctgccagccgtcgctcgattgccatagggggtatccggaatccaaggcagtggctttcaaaatcgcgttgcgctgatcggcgtgcagttcgggataggccagtcgcagcacgtccgccgccccgcgcggtgccacgaaatcagcgccggactgggcggtgtcttgcgggaaggtgtaggtcaggcgtgcggtgtagacgcgcacggccgaggcctggtccgcgaccggctcggtggccaccgggtccagaaaatcgttggtgtagccgcccgaaccggaggccttggtgttggcgatgcaggcggcgagggtagtgccgtggccgtccgcggcgcagcgggacaccagatagtcccgcagctgccgggacgcgggcacgatggacgaagcgaattcgttatgccagtactgcccgttctgggcggatgcgccaatgcgcccgcccatgatgtcaagcggataatgcacgccgagcacgatgcggttgttgccggcctccgaagtgcgggccatgatttgcggcgcgagttcgggaatcatgccggccagcgcgataccccacgaataggcgccggtagtgtggccggaggggtaggaactgtttttctgcaagttcgagtagccgggcacgtgttcgagccatgagggtgattgcttgatgtcaagcgtggcgggcagtccggcgagatcgttagtgccgccgtagctgctttccgcacggttcagataggggcgcggatgcatggccgcacgttttgaggcgtaggtggaggccacgttaaaggagaagatatcggcgacggcgttgagtttcccggatttgagcccttcgctcatatatttgccaagcaccggaccgagcgcgtccggcatggcttcctcggcttgcagatcggagtcgacgagcgcacgcttgcgttgggcgttcaggccatccttatcgagattttcggcggctttgtggttaatggccacggccaaatcttcgtcgagtttcattgtatcggcgtcgagcaccttgccaccgtgttcggcatcggtgggggcctgccaatagttcttttcgtagtcggagagcaatgccacccaatccgggttgggcagctggtcggcctgtgcgattgcaggcgtcacggctagcgtggccgccaacgccagcggcgcaatggtcgcaatagcaaaaacggaggataggtgccggaacatcttcatatgttccaacctatcctccgtgaaggctacgtagccggagcccagtcaaacactcagtaaattcttcgtgccggcttagcggcgattgagctgactgtcaggcctctgactcgtcttcggacttgcggaacgccgggaattcgccggtttccgggtcaacctgtgactcgggctgggtggcgtcatatccctgttcgtagcgggtgcgccgccagttgcgaatcgaggcgttggtgccacggtgatgcacatggtatttgcgcggcgtaccgcccagcggcagctcttcgacctccttggccacagcgatctggttgacattggacgggtcgccggcggcgatcggcgccacgggctcggcctcggtgggcgcggccgtacgctgctgcatgcgcgagggcagccattcggcgagcctcgacaacagccagcaggcgacgaagtagatcaccgcggccatgaccagcgtctgcaggatgttgaagtacatcgagccgagtcggcgcgattcctgcagcaggtcggtatacatgatgatcgagcccagagcggtatccttcaacaccacgaccagctgggtgacggcggccggcagcatggcgtagacggcctgcggcacctcgatctccatcagcgactgtgtttcggtcaggcccaaagcgagcgaggcctcgcgctggccgcccggcagattgccgacgccggagcgcaccagttcggcgaccaccgaaccgttgtacagcaccaaggccagcaccacggcccaataggacgggctgggcaggcccgcgaacgcgaaccatcgccagaagaagatcatgagcagcagcacgggaaccgcacggcagaactcgacgatcacggcggagacgccacgtaccaacgggttcggcagcagtcggcccacgccgaacaccaagccgaacaccacggcacccaccacggccacgatggtggccttgatggtcatccacagtccgggcaggtagaagtcggtccacgcctctcgttcgacggcgggcttccacagctcccagctgagctggttctcgccgtccggcgggttgtgcaggcgcatgaggataaacacgagcaccaccgcgaacagaatgcccgcgatccagttgacgatgcgaatggtgcgccggcccttgggacctggcgcgtcgaacagcacggaattcgaagtatcggccatatccgtcacctccttacggcgagtttgttggacaggtacgtggtgagcatgccgatggggatgatcaggatcacgtagccgagcgcgaagatcaggaagatttggatgatcacgtcgggacggaattcgatcatctcgctcatcagcgaggatgtttcggtggccacggatgcggcggcggccacggtggagttcttgagcagggcgatcagcgtgttgccgagcggtgccacggagcctcggaaggcctgcggcagaatgatctcagtggcggactgcatgaagcccaagcccagcgctcgtgcggcctcggcctggccaatcggcacggtgttgatgcccgaacgcagagattcgcacacgaacgccgccgtgtacaggctcaggccggtgaccgcgagccagaagaagttcgtggtgaaggtgtcggagaagctgagcttcagctgcgcgtaggcacccagcaccatgaacaccatgatgatggtcagcggcaggttcttgaacagttccacatacgcaccggccacggccctgagcgaggaaatcggcgagatgcgcatcaccacaaggatcacgccgaggatcagggagaacagggcggaccatagggtcagttcgatattgaccagaaacgcgccgagcacgtcatactggctgaagagttccaggaatccgctcatcaggcctcctctccttcgtccggggtgggcgggttgtagcgtacgtcgggcgtgtagttggtgcccttggtgttatcgctgatggcgttctcccacgagccgtcctgaatcatgtccacgatggcgttgttgattttggtggccagctgcgtgtcgcccttcttgatgcccacgccgtagtgttcctgcgtgaacggtttgccgaccaccttgagcttgccgcgcgaggcggaggccaggccggccaggatgatgtcgtcggtggttaccgcgtccacgatgccggagaacagggcagtggcgcattcggcgtaaccgggctgttccataagctggacttcggaggcgaacttctccttgacggtggcggcggaggtcgaaccggtgacggagcataggcgcttgccgttcaggtcttcggggccgttgatggagttgtcgtccttgcgcacgagcagatcctgtccggccacgaagtacgggccggcgaaggagacggccttcttgcgctcgtcggtgatggagtaggtggcgaggatcatgtccacgtcgccgttctgaatcatggcctcacgctgcttggagggagcttccttccagatgatctggtcttcggaatagccgagtttcttggcgatgtacttggccacgtccacgtcgaagcccacgtaggtgccggacttcttgaagcccaggccgggctggtcgaatttgatgccgatgcggatcttgccggtttcgtccgcgccgcaggcggccagcgacattgtgcaggccacggcggcgagcgcggcgatcacgcggcaaaccttccgtttgaacgtattggtgaatgtcattggattgcgtacccgtctttcagtgggtgaggatcttcgagaggaagtccttggcacggtcggtctgcggatgctcgaagaactcgtcgggcgtgttctcttcgagaatctggccgtccgccatgaagacgatgcggtcggcggccttgcgcgcgaagcccatctcgtgggtcacgcagatcatcgtcatgccttcatgcgcgagttcgaccatcacgtcgagcacttcgttgaccatttccgggtcgagtgcggaggtgggctcgtcgaacagcatgaccttggggcgcatggcgagcgcgcgggcgatggccacacgctgctgctggccgccggagagctgggagggcatcttgctggcttgggagtcgacgcccacgcgggcgagcaggtccatggccagttgctcggcctccttcttgtccatgtgacgcaccttgatgagggccaacgtcacgttttcaagaatggttttgttggcgaacaggttgaacgactggaacaccatgccaacttcggccctgaggttcgcgagctccttgccttcctgtggcaggggcttgccgtcgatgcggatgtcgccggaatcgatggtctcgaggcgattgatggtgcggcacatcgtggacttgcctgagccggacgggcccacgaccaccagcacctcacccctggtgacggtcaggttgatgtccttcaggacgtgcaaagcaccgaagtgcttttcgacgtgggtcagttcgactagcggacggttcaggtcctctttgccgggaaccagcggggtcaatttggccttgcttggtgatgttgtgcttgtcgtgcgcgaacgcactgctgtttcattgttcgtttcagacatgagtgggaggatagcacaccgacgtttccaacgtgttcacagtatgtccacacagttgctcagtcgatgtctcatttccgcatcagacatcgtgaaggcggcattgggcatcggcatacattctcgctgagtcgcgcatcgctcggcgtctgctgtgcgctgattgcctgctgcgtggtggctgagacgttgctgcgacggcaaagcgggcacgtgttgtcctatctgctgattccatgtttggccttggtgtcgttggcgttgctgccgtgtatgccgcagtcgggcgcatggctggcggtcactttgtattgtgtggggctggtctcgccgtttcccatgtcgtattcgtataaatgtgctaggcattttgagcgtggctagctgttcgcacacgatgagtgctgttatacggtggacgacactcccgaagcgcggtggataaccgggcgcggcacacgatatgccggtggataaccggttcgcgccgcttaagttatccccattttccagttttgcccctgtgccaccgtggaatgcgctacgctcggcgcatgaacggatacagcgaagcgccgcacaatggcgaaatcaacaactatctgcgcaaagatcttgacgccaaagccacggccaagaacacggcctgttggaatctgctgggcaaagtgcgcacgaaacgcacgttgtgtttctcgctgtataccgcattggaattatgcggcgtggagttgccgaggcacagcacattgccgcagaaggatttttatgtgacggtgaggagcaaggggacccgctcttcattggacaatgtcgactatcgcatatggaatgcaaagttcagcagtatcgctttttcaaacggcgtaacctgcatgcatcccatggatgcgtggatacagtttgcccaatatctcaacctcactgaattagtggtgctggctgaagcgctcatcagacgttatggatatgccattgaacaattcactcaacgactaacggcctttcaccgcgttattggtcgtgcgcgttgtgaggcggcgctgaagctcgtaaaaccatcggattccgttcaggaaactcgtacacgcttggcgcttatgcttttcggcctgcccataccgcaaacacaatacggcattaccgattcagagaacggatacacctataccgttgacatggcttatccacaatacaaagtcgctattgaatatgatggcgatcatcaccgtcgcttccgcaaacaatatgtgcgggaccagcaaaaacgtcgacgtctgcggcaattgggctggaccgtcatcgaggtgttcgccgatgacctgtggaacaccgccaaacaacgtgccttcgcacaagaggttgccaccgcgatgcaaataccgcttcctggccgtcctcaaccttcatgccgggtattaatagacggcagccttaccatcaatgcgcgcaaaggggaatacaggaggcggaaacaagcaaaacacaacaaagcatcacaacattaatcaaatacggagttgcgatcgctcctcatggggcggcaattcccccatgaggcggcaatttgcccatggggcggtttgaagaaattgtaaaaccgcggaattaagccattttgacctaccgccccatggggttttcaccgccccatgggttgtttaccgccccatgggttgtttaccgccccatgaggaagttaccgccccatggaaggataatcggcaaacgccaagggggacaccgcatggtgcgaggtttgccgcatggcggaggtgccatcgggcggagtatttggcaccccttggcaggtatttggcacattgggccccacccgcaaaaagcaaatggcccttggaattattccaagggccatttgcggctaatagcaccggagcattactcctcgaaaattaatctacgcatgcggagaccgccgttcgaagccgaaggcgcactaaggtgcgtcgagtgctgaggaaaggcggtatacgctccgtagattagttttcgtcggcgtccgggtcgtagtcgacgccagtctcggcgcgctgctcgtcggaaatcggggccggagcaccggtcagcgggtcgcggccgccgccggccttcgggaaggcgatgacgtcgcggatggagtcggcaccggccaggatggacacggtgcggtcccaaccgagggccagacccgcgtgaggcggagcgccgtacttgaatgcctcaagcaggaagccgaacttctcgtcggcctcttccttggtgatgcccagcacatcgagcacacgggcttggatgtcgtcgcggtggatacgtacggaaccgccgcccatctcctcaccgttgcagacaatgtcgtaggaatcggacatggcgtgctcgggatccttgtcgaacttgtcgatccaatccttgctcggcatggtgaacgggtggtgcatggaggtccacttggagtggccgacagccacatcgtcatcatccggatcgtcggtgggcttgaacagcgggaagtccacgacccaagtgaaagcgaacttcttcggatccagcaggccttcgcgggaggcgagctccacacgcacggcacccagcagcagctgggcggactcgcgagaaccggcggcgaagaagacggcgtcgccgtcctcggcaccgacggcctcgcgcaggccgttgcgctcctcatcggacaggttcttggcgacggggcccttgagttcgccgttttcgccgaagaccacgtaggcaaggcccttggctccacgctgacgagcccaatcctgccaagcgtcgaactgacgacgcggcgtggcggcaccgcccttgaagaccacggcacccacgtacggggcctggaacacgcggaacggcgtgttcttgaagtactcggtcagttccaccagcgggttgccgaagcgcaggtccggcttgtcggagccgtacttgtccatcgcatccttccaggtgatgcgcggtagcggcagctggacctcatagccggcggacttccagatggcggcgatgaccttctcagtcatggccatcacatcttcctggtccacgtaggccatctccatatcgagctgagtgaactcgggctgacggtcggcgcggaagtcctcatcacggtagcagcgggcgagctggtagtaacgctcgacaccggagaccatgagcagctgcttgaggagctgcggggactgcggcagggcgtaccaggaaccgggcaccagacgggccggcaccacgaagtcgcgggcgccttccggggtggacttaatgaaggtcggggtctcgacctcggtgaagtccatgtcttccagcgcgtggcgggcggccttagccatgtcggaacgcagcttcagattgtgctgcatggacggacggcgcaggtcgaggtaacggtacttcagacgcacgtcctcgcccggcagcttgttctcggactcattctcaagagcggtggaaacctggaacggcagggcgtcggacttggcgaggatctcgatggtctcggccacaacctcgatcttgccggtggccagatgggtgttctcgttgccatccgggcgcaggcgcacttcgccggtaatctgaatcacgaattcactgcgcagcgggcgggccatatcctcgtcgtaaatgacgacctgcacgaggccggtcgaatcacgaaggtcgatgaaggccacgccaccgtgatcacggcgtcggtcaacccaaccggcaagggtgaccttctggccgaccagggcctcggtcacttcagtggcatgatgtgttctgtaagccgtctggctcattatcttgtttctcctcgatttttcgcgcgaatacgtcagatttcgacggtttgctgggcaaccacagtatccggctcccacgacgtgcaatcggcggcaacctgctcgcccgtgacgatgttcttgacctcgtcgccagcgggctctgcgccttccgcaccttcggcagcggtggccgggaaccacacgtacggaatgccgagtttgtccgcgtacttgatctgcttgccgagcttggccgcggtgggtgccacgtcggtggcgatgccgcgcgcacgcagttggttcgcaatacggttggcggccgggcggtcctcttcattccacacagcgaccagcacggcggccgggctgacgcggttggcgtgcgcgccggcagcgtgcagcatgtagctgaccagtcggctcaggccgatggacaggcccacgcccgggtacttgcggttgccctgggaggcgagattgtcgtaacggccaccggaacagatggaaccgagtgatgcggcaccgtcaaggaaggtctcgtagacggaaccggtgtagtagtcgagaccgcgggcgatcttcaggtcggcgatgacggaaccggggcggatggcggcggcctcgtcgacgatcatggccagggtatcaagtccctgacgagccagcgtgtatgcctcggaatccttggcgatgccgtgagactcgcacagcgcatcgaacttggcggcaagctcggcaccgtcggaggcggtgagctcggccaattcgaggcaggcgcgtgcctgtgcttcggtggcgccgcaggtctcggtgagcagtcgggccacctcatcggcaccgattttgtcgagcttgtcgatctcgcgcagcacgccttcgacgtccgtcaggccaaggccgcggtagaagccttcagacagcttgcggttattggcgtgcacggtggccttggggaggccatacgcgcgcagctcttccagcgcggagaccataaccagcggcagttccacttcatagtggtcgggcaggtcgccggcaccgatcacgtcgatatcggcctgcacgaactcgcggaagcggccttcctgcggacgctcgccacgccacaccttctgaatctgccagcgcttgaacgggaacgccaacgcacccgagtgctcgaccacataccggctcagcggcacggtcagatcgaaatgcaggcccaaacgctcttcaatcggagtgtcggattcatgaccgacctcctgcaaacggctcagcaggtagatctccttgctggtctcgccctttttcagcaaagaagcgccggtttccaccgctcgcgtctcaatgccgatgaagccgttgagctcaaaaaccttacgaagcgtatcgataacacgctgctccacaacacgttcggaggggagccactccgggaatcctgatattgatgcacctttagccacgaaatcaatataataggtgagggttgcgtcaaaacttcctggttcgcccgggatgggagacgctcccgcttatgcattctacgctttaaggagctggccatggccgacgaaactgtcaccgaacccgtaaacaccgctgcgcccgaagagcaggcaacgacacccgcacccgaagccagcgcggccacgccggcgccgactccgtcccccgcttccatgccgaaaccgcacgcgccctcccccgccgccttcgccaagaagactccgtcggccaagccgcgcgctgccgccccggccgccgccaccgccacctattccgaggctgatgtcaaggccgccgaggccttcggccgcgtggatgacaacggcaccgtcttcgtcaaggatggcgacgccgagcgcgaggtaggccagttcccggatgtctccaaggaagaggcgttggcactgtacgcccgtcgtttcctggatctcaaggccaagctcgatctgctggccacccgtctggcttccccgaacatcaaggcccgtgaaatcgatgagtccgtgaagctgctgggcgaagaaaccgccgaaccggcggtggtgggcgacctcgcggccctcaaggcccgttacgtggaactgaaggccgccggtgaggccaagaaggccgagatcgccgaagcgcgcaaggccgctcaggccaaggccgtcgccgagcgcaccgccattgtcgagaaggctgaagcactggccgcttctctgggcgacaacaccaactggcgctccaccgccgacaagttccgtaacctgttcgacgagtggcagaaccaccagcgcaccaccgtgcgcatcgacaagccggaggccgaggcgctgtggaagcgcttctccgccgcccgcaccaccttcaaccaggctcgccgcaagtgggctcaggctcgcgacaacgagcgtacagccgccaaggaagccaaggaagcgattatcgccgaggccaatgagctcaaggattccaccgcttggggtgagacttcccgcaagttcaacgatctgatggaccgttggaagaaggccggccgcgctggccgtaacgaggacgacgagctgtgggccaagttccgcgaagccgccgacaccttcttcaacgctcgtcaggctgatcgcgatcagatcaactcctccgagaaggagaatctggctgccaaggaggctctgctggtcaaggccgaggctctggtgccggtgaagaccgacgccgaggccaagaaggcccgccaggagctggccaagattcaggaagagtgggatcagatcggttacgtgccgcgtgacgatatgcgccgcatcgagaaccgtctcgacgccgttgacaagcagatcaaggccatcgaggatgccgcttggaagcagaccgacccggaggccgacgcccgcaagtccagcttcgaggagcagctcaacgcccagctcgccgagctcgacgccaagatcgcggccgaatccgacccgaagaagaaggccaagctcgaagccgagaaggccaccaaggagcagtggctgaacgccatcaagtaagggtctcgtgccaggttcccctctgagggaagccggcagcaaggctgactgaggggagtttacggttataccgcaagctcccctcagtcgcctacggcgacagctcccctcagcgaggggagcttcgtcatatttatgccgttttcttctgccctatactcataactccaccccatagttcctcagtcacccagcaattggtgtcttacgcctgagtccctaccggtgctgcaacaattgccgtgagcccttgatgtgcggccagatattcatgcaacggctggctgtatggcatattcagctcgccgtaattggttccggcacggaaggcggggtaactgtcgccgccctgaagcagatatgaattggatgcgataatcaccaggtcatcgtccgcaatcggtcgaccgtcaacggcgaggttcacgatacgaaccgccgcatgttcgtcggcagcacactcgtcagcgtcagcgttggtatcagcggcggcatcggcattgccgctcccaccggtcgtaccgcattcggcataccgatacgtcacgttcgaggagatgccgagccagcgccgctccagtcgcccatcgtcacggtggaattgctcggcgagcactctcttcacatcgcgcccggtgagcgtctcatgcgcggccttgaactgcaaggccatgagactatccacctcgcgcacggtgactttgccatcgccattcatatcaagccgtggagtccgcagactgccattattcgaaaatccgattaccggcaaacgatttccggcatacacatgcttcatgattgactcgcggttcgcgtccgccaccagcacaccgaccgtattcccgtgcttatccgaaccttgtttgtcgaaattcacgccggaggccaaggtgccaatcaccgcgttgccggcatgattcgaatatgttgccgccgcctggtaaatatgctgagcgcgcgatacctcatcgttcgcctcagcaccggcagacatccaagcggcttgcgccggatgcgcattaagcccttccacgcccagcacgccgtcaaccgccgtatggctggtgccattgccgaggtccacatcggccactcgcaccgtggcgcgacgcccggcaccggtgatgatcaaatcctgcacggccatattccgcccgaagctgcccgcctcgtaaataggcgcgccaccagcggtcgtaccacgcttgatcgcgtgattgtggccggtgtataccacatcaacatctcgcccaatatcggcggcggctgaggcatcggcgtgcagcaaggccaccaccgcatccacctttccggagcgtttgagttcacgggccacgcgattgatcgcgtccaccgcccgttcgtcaagatcggcatcacgcgtaatctgcggagtggctaccgagccgagcgcatcagtaagggcgcccacgaaaccgatccgcttgccgttcaccgttcgaatcgtagagtcacgtacatggctcagcagtccgtcaggcgacttactggcggcagacgtgttggcgcacagccagtcgatgccattgctgggatcagcgatgcgattgttgaaatcggcgacaccgcggtcgaactcatggttgcctaccgccgaaatcgtcaatccccacgctttggccatgtccagcgtgggttggtccttctccaccgccgactcatacggggaacctcccaccaaatcgccggtcgataccgggatcatattgccgggattatggctgtcggccacggtgaaggcggtggcgttgtccgcaccacgttcgatatgcccgtgaaaatcagtgatgtcggcgatggtcaccgtacgggtgccggaagatggattatcgccggaaaaaggaacggctcccgtggttcccgcacaagcataaggaaccaccagagccgtaaggataagcgctactgcaccaaaagcgatccccgatcgcttgccggcccaccgccggttcttcatattcctgctcacaccagtcacgctaggatcgtcgattgaacggccatgcctaggaaggcgactctcaggtgaattcttagcggcgtcttgggatgggaaaggcctgaccccgtactatcagggtcaggcctttgcaacccgtgtcactacgaatgcgtcggcaaggggagattactcggcaaattcctcgacgcagatctcagctactgcatccacgcacgcctcggcaatcaggcggccgcgttcggcgcttgagccggccggattggcgagtccgccgtgagcgggaacgtcaccttggcgcaccgggtagcgtacataggatttcgccgtggcaccggcttcctcgaccatacggtccatgtgcaccagttccggcgcgtagtggagcatcaacgaagtttcggtgacggccgcatgctccaatgcccagccggggaacaccaatccatcgaacaccttgtcgataaccgactgcggaaccgggtcccaccaattggtttccacgatggtggccactcccccggtttcgcgggtgaccaggtcgatggcctcgacgatgaacgcctcgttttcaaaatgcgcgttcatgacgacgatcttggtgaagccatcggcgatgagttcgctcagcacgtcgtgcatttgggtgatcactgtcacgccgttcatgtcgatagtacccgggaacagcggcccgccaccggagagcggcttggacttgtatccgtagctcagggtgggcatcacggtgccgtcgatgcgttccgccagatcttcggcgacccgcgtggcgagtaccgcgtcggtaccgatgggcagatgctggccgtgctgttcggtcgaaccgatcggcacgatgacgggatgagtcttcacctccttgaattccggccaggtcatgtggtccatacggcggttgctacccattgcagtactcctttgggttggtggtggattggatggtcaatgaatgcgcccggctccctcgggaaaggagccggagctgaggagatcagatgtgattcagatccttgtcggtgttttcatgggaaagaatcatcgcgaccaaggcgatggccgcaacacccaccatgtaccaggccggggcgatggatgaaccggttagggcaatcaggccagtggcgatgaacgaggccgtaccaccgaagatggcattggccagattgaagctgaacgcgaatccggtgaagcgcacggaggtggggaacgtctcggtcaggtagctggacagggtaccgtcgttggcggtcagggtggcgcacattgccagctcaaccagcagcacgggccagaactgggaggtgttgaggatgaggaaggcaggaacggtgaggacgatgaacgccacgcaagcaccgatgagcaccttcttgcggccgaatttgtcggagatgtggcccatgccgaacaccatgaacacgtaggcgaccaagcagatggtggtgatggtgccggactgggtggcgtccatgccgacggtgtcagacagataggtcggcaggtaggtgagcacggtgtagaagccgaccgcattcagcacgcaggctccgaagctgatgatcagggccttgagatggttgtggaagagttcggcgagcggggcgaacatgccgctcttggaaacgacttggccgtcagcggaggcggcgctcttggactcaagagcatcgttcattgactggtacacgggggaatcggagagcttggtacggatgtacagcacaatcaggccgagcgggccggccagcaggaacggcacacgccatccccaaccgaccatcgcgctggagttcatgttggcggtcatcagcgtggccagcgtggagccagcgagcagaccgatggcggtggacgccggaatcagcgagcagtagatgccacgctttgaggtgggtgcatattcgccgaggaatgtggccgcaccggcatattcaccggaagcggagaagccttgcaccatgcgcagcatcagaagcagaatcggcgcgccaacgccgatcaccgagtaagacggcaggcagccaatcaggaagctcgcaccggacatgaacataatcgagtgggccaatgcggctttacggcctttcttatctccgtagctaccccagaacagtgcgccgattggacgcaggatgaaggatagcgcgaacacgccgaaggtctgcagcatggcgacggtgtgattgtcggttgggaagaacaccagggcgatggtggtggcgaagtacgaataggaggcgtagtcgaaccactcgatgaagttgccaaggaaggaagataccgcgactttcctgaccatggcctgttcttcagtttgaggggtgaaattcatcagtcgtgcagatgtagtaatcgttgcggaactcatgatgtcaccgtcctttcaaggatgtgctgttcgtgtgactgaatgggattcaagtgggaattcgtttcgcagcaggtcgaccagcgccgcgatagcctcgactatgcccttgagtatttgctgaaacgtgaatcgtcgattaacccgttcggcgtagaagtggacaggttgcccagtggtgctggcgcattattcaccatgctgttcttgccatgatttcgtgagtttggcggcgaatagcagcatcgaccagttcggtttgtcgttatagtcgacgccgaccatttgtgtcactttgtccagtcggttgtacagggtttgccgtctgatacccaattgctcgcacgcgccggttttgctatcgaggttgtcgaagcagacgcacagtgtgtccagcaacaacggagaggcggcgacctcgaatccgatggtctgcaccacgagcatgcgcatcgccttgtccatatcagaggatgcgacgaaacggtcgacgagtgcggacatggtacttacgattcgcccgtatgccggttcctgattggcgatgtcacgcaataccgcgaacccgtcgaccagcgtcaccgtgtccaatgccactcggccatgcaccacgtacacaccgtcgccttccagtacggcaagcgcatccatgcaatggcgtccgaatgcggccgcaccgtctgaggaatcggtggtggagcaccatccgaccatcaagtcaccttccagcatgcaggagacggcgcatcccgaccgttcttcgaaccgttcgaccatcgtcgatacatggttgatgccttccaccaccgatctgaaccgaaaagcgaatggcatatagatgcatgatccggcaaaacccagcgcgtcgagcatcgcatgcgcttcctgcgcctcaaatgtattgacgtgcacgccgtcggccgggcccatactcagatgatgcatcatgcccatgcgcgcgccgccgtcaatatagagggcggccaccggagacacgatggtggcgatggcccgacgcatcgtggcgtcgaaagtcatggtgcgttgcgtgatctccaatgctcccaccggccgggagcgactttcaagggcgatgacggcgctcgattcgttgccggcatcgaacgcacgacccgctcgagcggccaacagaccgtcaccatcgaaaatggcgacgctttcgccgaacagcgacgcaatggtttcggccacagcctcgatattgccggtacgggacaatccctcacgtaatgaagtggacattgtgtccacctccaattgcaagtgcatctgttcgtgcacgatagcggtattgacactctgacagatgtcgacaaaaggtacgcgagatttcagaccaatcaacgtcaacccatgcagcctggccgcagacaccagttcgtccggcatccgcaccacaccctccaccagttcgaccaccagagcggcgacaccagcctgcgccaggcttgctacatattgtcctaacgtgccgtgccaatcggcggcgagcagagcgttaccctcgataatcagcatctcaccgcccgaaaggaaactggagacatcctctcgctcgttggtaaacacccatcgcactggcgtatcgaggtctttgccttcgacctccaccacaggatcggctcgtttgaactgcgtgttatgaagcgcactgcgaatcgatacagtcatacaatctgtccattcccccgcggaacaccggtcgttccggttaacctcaccgcaaagcgtgctgttgacaataacctcagttggttacgcgggcagtcggttcacgtaaccgttcggcaacacaccagttgaaggagcgacgatgactaccacactgttcaccaacgcacatatcgccaccggagaacccggcagcacggctgcaagcaccctgccattgcaggacattctcgtcacggatggcgtgttcaccgcattcggccccggactcgcgcaacaatatgaggctcagggtggtgatctggcggccattgaggtggtcgatctgggcggcaaacttgtctgcccaccgttctgcgatacgcatctgcaccttgattacgtattcacggcccgcaagcccggtgcggtgaatgaaagcggaaccttgtttgagggcatccagcgatggagtgagaccaagtccgacttgacggtcgacgagatcaagcagcgcgcgaaaatcggcattaagaaagaaatgctgcatggcgtgcagctcattcgctcccatgccgatgtgaccgacccgaacctgacctcattaaaggcgctgctggagcttaaggaggaattgaaggatacggtcactctccagatcgtcagcttcccgcaggagggcatgtactcctacgagggcccgcatggcgaatcgggggccgagctggtggaggaaggactcaagatgggtgccgactgcgtgggcggcatcccccatttcgaacagtgccgtgagtttggcgagcattccatgcacacggtagttgagttggcttcgaaatacgacaagctcatcgacgtgcattgcgatgagacggatgatccgaattcccgttacgtggagctgctttcggcgttggcatataaggctggcattggcccgaaggtcaccgccagccacacctgttcgctgggatcggcggacaacgcctacttcttccacctgaccaagctgcttaaggcggcgcatatcaacttcgcctgcgcccccaccgagaacctgtatttgcagggccgtcaggataccttccccaagcgccgtggcatcacgcgagtcaaggagctcactgaggcgggtgtcaatgtgtcattgggccaggattcaatgcaggacccgtggtacccgctgggcaatggcaatatgatgctcattcttgattatgtgctgcatttggcacagatgatgagctttgaagaaatcgacgatgcgttgaagttcctgaccgtcaacggtgccactacgttgggcctgcgcgatatgtacggcttggaaacgggcaagccagcaaacttcattgtgctggacgccgatagtgtgttcaacgccgtgtatgagcgctgctcggtattgcgttcggtgcgcgccggccgcacgctgtttacccgcgaggagaccatcgacaccggactcgccctgctgcaataacccgacaacaaacagtagttccccttgacaggggagctatcgccagaggcaactgaggggtagaccaaaaacgtgcacatcatgtgtgcgtaggtctacccctcagtcagcttcgctgacagctcccctgtcaaggggagctttgctggtatgcgctagctacgctatcgaaacggactacttctgcggagcgtcgccggaatcggcgggagcggattcggctggttcagtggccggagtggcgtcggctggagtctcgccatcagtggaggcgccggcttcggacgaagtttcggcatcggtggcggcaccgtcttcggcgggcttatcggcggcggccggctcctcgaacttctcccccttgaaggtgaattcgccgaggataccctcgccttccgcatccacaatcacgcgctgaccgtcttcgagatcgcccatcagaatcttctcggagatggcgtcctcgatgtcgcgctgaatcacgcggcgcagcggacgggcacctagcagcgggtcgaagcccttctgcgcgagcaggtccttggcggcgtcggtgagttcgagcgacatgtgacggtcgaacaggcggtcgttgagctgcttgacgtccagatccacgatctggcgcacctgcggctcggtgagctgcttgaagacgatgatgtcgtccagacggttcaggaactccgggcggaactgctgcttcaattcggagctgacctggtccttcatgcgctggtagctggactcgttgttagcacccaggttgaagcccgtgttggcggccttggcgatgtctcgcgtaccgaggttggtggtcaggatgatgatggtgttcttgaagtccaccttgcggccctgaccgtcggtcaggtggccgtcatcgagcacctgcagcagcgtgttgaagatgtccggatgagccttttcgatctcgtcgaacagcaccacggagaacggcttgcggcgcaccttttcggtaagctcgccgccctcctcgtagccgacgtatcccggaggcgcgccgaagagtcgcgaagccgcgtacttctcggagaactcggacatatccacgcgaatcagcgcgtcctcatcgtcgaacaggaattcggcgagcgtcttggccagctcggtcttgcccacgccggtggggccggcgaagatgaacgaaccggacgggcgcttcgggtccttcagacccacgcgagtacggcggatagagcgggacagggcggaaaccgcctcgtcctggccgatgatgcgcttgtgcagttcggcttccatgttgagcagtttcttggactcggcctgagtcaacttgaacaccgggataccggtggtggagctgatgacctcggcgatcacgtcctcgtccacgaccatcttgacgtcggactcgccttcgcgccaggagtcttccttctgcttgcgatcggcttccagcttctcctgcttgtcgcgcagttcggcggccttctcgaagtcctgacccttgatggcctcgtccttgtcggcggcgatcttggcgatcttctcgtcgagttccttgagctcaggcggggcggtcaggcgcttgatgcgcaggcgtgcaccggcctcatcgatcaggtcgatggccttgtcgggcaggttgcggtcctggatgtaccggctggacagctcggcggcggactgcagcgcgccatcggtgatggtcacgtggtggtggttctcgtaacgggaacgcaggcccttcaggatctcgatggtctcggcgatggtcggctcgtgcacctgaatcggctggaaacggcgttccagagccgcatccttttcgatgtacttgcggtactcgtcggtagtggtggcaccgatggtctggagctcgccacgagccagcatcggcttcaacatgtcggaggcacccagcgcgccgtcggcggagccggcgcccacgatggtgtggatctcatcgatgaacagcacgatatcaccacgggtcttgatttccttcagcaccttcttcaggcgctcctcgaaatcaccacggtagcgggagccggccaccatggaaccgaggtccagcgagtagacctgcttgcccttcagggtttccggcacgtcgccggcctgaatcttctgggccaagccttcgaccacggcggtcttacccacgccgggctcgccgatcagcaccgggttgttcttggtgcggcgggagagcacgaccataacgcgctcgatctcgttggtgcggccgatgaccgggtccagcttgccttcagcggcttcgacggtcaggttgcggccgaactgatcgagaatggcggaaccggacttgttctgcttgtctgtcacgccgccggcgttggccagatcgcccttgccgtcaccggtgccggtgccggagttgccgcgaatcatatcgatggtcgcgctcctgagctcacccaggtcgacgtccatcttgatgagcacctgggtgcccacgccttcgccttcgcgaatcaggccgagcaggatgtgctcggtgccgatgtagctgtggcccagctgcagggcttcgcgcagcgagaactccaacacctgcttggcgtgcggagtaaaggggatgtgcccgttcggagccgcgttgcccttgccgatcatttcttcaacctgcttgcgagtggcatccagctccacgcccttcgaggcgagtgccttggcggctacaccctcaccttcgcggatcaggccgagcagcaggtgttcggtgccgatgtagttgtgctgaagggtcctcgcctcttcctgcgccaacacgatcacgcgccgtgcacggtcggtaaaccgttcgaacatgcttgtccttcctcaattgacattccgtcttactctaccgattcacgatgacgtttattcatcggattccatgaattgcgccgtgagaggagaagaaaacgatatgctggttctagattcacccgtagtcgattacaaggaggctcgaaatgagtgaagctgcaaccaagcccgacatcgttgtcggcgtggatggttccgatgaatcctttgccgcgctgaagtgggcgcttgaggaggcttcgttaaccggtcagagcgtcaacgccgtgtttggctggacgcattcctgggatatggggtccgaaccggacagcgacgaggcctgggccaaggtccgccacgacatcgccaacgagctgcgtgtgtgggtcgacaaggccgctgcaggcatcgacttcgatccggcgaatctgaagctcacctcggtgaaggcctccggcacttcggccctgctgcagatcggccatgatgcgcagcagatcgtggtcggccgccgctcgctgagccgtgtggcccgctggttcatggggtccctgtccgcttcgctggccgaggccgccgaagtgccggtgaccgtggtgcgcattgccggcagcgaggatgagaccgtgaccgatgccatcgccaatgccctgacgccaggagaccagccggtccactacacgcagcctcagccggtggtcgaggaggctcgccgcccggtggtggttggtgtggatggttccgagacttcccgccgcgcgttcgacttcgcgctggaaaaggcacgactgcacgacgcgccgctgcatgtgatgttctgctggcagctcaaggatttgggcgttattccgggctatgagaacgccgtggcaccggtgaaggtcggtcagcgccgcgccgaggagattctcgccgggctgatggccaaggccgagattcccgatggtgtcaaggtcagcgcgaatgccttccatattcccgcgtccaaggggctgattgcggcatctcggtacgccagccatctggtggtcggttcgcgcggcctgtccggtctggacgcgcacttcctgggatcggtgtcccgtcagatcgtgaacttcgccgaatgcacggtgactgtggtgcactgattcaccgaaatcggcatggagtgctaacgcacgtctcggtgatgggcttgcagggaggaattccttattcctgcaaccgttgtagatgactttgttttagcttgtcgctagagcgaagtcatctgcatggcctcgttgccgaggccagctccaagactcacacggcttacgccgtcgcttggttcgcgtttcacaggatgccgcgttgcccgacgcgatgcgtcggtccgtcttccgcttcctccgcgcgcgtttaacgtctccggggcactcccggcgacttggatgttgatggccgcgttcagatcgcggtcgatgacaagcccgcactcctcgcaatggtagacacgttcggacagggacagtttggctttcaccgtcccgcagttcgaacatgtcttgctgcttggatgccagcggtcgatgacgtggagcctcgcgccggtgcgtgcggtcttgtattcgagctgtcggcggaactccgcgaacgcggcgtcctctaccgagcgggcgagcctatggtttctcaccatgcccgccacgttcaaatcctcgatgc

SEQ ID NO: 3908 - DNA, 26164 bp, Unknown
  R22_24m  MAG No. k141_11415
ccattccagtggtgactgtcagagctcaccgacctaatgaatgaagaatcgacctaatgaatgcgtccggtcatatctcattgtgaaaatgacccggtattgcggtattccgcaattgcacttccaacgattctgaagtattcatccagattctgcgtggtagcgaacgttcttcttgtggcgggaaaagtcttatagcccgcgaaggagaggttgttccttttctcgatatctccttcccatcggtttcggtcatagtggtaccgtccgtcgtattccagaatcacatgatcattcggatacaccatgtccacaaccacctctttgttctgcaacgggaggtatatcggagcattcacctccaattcgggtaatccacgttttaccgattcaaggcgaaggatactttcctgcggcgaatcggtgttctctctgcacaacgagagcgctttgcgaaataatctgatacctgggaacctacctatatcggcgaggaacaacgatatcttgtctttcgttgtctgtttcagatgctcattacggcaggtggcccaatccaaggcaatgaccatactttccacatcgacgaactgtgcgatctgacacagcgcctgttccactgaaaccacggcgataagatcatcaatcatcgtctggtcaatgccatgaccccaataatggcattgcgtttcggtgagattcgacaatctttcagccccggacaccgtaacgtgcagtttgttgaggtcatagttgggcttgtaattcagcgtggccgtcataccagcaagctgtagcctggtgccatggctgaagcaaagctcctgtgaagtgcgcatcgatctggcacggcattgttccagtgttttctgggcgaggtctcgcgcctcatcaagtgtgaagaacgtgttgtatgcataggactccatgccatccccccaatggttgtatccgtgaaccgcgttattcacggatacaactcacgatggcataaccaacttctgcgcgcaaccagctcggccgaatcggtggatatgtgtataacctgccagctcagctgttgcggttgatctcgatgtcggtgacggtgaggttggcctcgttgatcaggttgaagaggatgacttcggccagcggaccgggctgcatgaaggtgtgctgcttggcttcggacacgtaatcgtggctatcacggtagaaggcggtgtcgatgccgcccggatagacggcgaccaccttgacgctggtgcccttgtatgcggcctgcaggctcttggtgtagcccttctcgccccacttggtggcgcagtacacgctttcgttcgcgttgccgcgcgtggcggcggtgctcatgatctgggcgattttcacgtcgcgctcgccacaggccttgagggtttccaccgtccacaggatcatgcctttgagacctttgaggcatttgtcaatgtcagcggcttcataggcggtgggcaccttgaacgagggctggccggcgttgttgatgagcaggtcgatgtggccaagcgcggcgatgctcgccacggattccttgacgaacgcttcgtcggtgatgtcgcctacgaaggcgcggtaggattcggctggccactgcgcgctcagctcggcctgacgttcggcgttgaagtcgatgccggccaccagccagcccttggcgatgagttggctggcgagctcgtagcccaaacccagcgcgctgccggtgacgatggcgatcttctggcctgttgtggttggcatggttgattcctttgcatgcttgcgagactcccctcagcgaggggagcctagggttaacccgttctttgctgacagctcccggtaggggggccacggtaggactattcttcggctacgagttcgaggtacgaatcattccagaggtcttcgtcgccgtcgggcatgaggagcacgcgctcggggttgagcgcctcgacggcgccctcatcgtgggtgacgagcacgatggcgccctcatacttggcaatggccttcagaatctcctcacgggaggcgggatcgaggttgttggtgggctcgtcgagcagcagcacattggctcgcgaggtgaccagcgtggccaaggccagacgggtcttctcaccgccggaaagcacatgggccggtttcatcgcgtcatcgccggagaacaggaacgagccgagaatcgaacgggcctgcgtgttgtcgagctcgggcgccacatgctgcaggttctccaacacggtggcgttcagatccaaggtgtcgtgctcctgcgcgaagtagccgatcttgcagccgtgaccgtattccacggaaccggtgtccggctcctcgatgtgggccagcaggcgcagcgtggtggtcttgccggcaccgttgtaaccgaggatcaccacacgcgagcccttgtcgatggccaggttcacgccggcgaacacgatgttggaaccgtaggccttggagatgtccttggccatgatcggcgtgcggccgcagggcgcgggctcggggaaacggatgtccgccaccttctcggccttctgcgcctcggaggtgttttccagcagcttttcggcgcggcgcatcatgttctgcgctgccacggccttggtggccttggcgtgcagccgaatgccttgcttcatgagacggtcggccttcttctcggccacttcgcgttcgcggcggcggcgctcctcgtccaccacgcgctggtgcaggtaggccttccagccgagcgaatacatgtcgatctggccgagctgcgcgtccagatgccagaccttgttcaccacttcgtccagcagttcggtggagtgggagatgaccaggaagccgccctcgtacttcttcaagtagccgcgcagccattcgatggaatcggcatccaagtggttggtcggctcgtcgaggatcagggtgtcggcattggaaaacaggatgcgcgccagctcgatgcggcggcgctggccaccggagagcgtgccgagctgctgctccatgacctcctgcggcaggccgagcgaggcggccatggaaatcgcctcggactgggccgcgtagccgccagccttgtcgaagtcctgcatggccttgtcgtaccgggtcatggccttgctcatcacgtccggatccgggtcggtcatatccttttcggccttgcggatgcggttgatgatggtggcgatgtcacgcgcgctcatcatgcggtcgagagcggtctgcgtgggatcagaggcgtgcgtgtcctgcggcaggtagccgagcttgccggagacgcgcaccttgccggcggtgggcaacatgtcgccggtgatcacgcgggtcagcgtggtcttgccggcgccgttgcggcccaccagaccgatcttgtctcccttggccacatggaagttggtggggtgaagcagcgtgcgcgcgccgatctgaatttcaagtccctgcacctcaatagccatgaataacctacttgcctgttacgaatactgtctcttaccaaagtccgactgtccatcatagcgaacaccatgccgaccgggctcagccgacgctcatgcgtccatacgcttatacgcccgtagactcatgtaataacctgcaatgtgcgcgataagacagttgaatcgtgatttccgtcgtacactatccatatccgggcacgcttgcggcgcaatgcgtgtgcagtataggaaggatttcccacatggaaccaaattatctcgtgttattgggaatcgtgatcgtgattgtgggtttcgccctcaaacttgatgcgattctgatcattatcgtggcggctgtggtgactgcgctggtcggcggcattggcgtcgacggcttcctgaccacgttgggtacgtcgttcgtctcgaaccgcagcatggcgattttcatcatcgtgttgctggtcaccggtacattggagcgcaacggtctgaaaaccgcagccgcgcagctgatcggcaaagtgaagaatgcgacgcccggtatggtgatcgccctgtatggtgtgatgcgtctcgtgttcgccgcgttcaacgtgagttttggtggcgtggccgggttcgtgcgtccggtcatcatgccgatggcggtaggtgcgattgaagcgtccggtcacgagccgaacgacgagtatgtggaagagctcaagggcatggcttccggcatggagaacgtcgcatggttctttggccaggtgctgttcgtaggtacggccggtgcgctgctcgtgcagtccacgttgaagccgctgggttatgacgtcgaactgttgcgcatggccattatcgagatcccggtcgcggtgattgccgtggcggtcaccgccgtctattacatcatcaaggacacacgactgcgcaagaagtactacggtgccgaagccgccgctcaggccgccaccgctaccaccaccggcaaggaggcctgatatgtcgttcttcatggaccccagcgtgaccgttggcaccaagatcctcgagctcttctatattttcatgggtttcatgtccgtgtatgcgggcgtacgcaacctactcgataaaaccaacaaggcccgctacggcactttcgtgttctggacggcgctcggtatcgtcatcgcgttcggccgttggattccggccattgcggacggtgtgctcattatcatcatggtcattcccgccatcttccgccaagtgcgtaagggatcggcgtccgattcgagcgctcccagcaccgccgaagtggccgcgaacttccagcgcatcggtatgcgcatctttattcccgccctgtgtctgggcgtgttcgccattatcggcgccctgattcccagcgtcagcgccctgaccggctgctgcatcggtgtgatgattgccgccgtgattctgttcgcgttctcgcatgacaacaagccggtcgtattcctcaacgattcggaacgcctgttgtctgccatgggtgcgctctgcatgctgccgatgctgctggccagtctcggcgcgattttcacagccgcaggtgtcggcgacgtgatcgccacgctggtcggcggcattattccgaagggcaacgtcacgctgggcatcatcgtattcagtgtgggcatgatgctgttcacgatgatcatgggcaatgccttcgccgcgattaccgtaatgaccgtgggcattggcgcgccattcgtgctcgcctacggtgcggacccgacggtgattggcattctggcgctgacctgtggctactgcggcacgctgtgcacgccgatggccgccaacttcaacatcgtgcccgtcgcgatgctcgatatgaaggaccgcatgggcgtgattaagaagcaggtgctgcccgcattggtgatgattgtggtgcagatcgtctatatgctgatcgcgcaataacctcgttgtccaaataccacaacaatccgtgaaataaggagctaatgatgagcaagattctggtgaccggattcgatccgttcggcggcgagccggttaaccccgcattcgaggcagtcaagctgttgccggatgaaatcgccggtgcgacagtggtgaaactggagattccgacggtgttcacgcgcagtgcgaccgtggttgaggaagccatggtgcgcgagcagcctgactatgtgctgtgcattggtcaggctggtggccgttcggctctgaccgtggagaaagtggccattaatttggccgaggcgcgtattcccgataatgatggcgagcagccgttcgatacgccgttgcgtgaggacggcgacaccgcgtatttcgccacgttgccggtcaaggccatggtcaggaacatcaatgaccacgggattcccgcattcatgtcgtatacggcaggcacgtatgtgtgcaacagcatcatgtataacgtgttgtatctgattgaccgcaaattccccggcgtcaagggcggcttcattcatgtgccgtatgcgaccgcgcagggcgtgggcaagccgaacggcacgccgaccatggaaatcgcgaccatggcgcgcggcatcgaagccgccatcgaggccgctgtgagcaccggaaccgacgccaccgacatcatgggcgaaacccactgatacgcatattgttatgcccctgctgacagcagttgtcagcaggggcatcgctatgcgttgaacgttacagttcgcgcagctgggcggcgatctggatggattcgacgctggcctcggccttgttgcgcgtctcctgccattcggtagcgggcacggagtcgagcacaatgccggcaccggcctgcacgctcgcctcatggtcgcgcaggaacgcggtgcggatggcgatggccatgtccatgttgccagagagatcgaagtagccgacggtgccgccgtagatgccgcggtcggccggttccaactcgtcgatgatttcgactgcgcgcggctttggcgcgccggaaagcgtgccggccgggaacgcggacttgaacacatcgaatgcggtcagcgaggggtcgaccttgccggtgaccgtcgagcagatgtgcatgatgtggctgaaacgcttgatgtccatgagctgcacgacttccacggactgcggcacgcacaccttgctcaggtcgttgcgggacaggtcgacgagcatgatgtgctcgctgcgttccttcggatcggcaagcaattccttggcgaatttttcgtcttcctcaggggtggcgccgcgagggcgggatccggcaatcgggaaggtcatcgcgtggccgttgtccaccttgatgagggtttccgggctggagccgatcacgttgaagtcacggccccgagcatcggtcaacgccatgaaatacatgtacgggctcgggttcagcgtgcgcaacacacggtacacgtcgaacgggtcggcaggcgaatcgatgtcgaggcgctgggagatgaccacctggaacacgtcgccgtcgacgatgtgctgcttggcgcgttcgacggcctgctcgtagtggcttttctcggtgcggaagcgcagctcaggctgggcgaccgtttcgtccaagatgttgacgcgggactcgcccggagccggggtggcggcatcgtgctgcatctggtcgagtcgagcgacggcctcgttgtaggcgacgtcggcgcgggtggatttatcatccacgttcaccgcgttggcgatgagccacaccgaaccggatacgtggtcgaccacggcgatatcggtggccagggcgagcacggtctcaggctggccggtctcgtccggagcttcggcgcgcagggtcggttcccagtggcggatggcatcccagccgaccgtgccgaccagaccgctggtcaggttcggcaggccttccacatgcggggccttcagagtcttcaacgtggcgtgagcgacttcgaccacgtcaccggtgactggcacaccaaccgggaccttgcccagccagtcggcctgaccgttgttggagcgcagctgggccatcgagttgacgccgatgaagctgtaacggctccacgtgccgccgtattccgccgattcgaggatgaaggtgccggatcggctgccggcgagacgctcgtagaagccgaccggggtgagcgagtcggcgagcagacggcgcacgatcggaatcacacgatagccggcgtcggccagttcgtggaacaggccgcgactgggcccggtggcgccccacttcaggtgtttgacgctgcattcgctcatattcgctcctttacttacaactcgatgtcttgtttcgtagtacgcggtcgttcggcttcccccagtcagggaagcccgttctactgctcggccgggcgatggccttcgaccacggacagggggccgccttcgaggaagcagctgcgcttgccggtgtggcaggcggcaccgacttggtctacttcgacgagcagtgcgtctccatcgcaatccagggacacgcccttgacgtattgcacatggccggaggtatcacccttgcgccagtattcctgacgggaccgggaccagaaggtcacgcggccggtggtcagcgtgcggcgtaatgcctcgtcgttcatgtagccgaccatcagcacctcgtgtgtgtcgtactgctggatgacggcagcgaccaggcccttggcgtcacgcttcaggcgtgcggcaatacggggatcgagttcagtggaattgtcgtatgtagtgtctgtcatacctatcttccttatgtggaccaccctcagtcagcttcgctgacagctcccggattatgtgcgacatgtgcatagcgcactgctacgaacaatccactggattgttcgtccagcgggagcaaggtgtattcgtttagcgaacggtgtagccgtgcttcttgagttccgccttgacatcggcgatggtcaggatgccgtaatggaatacggatgcggccagcaccgcgtcggcacctgcttcgatggcgggcgggaagtcctcgaccttgccggcaccgccggaggcgatgatcggaatcttgacttccttgcgcacggcgcgaatcatctcgagatcaaagccttccttggtaccgtcggcgtccatcgagttaagcagaatctcgccggcgccaagctgctcggcgcgcttgacccaccagatggcatcaatgccggtggatttgcggccgcccatcgtggtgacctcgaagccggattgcgtgtgttgctcgcccttttcgcggcgggcgtccacggagagcaccagcacctgattgccgaaacggtcggccacgcggctgataagcgacgggtcattgatggccgccgtgttgacaccgaccttgtctgcaccgcagcgcaacagcgagtcgacgtcctcgggcgtgcgtacgccgccgcccacggtcatcggaatgaacacctgttcggcggtgcgggagaccacgtcaatcatcgtgttgcggtgggagctggatgcggtcacatccaggaaggtgatctcgtcggcgccctgacgatagtattcggccgccagctccaccgggtcgcccgcatccttgaggttttcgaaatgcacacccttcaccacgcgaccggcgtcaacgtccaggcacgggatgactcgtaccgccaacgacatgcttcactcccctgttcggctttgcattacagtccttcagactacctaccgcccgttacatgcgccgcacccgtttctggaatatgagaatccgagctgacgcgcccgctgcgcgatctcaaggccgccggcgccaaggtgacgcttgccgccactaccttggacccgtgtgagacggtgcagcacgaccgctacgaaggcgagacgctgacgccggatgcgctgctgagcgacgtgcagaccgctgattatgacctactggtggtgcccggtggtacctgcaatgtggatcgtatccgcgtcaatgaggatgcgatcgcgctggcgcaggagttcgcgcacgaaggcaagccgatcgccgcgatctgtcatggcgcgtggctgctggtcaacgcgggtctggtggctggcaagaccgccgcgccctgccgttatatcgccgccgatatcgagaacgcgggcggccattacgtcgacgagcagctgcacgtggacgacgccaacggcttcaagctcatcacgtcccgcaagcccgctgatttggactacttcgtggacgcaatcaaggatgcgctgaagtaactaccgctccttagcggccaactgcccgcaggcaccgtcaatgtcctggccgcgggtgtcacgcagtgtggcggtgatgcccgcgcggtgcaggatctccaggaaccgctgttcgtctcccggcttggaggcggtccacttcgagccctcgatggggttgagcggaatcgggttgacgtgggcccagttgtcgccgtaatggttaagcctcttggccagcaactgcgcatgctcggcctggtcgttgatgccgcgcatcagcgcgtattcgatactgacgcggcgcttggaggccagccaataatcgtgcgcggcatccaacacctgcgtggtgttgaaacgcttgttcatcggcaccagctcgtcacgcagttcgtcgctgggggcatgcagggaaacggccagacgcacggggatgccttcggcagtgagcttcttgatgccgggcaccacgcccaccgtggatacggtgatgttgcgcgcggaaatgccgaagccttcgggaggcatgacggaaatctgtcgtacggcggacagcacggagttgtagttgcccatcggctcgcccatgcccatgaacacgatgttgctcaggcggccctctcccccggccacttcgccgtcacgcatcattttggcggccacacgcacctgttcgattatttcaccggtggacatgttacgggtcaggccaagcttgccggtggcgcagaacgggcagcccatgccgcagccgacctgcgaggaaatgcacagcgtggtgcgggtcgggtatcgcataagcaccgattcgatgagggagccgtcgaacagcttccacaaggtcttgatggtggtgccttcgtccgccacttggcgggtcacctcggtgatgagctgcgggaagaacgcggcggcggcctcgctgcgcttggctgccggaaaatcagtgaattcggcggcattcacatcgaaatggccaaagtaatggttggcgagctgcttgactcggaacttcggcaatccgagttcggccgctttctcgatgcgctgctcgggcgtcatatccacaaagtgcagcggcggcttgccacggcgggcatggtccttggatagcacgtcacggaaggcacctgatgtgccgccgggagtaatgccggtttccggagtgtcaggatgctgtgtggtcatgatgggttcgcttcgctctcaatatcagaaaatagtcaaacatgcaatagaaatatcagaatccaccatacggcgtgccgcatacgaatcagatggcccatgtcttagcccatggcgaacgcatattgaacgatgatttcccccatatatgacatgtggcaccgtgcgatatacacacgatgccacattgttcatgcacgaggcatgcgaatcacagtccggtgacccacagcaaggcgcaggtgaacggtgcactcatcaaaatggaatccacacgatccatcacaccgccgtgtcccttgagcagatggcccatgtctttgatgccgatatcgcgcttgagcatggaagcacacaaatcaccgaacgtgcccacggcgccgatgagaatacccgccacgatcggcacccaccaacgagtggcccatttcgaggcatcatacgtgcatgcgaatacggcgaatgcgccagccatggcgaagagcatcgagccgatcaggccctcaacggacttcttcggcgagatacgcgggctgagcttgtgcttgccgagccaggcaccggcaaacaaaccacccgtatcggagagggcgggcaggaacaccagcatgatggcgtgtgcaatcggatgcccattgaaagtcagcgagatgatgatgcagctggccagcaacggaatgtacaacacggtaagcacggacacagccacatggctgagccgggaatgatgctgttccccgccctcatgattgaacgaggattcgaggcgcgcgctggcatccgtgttggacagtttgccggcaaccgccagagataggcggttgccgacgctgatttttgcgctggccgcgatggcgaccagaataatcgacacgatgatactcagcgacatcgtgatgagatggtacggggaataataggtggcgatgagggtgaaggacgcgcacagccacagcatgaacaccgggatgtgcaggcctacggtggcgaagtccaccctgagctcccacagcgccagaatcatgaacacgactaccagcagcacgaagaggtcgacgctgagcagcaggcacgcgacaataaggatgaccagtgccgcgcctgtggcgatggcctgcggcatgttgcggccggtcttcttgttgatccggtcgagcgtctcctcggcctcttcatggagttgttcgttgcgttccataattctccggacctggtctgaatcagacctccatgatctccttctgcttggtctccagcagagtatcgatctcgtcggtaacggacttggtgaccttgtcaagatccttcagcaggcgatcgccttcgtcctcacccatctcgccgtccttgacggccttgtcgatggtttccttggtcttacggcgaatgttgcgcacggcgaccttgccgtcctcggccttgcccttggcgagcttgacgtactccttacgacggtcctcggtgagttccggcatggtcaggcggatgacgttgccatcacggttcgggctgatgccgaggtcggagttgcgcagggccttttcgacggcaccggcctgggaagcgtcaaacggggtgacggacagggtgcgcggttcgggaacgccgatggaggcgacggccttaatcggggtgggggcaccatagtagtccacggtgatgccgttgagcagggccgggtttgcgcgaccggtgcggatgccggagaagttttccttggtgttttccacggtcctggccatctgttccttggcctggtcgataagagacatattcactccttgtgtgttggtgttcgtctgtgttgttcgtctatgaacgtttgattcgattgtaggcgtttgcggcttactcggccacgcgcgattcggcggtggagaccagcgtaccgatttcatcgccgacgagggcgcgggtcacgttgcccggctcttcgaggccgaagacgcggatgcgcttcttgttgtcgcgggccatggacagtgcggaggcgtccatgactgccagattgtccacgagggcgcgattgtagctcagggtttcaaaacgcttggcgttctcgtccctgcgcgggtcggcggtgtagacgccgtcgacgccgttcttacccataagcacttcgtcgcagtggatttcgagggaacgctggatggaaaccgtgtcggtggagaagtacggcatgccggcaccggcgccgaaaatcaccacgcgacccttttcaaggtgacggatggccttgagcggaatatacggctcggcgacctgtcccatggtgatggcggtctgcacgcgggtggcctgaccctcctgctccaggaagtcctgcagggcgaggcagttcatcaccgtgccgagcatacccatgtagtcgccgcgggaacgatcgataccggcctgctgcagttcggcaccgcggaagaagttgccgccgccgaccacgatggccacctgcacaccctgttgtacggccggaacgatttcctcggcaatgcgacgaatcacatgggtatcgatgccgaccttgccaccaccgaatgcttcgccggacaacttgagcagaactctgcgcggcttgtcgctatcagtcatatcatgcctttctcaaaaccgaaagtgcgaaattatccgtagacaagcgtatcggtttacgacgacaccccctagcaacgacacccttggaatagcgaaacgccatccgattattgaataaccggatggcgtttcgttgaaattacgctaagcgcgtggagtaagccttaggctcactcctcttcgcccttgccgacctcgacacgagcgaatgcggtggcgttgccaccgacttccttgaacaggtcgccgacggtcttggacgggtccttgacgaacggctgctcgagcagcacgacttccttgaagaaagcgttgagacggccttcgacgatcttcggaacgatcttctccggcttgccctcggccagggacttctcggtggccacgcgacgctcggactcgaccacatcggccggaacgtcctcgcgggtcagccacttagcgcccatggcggagatctgcagagcagcttcgtgagccacggcggcgccggccttgtcggtggcgatcatggcgacgatgctcggcggcatctcggcggacttcttgtgagcgtagacttcgacgtgctcgccggagatcttggcgaactggccgaccttgacgtgctcaccgaacagggcggcggcctcctcgacagccagcttgacggtggtgtcgccagccttggcctcgagcagctcgtcagcggagttggcgtcggcgtccacggcgtagccgagaacttcctcggtgaactcgacgaacttcggggtcttggccacgaagtcggtctcggagttcagctcgacggcgtagccggtctcgccattggcggtctcgacgaccttggaggcgatggtgccttcctgagccttgcggccttcacgcttgccggctgcggcgatacccttggctcggatgatttccttggcgcgggcgacgtcgccttcggcttcggtcagagccttcttgacgtcgagcatgccggcgccggtgtcttcacgaacctgcttgatcagtgcggcggtaattgctgccattgattattctccttgagaaattttgcttacccatgaacgatgggaagcgcttattcaggcacttcccatcgtagagcatcactcggccttgggggcctcggcggtttcgccctcggcggcagccggagcggcggcttcagcggaagcctcggcaggagcctcgttggtcaggagttccttctcccaagcggccatcggctgctcggcggcttcgccctcggccttgttggcgccggagcgctccagcagaccttcggcgacggcgtcagccatcaggctggtcagcagttcgatgccgcggatggcgtcatcgttggccgggatcgggtactcaacggtgtccgggtcggcgttggtgtcgacgatggcgacaaccgggatacccagcttgtgagcttcctcaacagccagggcctccttggtgatgtcgacgacgaacatcgcggacggggtgcggttcatgttgcggataccgcccagctgcctgttgagcttgtccttctcgcgctcgagcaggaggagctccttcttggtcaggccggagccgtgcacgtcggtgaagtccatttcctcaagttccttgaggcggttgacgcgcttggagacggtctggaagttggtcagcatgccgccgagccaacgctcggagacgtaaggcatgttcacgcgggtggcctggttggcgatagcttcctgagcctgcttcttggtgccgacgaagagcacggtgccgttgtgggccacggtggtcttgatgaagtcgtacgccttgtcgatcatgtcgagcgacttgaacaggttgatgatgtggatgccgttgcgctgggtgaggatgaactgcttcatcttcgggttccaacgacgggtctggtggccgaagtgcaggccagccttcagcatatcgctcatagtgatctgagccatggtattactacctttcattgtcggttcttgcctggccatgcgcacctgcgtgcagctgctcccccggtttcacgagttgtgcagccgaccgacacaggccgtcgcgagcatgacgcgaatttgttgtgtgccggttgacaatattgggtggttccggacgccagcgactgcgtccgttgccgggtggcacacaagtttcaaggatagcacggagccggtactaagaaaaacaggctcccctctctgaggggagcctgtcgccataggcgactgaggggagttacgggcggtaccggcagaaccaccctcagtctcactacgttcggcggctcccgccagcgggagccgggtatggactacttcgcctgacgattgcgcatgtaccgcagggcttcgcggcgttcttccttttccaggcgatccaaatacacgtggccgtcgagatggtcgcattcgtgctgaagcatacggcccatcagcccggagccctcgagcacgacctcgttgccgtccaggtcgatgccacgcacgcgagcgtagtcggcccgacgggtcttgtaccacaagccgggcacggacagacaaccttcatcgccatactgctcgccggacttctcctcgagtacggggttcagaacgtagccgaccttgccgtcgatgttgtaggagaaggccctcaggctcacgccgatctggttggcggacaggcccgctcggcccggatcgtccacggtttccagcaggtcgtcaaccaggcggcgcacggccggggtgatttccttgatctcatcgcagggggtgcgtaggactgggtcgggcacgaccctgatctcacggatggccacttctcgttactcctcgttcttctcgtcagccggccggtccggcttgctgccggtgtcagcggcattgtcggcattgtcggcggaatcgccggtctcgccctcttcgggttcggccttcgacttcttgatcttctccgacacgctagcaatcgaatcagacacgctggttttcatctgttccgaggcctgtttgacctgttcggacgcctgcttgaccgattcggaggatttcttgacggtctccagcgtgctgtcgatgatcttggctgtggcgggcagcggtttgttggatggcttgggcgcatacagatcctcttcgatgacggtggcgtagcgctgcaataccttgggacgcaccactttcatgctcggggtgagcgtgccgtgctcctgactgaattcctcatccagcaccgcgaatttgcgcacggactcagcgcgggagacattggcgttggcctggtcgatgtactgctggataaaggcacgcaccgcgtcgttgtcgctggcctcggcgagtgtcatgtcggcattgaggccctgaccttccagccaggaatgcagcatttcggggtcgagctcgataagtgcggacacgaacggcttgccgtcgccgactactactgcatgagccacgatcgggcaggtgtcgatgacatcctccatcggggcggggctgatgttcttgccgccggcggtgatgatgatgtccttcttgcgtccggtgatgaaggtgaagccgcggtcgtcgatacgacccagatcgccggttttgatccagccgtcggcagtcatcgtctgtgcggtgagttcgggctgcttgtagtagccaaggaacacgttcgggccggtcagctcaatttcatcgtcttcgccaagacgcacgcccatgccaggcccaggcttgccgaccgaaccgacctcgttgtcgtcctcccaattgacgagcatcggagcggcggtttcggtcatgccataaccctggatgaaggtgatgtcatccatgccgttgaagaagtgggccaaatccacgttgagcggcgcaccaccgcaggccagccatttgaggttcggtccgagagcggaacgaatggatttgcccaccgtggccatgtagaacgaatggcgcatgcgctcgatgaacgaatggccgcggccggcctgctcatccttgctccacttgacgaagtgcttgaccgactgggcgaagatatgcccctggatgccggcaccagccttctgcgaggccgcgttatacaccttctcgaacacacgtggcacgcccagcaggtaggtgggcttgaagctgcggatatcggcgagcagtcgcttggcgtcgggaatgtatccgaccacgccgcagccaccgatgcacacgtactggatgtagcgggcgaagcagtgcgccagtggcaggaacagcagcagacggttgtcgtcgtacagcatgccacgcagaatctcgtagccgttaagcacgatgtgcgtgtaattgcggttggagagcatcgcgcccttgggcttgccggtggaaccggaggtgtagaccacggtaagcagatcatcggctttgatacgagcgatagccgcatccaacgtctcatcggatacgccatgcccgaagtcagcgacagcgtcaaggccatcggccttgaaattgaacacgtatttcatgcccggatgattgacacggatctgctcaagcgtctgtgcgcgctggaagtcgccggcaaaggcgatggcgggatcgacttcctcgacgatgcccgcggtctgacgggcggaatcggtctcatagacgggcacaaccacagcgccgattgccgcgcaagcgaaatcagccacaccccactcatagcaggtaggcgagtaaatcagcaccatggtgccggctttgacgccaagtcccaacaggcccttggccacctcgcgtacgcgggacagcatttcagtagctgtggcgccgcgccattggtgggtgttgtcatcctgccattccgcgatgatgtcatccggcgtgcgagctgctcgtttggccagcagcgagtagacggtgtcgtcatcggtggtgacatatctgggttcttctacatgttcacgcatggtcactactataggcgaaccagcctatgacacggcagaaccgtcttccgctgccagcgtaggaatcggtgtgagggaggggccgtctggtcagcccagatcggcatagatgcacatccatcgagaaccgatgaacttcagtttgaggttgactcgcagattttcctggccgatggtcatgaataccgccatttccagcgtgtccttgccggtgatcatgccgtcgatcaatgtggggacagtgggcagatagcagaatttcgctttgagctccggatgagtgaccatgtgggtgccgagcaggtattgcatggtttgcagccgttccaggcatggttttgtcatggctctgttgagatgtgcgacgctgagtctgccacgtatcgcgtccgccgatgtgcaggcgatgcggcatgcagccatggccatggaatgacattccttcgcattcagcccgcctatgaatgtgggttggatatgataccgcaccgggcgatccgacagctccacaacgatgaatccgtcataactcggcaacggcccgtactgatatgtgccgtggaaaaatcccgaatactccatgatgaccccttcaagcccccttgcaactcaccatcatcggcgagcgtttgtactacaacatcacgaaaggcgcgccaagtcaaacgacttgagcgcgccttagggcaagctaagcctcctgcatggagggcaaacccccattttcaggggggggtaatcgggattatcgtgcggaatacgggttgaccaccatgccgcaacgctggaagttcttcacgtcgacgtagccggtggaggccatagcgcgcttgagggcgccgatgaagttggtcttgccgtccgcctggtggctcggtccgaacagcacctgttcgagcgggccgaccgtgccgaccgtggtgcggtagccgcgcggcagcgtctggtggcgggcttcggaaccccagtgggtgcccttgccgggggcctcggtggcgcgggccagcggcgcgccgagcatgaccgcgtcggcgccgagggccagggccttgacgaagctgccggagtcgcccatgccgccgtcggcgatgacctgcacgtagcggccgccggattcgtccatgtagtcgcggcgggcctcggccacgtcggcgatggcggtggccatcggggcctgcacgccgatggtctggcgggtggcggagaccgcgccgccgccgaagccgacgagcacgccggccgcgccggtgcgcatcaggtgcagggcagcggtgtagttggatgcgccgccgacgatgacgggcacgtcaaggtcgtagatgaacttcttgaggttcagcggttcctgaccggaggagacgtgctcggcggagaccacagtgccgcggatcacgaacaggtccacgcccgcgtccaccacggtggagtagaactgctgggtgcgctgcggggagagcgcgccggccacggtgacaccggcggcgcgaatctcgtgcagacgttgcgtgatgagctccggcttgaccggctcggcatagatctgctggatacgctcggtggcctgatcggccggcagcccggcgatttcgtccagcagcggggtcgggtcctcgtaacgggtccacagaccttccaaatcgagcacgccgagcgcgcccatcttacccatggcgatggcggtggccgggctggtcaccgaatccataggggcgccgatcaccggcacatcgaactcataggcgtcgatctgccaagaggtggagacgtcctcggggtcgcgggtgcgacgggaggggacgatcgccacatcgtcgagtgcgtagccgagacggccctttttgcccaaaccgatttcaatttcctgagacatggttgtaagcctattgcccgggtgggacgccaacaaggtcgtttcccatggaccggacgattgcttcaagtcgttacaaacatgcgctatgactaaatcatcttcacaccatctatcaggaggaagcatggccaaaatcaaggtcgaaggcactgtcgtcgaactcgacggcgacgagatgacccgcgtgatctggaaggacatcaaggatcgcctgatcctgccgtacctcgacgtgaacctcgactactacgatctgggcatcgagcaccgcgacgagaccgatgaccaggtgaccatcgacgccgcccacgccatccagaagcaccatgtcggcgtcaagtgcgccaccatcacccccgatgaggcccgagtcaaggaattcggtctcaagaagatgtggaagtctcccaacggcaccatccgcaacatcctgggcggcacgatcttccgcgagcctattgtgatgagcaacgtgcctcgtctggtgcccggctggaccaagccgatcgtcgtggcccgtcacgcattcggcgaccagtacaaggccaccgatttcaaggttccgggagccggccagctgaccgtcaccttcactccggacgatggctccgagccgattcagcacgtggtctacaactacggcgaagacggcggcgtggcccaggtgcagtacaacgtcaacgattcgatccgcggtttcgctcgtgcctgcttcaactacggcctgatgcgtcattacccggtgtacctgtccaccaagaacacgattttgaaggcctacgacggccaattcaaggacatcttcgctgaggtgttcgagaccgaatacaaggacaagtacgccgaggccggcctgacttacgagcaccgcctgatcgacgacatggtggccagctccctgaagtggcacggcggttacatctgggcctgcaagaactacgatggcgatgtgcagtccgactccgtggcccagggcttcggttcgctgggcctcatgacctccgtgctcatgaccccggacggccagaccgtcgaggccgaagcggcgcacggcaccgtgacccgtcactaccgccgctggaagaagggcgagaagacctccaccaacccgatcgcctccatcttcgcgtggaccggcggcctcaagcaccgcgccgatctggacggcacgcccgaagtccgtcacttcgccgagacgctggaaaaggtcatcgtcgacaccgttgaaggtggtcagatgaccaaggatctggccatgctcatcggcccggacgaaccgtggctcgacaccgacggcttcatgaacgcgctggacgagaacctggccaaggctctggccgagtaaatcatcgaacacatcgtgcggacctacatgggtcatgtcatgtcgccaactgtcatgattgtcgtgcttcatctggaatgttcctcagcacgacaatcatgacagttgttcgatacacgcgcgaaatacccctaattgttcccggatatgtggcgatttgtccactggtccgggactttttcgtatacggcctactagaatcgtgattcagtttgttttcacgcccgcttgaggaggtttcgccgcttatggtgttcgcacgccgctcaaccaccctgctcgccgccattgtcgcatcctgcgcgatggtgctgtcactgaccgcgtgcacctcagacaataagaccgttgtagatggtcaaaccacggtgacgtccaattctgccggcggcgtggccgtgttcacgccttcggacggcattacgctgaatcagcagacgccactgaacaaatgggcgaagctggtgcccgacctaaccaaggccctggtcgacgccggtttcaagaaaggcgatatcgatcatacgacgtccgactcgttggacaagcaaagccgcgccatccaagactttgtggtcgatcatctttcgaataacaccacggacgattccggcattgccatcgcgcccgacaacatgacattgctcgtggctccagtagtcgaggccgacgcttccactcgccaatacggcgattacatcagccagaacctgagcaccaacgatgccacggatgagggagctacttctgacggtgattcttccgaagacagctcttccaaagatgactcgtccaacactgagagcgacggcactgcatcggacgagcaggcgcaggccgtggaccggctggtctcatcgctcaagctggccaaggaatccggcatgcatgtggtattgctcggcaacagcatcgaggggtataggccggacgccttcgtcaagttctcggacgcccagaccatcggcaagctacaggcggaaaagatggtgtccaaactcaagttggataaggccagtaaagacaaccccaaatacattgaggtgctgctgccatacaccgccgtggacgaaaaaggcaacgccaacgattccacgttcgcccaagaggcgttccgtggtatctggcaggtactgggctcctactatcagaagggcgttgtggaaagcccttcaggcaccttggacggcaaatccacggaaaacgattggcaagccgtggcctacgatgccgccaaggaaggctccactgcgaaagtgcttgacaagcgtctggcaaaaaccgacgggcagtccacactcacccgtattgacggcatcatcacgatgaacgactatatcgcctccgaggtcgtcaaggaattggacgatctgggatacaccggctctgccgccgatatcaatccgcagatcaccatctcgggcattgtcggcaatatcaccggcaagaaggatctcagccgcgacgcagtgccggacccgatcaaatcccctgaaaacgacaacgcaaacgactcatccagttccgatgacgatgcggataaggacacctccgcttccgacaaggaccgtgactcgcaatggcctctggtgaccggatacggcgcgtacgtctcgaacatcccatccatcgtcaatggcaagcaatggatgaccggcatggaagacagacagaccatcgccacggatatcgctcaggcctgcgccaggctcaacaagaacgaagcgctgaattccatgccttcaatcaggaactccgaggtaggcggcgtgaagaagatcccgaccatcaacgaaccgttgctggctgtcagcgccagcaatctcaagtccgcgctgatcgcccccggatatatctccttggccgatgccggtctgtgattcatactcgtcacgccgctagccgcctgcgatgcctcttccgtacagccctgttccggccgacaaacattgctgaatcatgacggcttcagtacgatttttcgactccccgcatattgctgtgggtcaagatagtcggccgttcctcgcttgaggccccaatgcaggcaacggtcttcgcaatggtccgagttgccctcaacgatgcctacgggctgtctgcgggagatcgtatcccccaccgagagctcggtaacagccggttcgaatgtcgacgtgacacctccacgatgccgtacactcaccacatctttgccagctactttgccagcaaaactcacggtccctgcctgtggtgacagaattacggtaccttgctccgcaacaagatccacgccacgatgacctggtgcccacgggttgatcggccgctcgaactgttgttcgacctgtggatcgtcgaccggccagtcgaaccgggattcgcactgattgccattgcgccacgccagatcagacatatcggtgaaatcctccaccgtgtatgccgcatctccggtcaccgcagtatccgcatgcgcaacatgctgaggcgtggatgccagtcccactcccaaggcaagcagcaggccgataacggcggccaacgcgattatggcatccatacgccgttgccgttcctgagcccgctgacgcgcctgctgacgccgcctgccggcacgtcgggcttcgtcgcgacgccaatcaaacaacaatggtgcattcatgagattcctccccatagtgtgagtgtgatgtgattccggcttctttgccggtgatacccaccttgaggggtccgaaacaggatgtccagccagaacgacctatgtggttccagcttccgaagttatccacaatgaaatttcgcgtgacagtatcgccgcatcgtcatcatgttgtatgagtgggtattcgatgagtccgattctgcggaattcggcgcgacatgccctacacgcatgtaatttgctttttcgtggcaagcatgtaagatatgtgacttgtgcgcgagagaaatctcaaacacagcagacattcctgcgtagctcagttggcagagcatccgactgttaatcggacggtcactggttcaagcccagtcgcaggagctcacctgaacgggtaactccggacgggatgaaaattgaatattcctgcgtagctcagttggcagagcatccgactgttaatcggacggtcactggttcaagcccagtcgcaggagccatcgaaagcctcggttctccgaggcttttttattttcatcgcattggtgaccagacatgacaccccatcatcaaccgggaaatccatggcgaagacctcaccactactcacatcaggcagacaggtcactgtcaattcaccgatgagaggcacggtattcccagtatcagtctgggaataccgtgcaaatcttacatcgagaccttggtcaggggcatggcggagtcgatcgggaagtcgggggcgctgggggccacgccggcttcgaccaggttcacgccgagcatggcgaccatggcaccgttgtcggtgcagagcttgatttgcgggatacggacgtcgacgccgtagttctcgccgaattcgagcagtttggcgcgcagctgcgagttggcggagaagccgccgcccacgatcagcgtgttggaatcgtactgccggcagccgcgcatggccttacgggctagcacggtggccacggagtcggccagggatgcgcacacgtcgtccaccggaatctcatggccggcggcctgctcgctttccacccaacgggccacggcggtcttgacaccggagaaactgaaatcatacgggtgcgcggcaccggccttgccttgggtcagacccatcggcaccttgatggcgtgcgggtcgccgttttgtccgtggcggtcgatgtgcgggccgcccggatacgggaagccgagcagacgggcgactttgtcgaagcactcccccgccgcgtcatccagcgtggtgcccaccacatcgatcttgcgcggcatgtcctccacatgcagcagcgaggtgtggccgccggagacaatcagagccagcgtgtccttggggaacgggccgaactgcagctgagtgacggcgatgtgcccgatcacatggttgatgccgtaaatcggcttgttcgcagcccaggccagcgccttggcgccggacacgcccacggccaggcaaccggccagtccaggaccggcggacacggcgatggcgtccacatccgccaacgtcatgttcgcgtcggcgagcgccttggacacgcatggcacgaaggcctcagcgtgcgcacgggaggcgatttcggggatcacgccgccgtatcgcgcgtgttcctccatggatgaggccacgacgttggagagcagttcgcggccgcgtacgatggcagccgcggtttcgtcgcaggtggattcaatgcccagtacaaccggttcgctcatcgtgcttctccgttcttctccgtttgcttgccagtgatgtcttcagtgtccgccgatgccgtctgcggggcggcaaagcccacgaccctaggtttcaggtccaagctcatggtgtatgcgtcgatgccttcaggctggtagtagcgtttgcgcaatcccatgcgttcgaatccgaaccggtgatacagggccagcgcagggtcgttatccacacgcacttcgagcagcatgcgcg

SEQ ID NO: 3909 - DNA, 8453 bp, Unknown
  R22_24m  MAG No. k141_11486
gtgtctgaacagttaagcgcggcgcttggctatgacgtgccgctgatggcccagctgccgctggaacccgaagtgcgcgagatcggcgaagcaggccgtcccgcggtgctggatgtcgatggcgccttgcgcacggatggcattggccagaccttccgagggttggctgaacggctgttggcagtgtgagcctgcgcagcctcacacttttgtaggcggcgctggcgtttaagtccggctcgctgctggtgggcgaatcgcttgaccacagcacccgcgacctggtggtcgaggcagtggagcgcactgccggcgtggataggctgcattaacctgcaggccattcacatggacgaggacgccgtgccgcgctgccttggtatgaatgggggatttacgtcgagcccgatgtctggcgggcacctcgcggtaaatagcggcatagcgcattatcggtgcgatgctaagaggtaatggcccatgagcggttccaatcggcgagattgcgttgccgggacaccacgacatgggccatctcgataaaacgatgccgcgtgtcggctgttctcaggtcatccgcagtgacgagaatggcgatccagccgagcagttgcaatgcgtttcgctttgccgcgtcaattcgcatttgtgccggatcggcgtgataggctccctgatattcgaacgcgacgcggcagtccggatatgccatatccaatatgacgtatgagttgccgatattcacgcgatagttggcggtggggcatcccaagcccgaatccttcagcatcccaaacagcgtgttttccggcggagaatccgtgttctctgtcatgtagggcagtgcctcgtggcatttgttacgacctatgaaccgcggactgatttccaagtaagtatcgaaatccttgcgagtggccattctgcgccgtttatcgcggctcatcaaagaggctccaatggccgcaagttcctccaatgtggagtattgggccatctgagcccacatcatgaccggcgaggcaatccagaaatgttcatagtcctttttgcggatatccagttttcccttaaacacatggaagaccacgcctttgattcgtctgcgtttgttggcactggaaacacaggcgtgcacggcatcaacagatagcgtgcaatgtcgggggatgggcgcgccgtagtagttggccgcattgatgtatcccaccagcaatggaccttttgaacggcgcgcagcatcattgcaacgttcacgttctgctcggcgtcggccgacaatatcctcatgcataaaagagctcatgatgcgaccgtaaagctgatttggacttgaatgcaagccaggcagggcaatgtggttccagcttatggagttatccacattgtctatttgcgcagagaacggttctcagtagtatctgtgcgctcaaatgaacaagaacataacaatctcacatcatcgcaaatggcgacatggcagtgattagggcatatcccatgtgcgcttcgggcgtagagaagtgcgcacagatattattgagaaccgttctctgcgcgcctactctccggtggagcctctggccacgacctcggtgggcaggaacaccgtgcgctggaacggtcggccctcgatctggtcaagcactagggtggccaagctgacgccgaatgcgtccattggctggtgcacggtggtcagctgcgggtgcatggctgtggcgtcggcgctgtcgtcgaagccggcaatggcaatatcgtcgggcacacgcacgccgcggtcgagcagataattcatggctccagcggcgatgcaatcactgccgcatatcagcgcgtcgatatgatgctcggcgaggagctcgggcacgctggcgtcggcgccggcaagtcggctacccgacggctcagccagcgagtccagcagccgcacgacggcgttgcggccatcgggccgggtccagccgtcggaccgaatgaccagtgccgggtcgaaatcgccggccatcgcatcctggaatccgagcagtcgttcgtcggaacatggcaagtacggcggtccgatgatataggcgattcgccgatacccgcgccccaacatatgctcggtgagcttgcgtgaagcgagtcgattgtcgatatcgacggtggggaaggggatggcgctgccatagccgacgccggaaatggcgaccggcacgctgatattggcgaatctctgaaatagcgggtcatctttatggaacgtgttgagaatccatccgtcggcgaatccgctggaggcgagtctggcgatgcgtgcgccggccgcaggggagtcggagatcagcgtgatgagttgataatcggcattgccgagcgtctggttggcgttgagcaggatggtgttgatattggggtcggcgattagcgaatccggctgcccgtgcaccacgaacgccacggtttgcgtgcgttggcgtaccaatgatcgggcggcgttgttcggcgtgtagttcacctgcttgacggcggcggcgatgcgctcggctgccttggccgagacatgcggattgccgttgagataacgggagacggtggcgtaggagacgccggatgccgcggcgacgtccatgatagtggccggcttacggggtatgaccatgcccgtctccttcctgtcctagggccgttcacagtgattgtaccgcgcgattttcctgatgattccgcatggcccctgtccggtgcctgtggattgccgtgccggcgtatgaaagtcggtaaacattctctgccgtaagggtgtacgaagtaaatagtaaaagagatttaccgatattaagtgaagtacgacacgcacatgatatttgtaaacctttacgtgagtgttatactccttctcgtaaacgtttacaagaaatcaccagtcaatggagacggccagatcaagcgagccgcaacggttcacaactggacgggaaggaacatcatgaagcagcagcacaacgtacgccccgccatccgcagggtgctccaggccacggccattgtcacggcagcggcccttaccctcgccggatgctcgatgggcgcaccatcctcggacaccggttcgagcgatggcaagctcaccgtctgggtcatgcagggcgatcaaagcgaggccaccatcaaggccatcaacgaccagttcaccaaagagaccggcgtcgaggtcaacatccagaaccagcagtggaaggacatcagcaccaaaatcaccacggctctgtccaccagcacccccccgacgtgctcgacctcggcaatacgcaggtcgccggcttcgcggccagcggcggcctcatggacctgaccgaccacgctgacgagttgcgccagggcgtcacctggctctccggtctggaagagcctgccaccgtggacggcaagctgtacggcattccggccctcggtgccgcccgcgcagtggtctacaacaagaagacctgggccgcggccggcatcaacgagccgccgaccacctacgccgagcttgaagccgacctgcagattctcaaggacgcgcaccaaggcgaggacttcaccccgttctatgtgccgggtgccgattggaagaccgccatccagtgggtgtgggacgccggtggcgactacgccgtgcagaaggacggcaaatgggtcagctccctgtccaccaaggaatcggtgtccggccttgagcagtggcgtgaattccagcacaagtggtcatccgaagcctcccgcccgctcgacaccgatagccccgacaccagccagctcatggccgaaggcaagatcggcgccgtaatcggcaacagcgcctccatccgcgtgattcaggaatacaacaaagacatcaccgccgacgaactcggctccttcccgatgcccggcctgagcggccagaaccagccgtcgatgatggccggctccgtgtggggcgcggcccagaagagctccaagcaggatctggccctgaagtggatcaagatcgcctccagccctgacatccagaacgactacgtgttcgccaaggacggctacctgcccaacaacgtcgaaggactggacaaggccatggcctccgacgacttcccgaccgccctgaccggcttcttcgaggccgccaagcgcaccaaggccacgcccgcctccccgcagtggaccaccatcgaaagcgacggctcgctgaccctgttcaaggacatcgccaccgacaccagcaaggccgaggcctccgccaagaagttcgacgaacacgccaacgagctgtatgccaagtgatgggttggaccatgacaagctcaacgcaactcgcgcacggcgaggccccggcctcacggccggctaagaaacgcggcaatcgcgccccggcgttcctgctgacgcccgccggcatcgtcatcatcgcactggtggtcatcccgctgggattcatgatcttcacgtccttcacggatttcagccagcgcacgctgttcaccggcgaattcgacttcgtcggcctcaagcaataccaatccgtactcaccgacccggccttctatgcggccctgctacgcaccttcggcttcaccgcagccctcgtggccggcagcgtgctggccggcatgggagtcgcccagctgatgaccaaactcggcggtgtgatgcgctacctggtcatcttcgtgctcatcttcgcgtgggccatgccgaacgtcgcatcctcggtggtctggaagtggctgttccagcccggttacggcgtcatcaactggctgctcacccagctgcacgtcttcggcgacatgaccaacacctcctggatcgacaacacctggctcgcatttctggagatctggctgctcgtggtctggcaggccgtgccatacatcgccatcacgctgtacgcggccaccacccaggtcgaccagtcctgcatcgaggccgcccagctggatggctgcagcaagctgcgctgctactggcagatcgtcgtgccgctgatctccccgagcatcatggtcatcaccatgctctcgattatctgggacttcaacgtgttcaaccagatctggctcatctcgcagggcggcccacaggacacgaccgccaccatcggcatcttcacctataagaaggcgttcgtcagcttcgaaatcggcaccggttcggccgcctccgtgctcgtgaccatcgtgctgctcgcgctgacctccgtgtacatccgttacctgctcaagtcaggagaggacctatgagtacgtcaatgagtgcaagtcctgcacaggccgtatcgcaggccgcagcgcagtccgcatcaccccgccgccgaaccaaccccggcaagatcgcgcgccgcgccggcaccactatcctcgccctgctgttctgcgtcgtatggttcttcccggtctactggatgattatcaccgccgtaaagcctcgcgatgagatcatgaccacgacccccgtgttctggcccacgcacctctcgttcgacaacttcatcgttgccgtgacccagacctcgttcctgaccaacctcaagaacagcgtggtcgtgaccgccatctcgatcgtcctgtcgatcatcgtcgcgttcttcgcgtgcgcggccctgaccctgtaccgcttccgcggccgcaagccgatcatggtgttcgtactggccatccagatgacctccggcggcatcatcccgcagttcatcatctacaaccagctcgggctgctcaacaaatacagcggtctgatcttggcgtacatcgccatggtgctgccgttcgcgatctggaacatgcgtgggttcttcctgaacatcccgaaggacatcttcgaatccgcggccgtggaaggcgcgaacgactggcagatcctgtggaagatcaccttcccgctggccgcgcccggcatcgtctcgacctcggtgttcgcgttcatcaacgcctggaacgactacatgattgcctatacgttcatgaaggaccagtcgaagtacacgctgccggtatggctgtcgtccttctcgacacccaccatgggcaccgatttcggcgggcagatggccgcttcggtgatcttctcgctgccggtggtggtgttcttcatgctcatccagcgtaacatcatgaagggcgtgacgaccggtgccgtgaaatagcgtatgccgccgtacctcaccaacgattcgtccgctgatggcggcgcgaccacgtgtcgcctgccattagcggacgaacgataataaaaacagtatgaaaggaacagctgtgcccacattcgaatatacagtcgatgccgcaacgctgtgtctcaccctgattcccgctccggtgacattggaatacacgcatggcacggctatgatcgggtctctggtgacgatcgagaaacgaattcccgaatatgccgccaccgaaggtgccgatgagacttgggaaacgctgccgattgagcagctgtccagcgagctcgagcgttactgcggcgtcaccgtccgtacgcgccgtgtccgtgcagccacaggtgaagacgacgccagcgccaatgccgccgaagatgcgcgagatgcgcgtgcgggtgcgccggcagcgatgaacggcaccgtcatatccctgggcctggattcacgattggcgcatgacgaatacacgctggatgtgttcgcctcagataccatcgccgtgcgtggcggcggcgaaagcgggctgcggtacggtctgcagacgctgcggcagatcatcgggcagacctcgcgtgccattccctgcctgcatatccaagacaagcccgcgttcgcggtgcgcgcctacagtctcgacgtgacacgcggacgagtgccgacgatggagttcctcacctggttcgtcgaccagctggccttatataaatacaatcagttccagctgtatgtcgagcatgccttcgcgttcgtcgagctcagcgaggcgtggcgtggcaccgatccgctcacggccgccgacatcacgtatctggacgagtactgcgcgcgtcgcggcatcgagttggtgccgtcgttggccacgttcgggcacatgtacatgaatctgcgcacccgtgagcatcgcgggctgggtgagttccccgaagacgccgaccgcccgttcagcttcatcgaacgcatggagcatcacacgctgaacgccgccgatcccaaggcccatgatttcgcctcgcgcctgattgaggaatacgcgccgctgttccgttcgaagtccttcaatatcggcggcgatgagacgttcgacttgggacgtggcaggtccgcgcaggacgcgccggaagccggccgcgatgaactgtatgccggtttcgtcagggatttgtgcgaaacgctcgcccgccatggtcggcagccgatgttgtgggcggacatcgcgctcgaaagcccgcgcacgatggatctgctgcccggcgacatcacgatgctcaactggatgtacgagccgcagatcgacgagagcaacatccagaccatcgccgcgcagggccgtcgccagttcgtgtgccccgcggtgcgggcttggagccggttcttccccgattatgcgggtgcctggctgaacacgtatcacatggcattggcgggtgtcaagtatggcgcggaaggcatggtggtcaccgattggggcgattacggccacgtcaacgatccgcgtctgagcgtgccgggcctgtgttatggcgctcagaacgcgtggaatccgattgagatcgatgcgcatgagatgaaccgtcggatctccgttctggtgtatggcgacgagtccggtcgcatcatggattgcctcgtccgcatcgactccgatggggtgtcattcccctgggaccttgccgtgcaggtgctggagctggaatacggttccggcaccggcatgctgaatacggatgtggcatcgtatgtggaacggtcgtgcgggggagagctcgtgtttgaccgtgcgctgggatgcgccgatgcgcgccgccggctgctcctgcggaaccatgcccgactcgaacgacgccgggattgcgaccgggcgttgatcgattgcggcagtgcggttgttgcggtgctcgatggctcggcacgaggaggattgaacccggaactgctgtgggtgatgctggatgggcagcggctgttcaatagactgggcgaggaactgctggtactggctggcggcgaggacgcctgtgacaccaaggatgtgaccggccgtgcgctggatgcctcgcgccgcgcccgtcttgccgccgatctggagttgtggttcgaacggtaccgtgtgcagtggctgtccatcggccgctacgccgaattggcgcgtatcgcccatgtggtgtggtcgtttgcggacatattgcgtaggggagcgctatagggagctcacagaaattcggtcctgctgagaacaaggtgaggcttacgcgccgtcaaacgcacatggtgatttcaa

SEQ ID NO: 3910 - DNA, 13882 bp, Unknown
  R22_24m  MAG No. k141_11670
acggcacgctgtgcatccaggttccgaagatgcaggcccagccgcaagtcgagtccaagcaccaaatcgcgattgagggctgacgatacttgattcgtcccgaagtcccgcttcgagtagctttgccccctctgacgagggagctcccgcgaagcgggtgggggagagataaatcgtaaccaaaccatgcttcccacgccgcctgccctacgctttcaacgccgactaacctgacagacggcgggaaacatagccaatgcaaatgccgagtagggatttaccctacccggcattttgctgtttcaatcaccgaaccccaccctgttcgcgcgccggtcgtgtgccgttctgcagctgtacacatccgatgagtagaatgccttcgaaacgaggcaagagaggcggacatatggcgaacggcgcacagaacgcaagcggcacaccggcaccggcggcaagccattccggcggccacgtcgtatccgcgcgcgccacgaccatcggcctgatggcgatcctgctgtggagcttcatggccggcatcgtgcgcatcgtctccgaaaacttcggtgccacgcttggttcggccctgatctacacggtcggcggcatcctgctgctgatgttccggcgcccggtcccgattcgcgagttccccaagaaatacttgattatcggcggcctgttgttcgtattttacgaatcgtcgatatccctctcgctgggtctggcctctaccgacgcatcctcggtggaagtgagcctggtcaactatctgtggcccacgatgatggtgctgctgtcggcgggcgtatcccatcgcaagcacgcggtcgtcaaggtgctgccgggcgcgattgtggccactgccggcgtggtgctggcggtcggcggtaattccgggctcgactggcatgcggccgtgcagcatatcgccgccaaccctttgccctatgcgctggcgttcgcgggcgcgctcgcttggtcggtgtacgcggtgttcacgccagccatgagtcatggggtggacggcacttcattgttcttcccctgcgtggccgtggcgttgtggattatccacttcgcgtccgggcaggggtggccggccgagccgccgagtctggtcgcatggctgtttgtgttgattgccgcggcggcgattggcggcggttatgcctgctggggctatggcattctgcatgggtctatggagcggctggctattgcgtcctatgccacgccggtgctgtccaccggggccagtgcggtactgctgggtttggcgctgtcgctgccgttttggtgtggcgcgctgctggtggccgccggatcggtgctcaattacttggtcagtgcgcgcaaatagcggggtggctttgctcatggggcggtaataatcccatggggcggtaaaaccctcatggggcggtatcccaaaatggctttattctgccgtttcacaatttcttcaaaccgccccatgggccttttaccgccccatgggtaaattaccgcccgatgggcagcagcaacttactcgccgcggcgctcggacgggcggcgaatcgggtcaagcagcgtattcggatcggagatgccgaacatgctgcgcccgccggtggattcagggtgcttggcgagaacggccagcgaaatcgcccccggaatcataatgatcaccgaaagggccgccaatccccagttcacgaagaatccgagccccagtacgatggccaccacaaccaccaccgtgacgataatcgtcaacagtgctcgacgtgggttggtttccctggtccaagaggtgctggctgcgggttttgctgttgaactggccgcggcgtttgtggctgttgtgccatcagccgtgccggtcgtgggccttgccgccgcgctcgtcgcggggtcagtaggggcgtcagacacgttatcggcgacattgccggtcgctgctggacgttgttcgtttgcgtgagtcatatccaccaacatattccctgcttccggctaaagctgggacaagcctgcgcaccgctaatccagcgccgacactggccttgagctgcggacgtccaggccggatgtgaacaggagctgaacggagtctggggaaaccatgagaactcgcgacaatttttgtgaaattgggtgacgctctatgaatcgcgcgctagtattgcgtgagcttacaagacgaggagcctggagcgcggggacgaaggatgaagaactccgtttggaagacgttcatggaattgtcgctggtccgcggaatcgtgccgtggaccgtgttcggactgaccgcgatcgcggcaatcatactgattgttgggctggcattgagcaagaagcgcggcccggcagcagacggcctggcgccggacggcgaatcgtcggcccaatcgcccgtcgacccagataaccagccggccaaccagcctacgaacgcggctgctacggcgtcatccgcagcttcgacggaagagacgtttatttcccatggcctgcgtacgccgcaacgtcgtcacttgcatccgctggccgccgcgctggccgccgccgtgctcgccggcgcgggcggactactggccacatggctgatgtccgacgtgttcatggtgttcggcgtatcgctgggctggccggtgatcctcaccgtcgcgggaggcttcgcgggcctcggcttcgtgctggccgccgccgtgacgttacggggggcccgtcgcgcgctggccgtcgtgctggtgccgctggtgctggcgtccaccgcgctcggcgtggactcgatctacggcgaataccagaccatcggcagtctcgtcggctatacgccataccccccgctcggttcggtcaccgtgcgcaaagcctcgatgagcgtcggcgagtggcgcgacaaggcgcgcaaggacgctctgccatccatgcccgactcgggcagggtgttcgtcgtcagcatcccgaacaccgaatccaagttcaaggcgcgcaaggcgatggtctacctgccgcccgccgcgctgtccgcccgcccgccggccctgccggtgatggagctgctcgccggtcagccgggcagtcccggtcgcctcatcgacgccggcaacatcgccgccacgatgaacgcttacgccgccgaacatgacgggctggcgccgatcgtgctcgcacccgaccagaacggttcggccatgcacaacagcctgtgcgccgacaccacccgaggcaacgccgaaacctacctcaccaaggacgtggtgaactgggccagggcgacgctgccggtagccaagtcggcccgtatgtgggcgatgggcggattctcgcaaggcggcacctgcaccacgcagctggtgccgcgtcaccccgacatctacggtgcgatgctgccggtggatggtgagctcgagccgaccgacggcagcgtcgagacgatggttcggcgatatttcgccggcgaccgcaaggcctacgacgggcaggtgccggtcaacgccatcgccgccaccggcacggccggccaggcgctgttcgccggcgccggcaaaggggatcggaagtcggtcgccaacatgcgcaccatcgccgcggccgcgcgcgcggccggcatgcagaccaccgaactggtcgtgcccggcgccgaccatgactggcatgcggtgcaggcggtctggaaccccggtctcgactggttcggcgcgcgaaccgggctgggcgaaatgacgaaatcgttggaggaatacccacaagtggaggtgttgcaatgagcgaagaacaacagcatgggaacgcgcggccggcggccatgccgcagacgcggcggcccttgcgggacgcggaaccctcgcggacgaagcccgccacgacctcccgcgccaccaaaccgcatacggcaaggtccagccatgcggcggaaagctggcgtgaactggccggtgacgtgcggcagtgggcggacgaccaccggctggccgtcaccgccacggcggcgctggtggcgctgaatctggtggcgtggctggtggccgcgatggccggattcgcgtttccgctgcggctcagcaccagcatggccgcattcaacgccggcaaactcatctgctcgctgttcctggcgcgcggcgtcatccaactcatggtcgacgccgtcctgtggctcgtcatgctgtcgatagccgaaccatggctcggccgtgtgcgcaccgtcgtcaccgcgctcgcctgcgcggccggcggcgtgctggcgggcctgaccctgtgcgcggcggccggatggatgttccaggactccctgttcgtctcccgcatgcggttcgcattgagcccgctggtgttgccggtcggcgcgctcatggcggccagcgcgttctgcagccacctatggcgcaggcgcatccgactcgtcggctatgtggcgatcctggtcacgttgctctacagcggcaaccccagcggctactgcatactcgccgccgcgctgatcggccatgccgccggccgtgtgatggccggtccgcccgcgcacgtcgaagccgaatggcactggctgcgcagcacctccttcgaggcgcggcgcatattcgcggccatcgccgtggtactggccctggggccggtcatcgccatcacctcccataaccatgcgggcccgctcagcacgatcggcctgctcatgagcccggtttccgtcgacaacggcatgctggccaaatgcctggccggtgacacgcacggcggatgcttcctgcagttcgatctgttgcgggcctcgatgcccggcgcggtgctgcgctcgttgctgcccaccgccgtgaccctggtgctggcgtggggcctgtatcgcggacgtcggttcgcggccatctgcaccgtggccatcaacctgttcacggtggccatcgccgtcgcctactatctggtcgtgccgctgagcttcgcgccggacggcatggcctccctgctgcagcacggcgcgatcgtggcctgcgtggcgaacgtcctgcccccgctgctgttcgccatcgccctgctggcggcgatgaaacacttcccgatccgcatcggctggtgcaggctggtcggcggcatcggcgccatcgtgctggcctggctggcgtgcgccgccatatacctgatatacggcatcgcccaacccgccaccttctcgccacgcgctacggcctcgtcgctgctggccgagctgccgggacgcttcctgcccatcggcttcctgagccatatgaagctgtcgttcgtgccgcgcactccgatggcctcgatcgtgtaccaaggcgtcggcctggtgttctggatcgtggtgctggccgtggtgatccactggatgggcgacgtgagcgaatcgaacgagcgagcccgggcgcgcgccgaacgtctggtcgaaaccggcggcgaatcgatgagcttcatgaccacgtgggaaggcaacagctactggctgtcccccacgggcagatcggccgtggcgtatcgcgtgctcaacggcatcgccctgacctgcaccggaccgttcggcgatccggcggaatggatggacgatctgaacggtttctcccagcactgtgcggaacgttcgctgtcgccggtgttctacggcgtgcatcgggaacagcgcgacgcgttgctggaagccggctggaactccatcgaggtcggcagcgaaatggtggtcgacccgcgcggctggaagacgaccggcaagaaatggcaggacgtgcgcaccgccatcaacaaggccaagcgcgacggcgtgaccgacgtgcagtccacattcctggaagcgtcgcttgatgtgcgcgaacagatcgaggacatctccgaggagtgggcgcagctcaaggcgctgccggaaatgaagttcacgctcggcggcgtcgaggaactgcgcgacccgcgcgtgcggctgctttacgccatcgacgcggacgggcgcgtgctgggcgtcaccagctggttgcccacctggcgcgacgggcgcatcgtcggctggacgttggatttcatgcgccatcgcaccgacagccccaacggcatcatggagttcctgatcgcgcgcatggccgagcggctgcgtgacgagggcgaagccgatcccacgcacgccgtggagttcatgagcctgtccgcggcgcccctggccggcatgaatcccgatcgggacaacgccggggaggacggggcaccggccagcgaaggcacgcaggtgctccaacacgcgctgcagatcgtggccgactggatggaacccgcctacggcttccactcgctgttcaacttcaagcgcaagttccagcccgccgaagcgccggtctacgtgtgctacccggacccggcggcgttgccgcagatcgggctcgcggtggtgcgcgcctacgtgcccagcgtgacgcccgccgaagtggccggcatgctcagcacgctgcggtcgtgaaggtgtgcacacgggtacgcaggttagccgattcgagcctgagacggggtatctgctttcagagaggtacatttggccccttgcggacaactaactgccttcaaagaggtgcctgaactctgaaatctcgagtatgagcgttgcaatgacaacgtttgtactcggggtttcccgtattcggtgcctctttgaacgcagatagcattctgcagaagtccgaatgtacctctttgaacggagaaagcctgacaaggagggcgcggcaagcgctatctccgtttcgaggggctgatttggtctctcccggaggtctactcccatttcgaggggctgatgccgaagtattcacgctccaaaatcggcggaatggcgttggcgcggatgggtttttacatgcggtctagcggccgaccagccccttgaaacgggagtagacctccggcgggggtcaaatcagcccctcgaaagcgggtttgccggtgcagaggtgtcgttgactgcatcgcgagccgcctcgacgtagtaacgtggggcgtatgagcgaacgtaacgaacacaatgacggaaatacgcaaaccgcatacttcgccggcggctgcttctggggtctggagcgctacttccagaacgtcgacggcgtcacggacaccacggtcggctacgcgcaatccaccgtcgaatcgccgacctacgagcaggtatgcgcgggcggcaccgatgcggccgaaaccgtgaaagtcgagtttgacccggcacaggtcagcctgcggacgctgacattgctgttcctggaggtcatcgacccgttctccgtggaccagcagggcgaggaccgcggccggcagtaccgcaccggcatgttctacacggacgagacgcagcgcgccgtgtatgtggcggctctggagcagctggtcgaccgccagccgcagcgcccggccgtactggtcgaaccgctgcgcaacttctacccggccgaggcacaccatcaggactatctggtgaacaaccccggcggctactgccatgtaccgatcgccgcaatcgcgaacgtaaaacgccgtcaaaagtacgtggaacgcatctgggatctgacgcttgagcagttcgcggtcacgcagaacgccgctaccgagcgcccgttcgtcaacgagtatgacgaggagtttgagcccggcatctacgtggacatcgtcagtggcgaaccgctgttctcgtcgcaagacaagttcgattccggctgcggctggcccgcgttctcccgcccgattgccggtgacttgctgaccgagcatgaggaccaccgcattccgggccgcgaccgcatcgaagtgcgcacgtcggacacacagattcacttgggccacgtgttcaccgacggcccggccgaccgcggcggcctgcgctactgcatgaattccgccgccctgcgcttcgtgccgcgctcgcgcatggccgaggaaggctacggcgactggattgcggttgtggatggggatgatcaggcatgagcatggagaatatcgcgggcgctcgcaagcccgccaagcgtgaggatgagcacacggtcgccggcgagcatcgcatgatgcgccgtgcggaccgtgaggtgaccgatcccgagcggatcgccgcgatcatcgccgcctgcgacatcgttgaagtggcctatgcggatgccgagggcctgactatcgtgccgctgaatttcggctttgattacgacgaggcgactggcaagctgacgctctggttccactccgcgccgcgcggccgcaagctcgacgcgattcgcgccgccgccggtggccgactgcccgtggctttcaccatgcagaccgactgcgaggtggtggcgggccgcaccacgtgcaattggggtgaggcgttcaagtcgatcgtcggcaatggcacggcgtcactggtcgaggatctggatgaatgccgccacggcttgcagacgctgatggcgcagcaggcgcatatgccgaatgtggaattcactgatgcgcaggtccgcagcgtcacggtgtggaagattgagtccgactacttcaccaccaaagtccgcaccaaacccgtgcccgcacacatgcatcagcgttagccggggatagcgcgccacctccccactggcgggaggcagcgcgcagcgccggtggatggcccacgtccggacccgatagacttgccgccatggcagcagtgacagtggtaattaccagctacaatcagggcccgttgattcacgaggcagtcgagtcgtcattggccccagacggttcgtccggaacggatcatcatcgtgaacgatgggtccgatgaccacgcatccgtcgagatgctgaacgccactctcgacgattgccggcacggggcgatggatgcgaatggtgtggccatcgacctcatcggccaggcaaacgccggtccttccgccgcgcgcaaccgtggcatcgccgccgccgaaacgccgttcgtagtggtgttggatggcgatgaccgtttgcggccggccttcattgagcgcacgttgtcgatgttgtccgccgacaaaacgatggtcgccgcatccggctggctgcagactttcggtgtcctggaatcagtggcccagccgactggtggcaatgccgccgcgttcgtgtcgcataattgctgcccggccacgtgcatgattcgccgtgtcgcgtgggagcgctgcggcggctacgacgagtcgatgcgcggcggcttcgaggactgggacttcttcctgtcgttgttggagtgcggattggcggtggaaaacgatatctgcggtgctggggttactggcggtactgagcatgtcggaggttttgggagtgcctgggatacagagaatcccgcaaaagacgcggcccatatcggcatcgcccccgagccgctgatcgagtaccgcacggccccggcctcctcaaacgtgaccagcatgaccaagcgcctcgatctcatgcgcttcctgatcgccaagcaccgcgatctctacgccgcgcacatcgccgacgccatcctcggcgttgaagccatctccatgagccgcttaaccatgtgggaatcgttgatgtgcggtgacacctccgccagccaagccttcatgacccaccccacctatggcgacggcgtaatggccgccgccgtacgcttgcggagttgagaggcatcagctgaccaaatgccgatagagctccggatcgattggccgggccaaccgcaggatcgacagtgtgaccttcacgctgccttgtccgcttgcgtcaggtttggtggtgagttgagggttgtcaaacgcggcaacgtggccaacgtagtagtacttaccctcggcctcttccgccttgcgcataacgaataacgggacgaaatgcgtctggccccaattcgggccaatgccgttaagcgcccattggaattcgggagactgcggagttcgtccattcttgctgaagtatttcatttcctgtgtgctcaggaattcatcttcgtattgacttgccgcgtatttcacgaagatgggcatggtattggtttccttgtcgaggaggtaaccacccacgttttgcggagtattctccttcttccatccgcacagtcgcatgacgtctgccatggaatatttgcgttcgtacaagaacatgtgatcaaagacctgttgcctggcggcggcctcacggaatatatctcggcaattggccataccggtgcgcagagtgtccgcaaagaagatacggaacgttctgttcgtggcaagcatatcggcgaatctgctgttcaaccgatatgcggtaccgttttctgtgccggtgctgttcacggcttcgactaatggctgattgccgaaacgattgcagtttgggccggtgaaatatgagtaatcgagcacgctgatcgcagagtcgaattgcgtgtctgaactatcggactgcgggaattcagtacgaatcgcatcgagcaattcgctgcggccgattggcgagcccgcactccaatgctgcggtacgtcgtcgtcgagccgttcgctgacgaaatggcatagctgagcaagaatgaccaattcgtgcggtcgcaatccgggcagcagcagctccgctgccatcttgagtatcgcgtcttcaacgtcggtcaccggctccaactgatcctcaaatgtcgcttcatgatgtttgcctttgcccaggcttttttcacgggaacgcacgaaatcaagatagttgctgcgcttcgatgcgatggtatacggcagtgaggggtcgtagttatagatgtccgtaagcatggggatgcggcccagctcgtaacggacttggcgatactgttcggacagctttttcatgtcggaccagtcggcggtgtccaaagacttaaggatgcgctccttggcgatcgggtcgaaactgatggacgacaggccgattgactttctctgcaggttcttgcgagctctgtcgcggtcgccggtgttgccgtataacgccaccggaatcagatagttgttgttgtaattgccaatgaaatcgataaccacaacgctttctttgtgcgggaatttgcgcagtccgcgcccgagctgctgcgtgaagataatgctggattcggtgctgcgcaacatgacgatttggttgacggcgggaatatcaactccctcattgaacatatcgacagtgaagagataatcgagttcgccttcagtgagcttgcggacgtattcgtctcgctgcgtttgggacatgggcctgccgtcatcgtccgtgctggtaacggcagcggtgcgataggggcgttcagcttgttgattccactgttggttaaacagctgggatagcttatgggcttcctcctgtcggctgcagaacacgagtccggtgaccggaatgttgaactgcccatattcctgcaacttgtcaatgatgtagcggactcgcttttcggtggcaagctgctcgatctcgtacttgagctgtttcgagtccttcgcatcaaggcccttggagacatcgagacgatgggtgattccattcggatcgtcgttggagccaaggtattccgcaacaccgtagtagtggaatggacagagcatgttctcgtccaacgccttttgcaagcgaatttcgtacgcgatgttatgcccgaatagctcgaagatgttgatgccgtcggtgcgctctggcgtggcggtcatgccgagcatgaagtcggcatctttgaaatgattgatgacgcgctgatatccttcggctccagcgtgatgaacttcgtcaaccagaacgtagtcgaattcatcggatttgaattgcgccaaaacctccggctgccgcatcgtctgtaccgtggcgaatacgtagcggcggtcctgttgcttgctggtgcctgaatacaatcccaattcggattcatcgcagccgagcaccttttggtaagacttcattgcagtttgaagaatcatctgctgctgggcgatgtacagcatgcgcttcggctggcattcgcgtacgtcgaatgcggaaaggtacgtctttccggtgccggtggccgacacgataattgcgcggtgctcgccttgttcacgaatcttcttgagattcgccaacgcctcctgttgcatggcgtttggctgaatgtcatgcccctcaagcgactgcagaatctcatgacgcggtggggcgtatttcttgaaatcttcctcatactgtttgatccactcttcggtcagcggaacggaatcagccacctgtgagtcgatttcatcctggaactgcccgaccagctctccatccgccagcgatgagactttgagattccattcgcgttgcgtggtcaatgcggctccagtgagattggaactgccaacgtacaggtcgtaatagggtgtaccgtctttcatgcggcgagaaaagatatatcccttgggatggaatggttgtccttgagccattgcggaaactgaggtattacgggaaccttcccacacgcgaacgtcaacaccagtggtgttctgaagatgcagcagctcccagaatgccctgggatcgttgaaatgatttttcgttgaggtaatcagtgtgcccgctcgggtcgctgtttcatggtgacttctgaagtcttcaaataagctgagcacggcctcagccgagacgaatgcgacagaaatgtcgaaggaatcgctagtagccaaggaattgccgatttcctcgtgcatggtcaatccaccggggcgatttgcgatgagggtcggcttatattcgccgggagcatctgagcgcggctcgatcagacctgagatgacatcttcgaggatcgagggggttggatcagaatcgtgatgttgcgtgttggctggagagtctgaggtgctgaccagatttatagacatgttgccctgttcccttgcgattcggatcgtttgatgactgcctgactgcgctgtggcgcgttcattggagcgtcagttgtttgttcgcgataatcgcgactgcttcgcgatctaccggagcccagttcaatgtcggcatatcagtaggattcagccatcggatatcggtgtgctcggtgagatgcggcgtaccggcgatgaggtgacagatgaatgtggtgagccgcacggttccaaagtcgtaggcgtattcgctggtacatacctcttccgcgacctcaacttcgcataacagctcttcttcgatttcgcggtgcaaggcttgccgcgctgtttcatgaggctcaattttgccgccggggaactcccagtatccggccaacgactttcccgggccacgctgggcgcatagtacggtgccgttggtgacgattgcagctcccacgacgttaatgattttgcgttcccgctccatgaacaaccaggatacaacgcttcaagatccacaagcgatccacgatcctcggtggttttgcatatcgatcctgatgcttttgattatgcgatcggacgggtcgaaaatgtcggtgtggacgctctcgactattgtggtagccaagagaagcgatccgtttccgaggtgagattcgggaacggtccgactctcggcagtgatttatctacgcagacaagccaaaggagcctcgccatgatcctcgtcaccaccaccccgtccgtcgacggatacaccatcaccaattaccagggcatcgtcttcggcgaagtggtatccggtgtgaacatgttcaaggatcttggcgcgggcctgcgtaacatgttcggcggccgcagccagggctatgaggaagagctgatgcgtgcccgcaacgaggccatcgccgagatgcagcagcgtgcggaggcgatgggggcgcacgccgtggtcggcgtggacatcgactacgaggtgctcggcgccgacaacggcatgctgatggttaccgcgtccggcaccgccgtgcagatcgcgcgtacggcctgag

SEQ ID NO: 3911 - DNA, 29041 bp, Unknown
  R22_24m  MAG No. k141_11778
agatgcagcagcgtgcggaggcgatgggggcgcacgccgtggtcggcgtggacatcgactacgaggtgctcggcgccgacaacggcatgctgatggttaccgcgtccggcaccgccgtgcagatcgcgcgtacggcctgagcctgccgagcttgggcccgagctcgtccaccgagccgggctttgtcggttatcgtgacgcattacactgacgctcatgaccatacgaatcgaagcatacgaccggttgcccgacgcggcccgcgccatccgcgagcaggtgttcatccgcgaacgcgactggcggccggaattcgatgaatgggatgccgcgtccgtgcatctgctggcgttcgattcggataatgatgcgcccaatcgccctggctcgtccgcgcaattggcctcacgcagccagcccattcagcccagccagaatcaccccgtagcgacctgtcggttctacgcggaccccgatcatcccgaccagcccgggcgatacatcatcgcgcgactggcggtgctgcccgaggcgcaaggcaggcacatcggctcgcggctgctggccgacgccgaacgccgcatcgcgcaagccggcggaaccatggccgccgtgcactcggagaacgaccactacaagttctacgaacagcgcggctaccggctcactgacgaggtctatgaaggcggccgtcacggctggctggtcaagaacctatctcgtaacgtatgaaggcccgcctcggtgctgggcgagcgaacctacagcgcacagacaatcagataaatcgccacgacgtggcaggcatacccgatgaccgtgcccaagtgaaacacctcgtgaaactcgaaccagccggggacggggttcggcttgcgcagcgcgaagcatacagcgccggcgatgtacgcggcgcctccgcacgcgatgagcacggtcggcgccgggcctactgcgggagccgtccagagctgcggaataagcgttaccggggccagccccaacacgacgtatacggtggtgaacacccagttcggcgtccgcagccagacgatatgcagtatcgtgccaatcgccgtggtcgtccagattaccgtgagatatggccggcgaatcgccgggctgagcgcgaacagcacgggtgtgttggtgccggcgatgatgaggaagatgttcgaataatcgatgccgcacagcacgcgagtcaccttcgcgctgcgccatggcacgacgtgcagcagcgcgctgttgccgaacagcagcatggccgaggcgccgtacaccgcgcaggccgctttgaccgagccggccggcgcgatgcagatgagtacgatggacgccgcgatgcacagcggcagggtggcgaggtgaagccatccgcgcagtcgcggcttgcgattgccgaatgcatccacggggacgatctggcgcttgatcgccttcagtgcggccttggcttggcggtagcgcgattgcgcggccctgtatcgggccgatgcacggtccagtgcggtggggttggcgtttgcgctggatttttgactcgcggttgcggaaggcgcaactgttgcggcggaagccatggttcgtccagatggcgtgctgatggaaacgctcatactgatcacctcgctatggccggcgacgctctctcgaccactaacctacgctaccgtaacctagtataggcccgcgcaataatcaaggttgatttcgtaatgcttacagttcttccgtggtgtggtattcggtggtgcggttgcggaatgcatcgccgagtctgtgaactcgtattatgcgtgtctgctgggtccgacttgtgtcggttcctgatttcggattgctgcgaatgatgctcccaacgccgccccgccagttgccggattcgtacggctcggccgttcggccgagctggtcgtcggtgactccagatacttcgttggtttcgtctcggttcatgatgttatgtaatgctagtttatggcggatggaaagttgaggaaagttaaatctgcttcatgggcttctctctgatctgtatttgtcccggttcatatgtcaatcgtttgacctgtcgaccggggcagaatccgctgtcccggtcggcgatttcggcttgttttcgtgaaccgggacactccggtttcctcaactcatatcgtctggcagacggaatcggcggaataaggccgattctggaattggcacgttgtcccggttttcgcataaatcgattgacatttataccggggcaacaaaaattgtcccggtttgcaaagatcgcccgaaatcgcgaaccgggacagcggattctggcctggcttgaacgtcaaacgattgatgcaggtaccgggacattttccgccacgaaagttgggccataagtctcaagtcctaaagcccccctgaaaaacggcgcttgcccggacaaagcaaaagggctggaaccttccgattccagccctttagttgctggtgcgagtggagttgaacccctggggacatgttgcaatcaagccgttttcgttgaaactccaacgattctaggtcattacaaatcaatgattttcaacggtttcaggtgcaagatgttggattttcgttggattatgaagtttgtcgggccccggtaaggcccgtatatgacgaaagcgcctcgaatgtcaccatgaggggtgtcaatcggggtgcttcgtctcatccaattcagcggcggaaccattccgccaccggttcgatcatacgaccggacgagggcgggccgcttcccgttgaatttcgtgacatgggcgaatcgcctgcacggggccgttctcggtggcttgacgttccgctcggaaacagggcgaaaagccggtttcagggacgatagcggaccgtggcgatgcacgcggaaagtccgttaccgggttgcggggggatagcggcgctatgacctgtggggagccttgcatgggagggggagggtagtcccccaccccatgcgaggtggtttagttgggccagtcggcgcggcttgtgctgttgcggtatggttgggctttccgtatcggtgtttttggtcttcccgatggtttgccggttggcttggtggtgtgttgttggatggcttcgagtcttggcgtcattcttgttcccggtgttcggcggcgatgaggtcgaggctgtcggcgatgtggcagagcgcttcgagtcggatgagttcgctttggctggcgagtgagttgaatagtttggctcggttgagtttggcggtcatggtgtcgcccttgcagtcgtcgggcgtgtgcatgatcgtgtcgaagtcgttgttggtcatggcgggttccttacttcttgttgacggtgatgacggcgaggtggtctgggtatgggacgccccagccgaagcggaaggtgaggcgcacgccgaagctgtcgcgctcgaagtaccggtcgtcggtgcgggcgatgttgatgtccccggtggcgctgtacacgtcgcctatgctgttgatgaggattttgccgttcggggccatgccgtcgaggtggacgggcaggccgaacaatgcgggggtgggtgtgttggccacgtcggggctgatgatgagccgtccttcggcgtcgcggagtttgagcaggtaggcccatacgccgtagttcatgacgagtccggtgggtgcgccgccgttggtgctgatcgaggcgatggcgtccacgatggggtcgagcgtgttggtgatgttgccgccctggatgatgccggggtagttgaacaggccggtgggcgcggtctcgggcttgccttccgtgggcgcggggttctgccacaggatcgcgttggccttgtcgatgatggtcttcttcatgccgtccgtgagcattcccaccacgtcgatgccggagccgccgacgttgccgttggaggcggcgctctgcgcgccggattcgttggagaacacgttgagcacggccaccttctgcgtgcggatggcgagttcgagtggcttggtgtccgactcgttgatggccgcgccctcggcgacgatgctcgcggcggtgcgggtgccgatgtagggcacgtagaggctggggctgtcgccctgcacgctgcccgcgatggtggtctgggcgaatactcccgcgtcggggatgatctgtttggccggtgcgctgctgacgctgccgaagccgggcaatgcggtcgctgctgccatgatgtttcctttcggtctcgtgttcctgcggccaaaaggaaaagcagccggaaggaacgcttgtgttgcgccttccggctgctttctgcatactgtgtgctaccggttattctacacgttgtcgagtttgttctccagttgttgcgcgtagttcttccagtagcgtttgccgcgccggtgcttggccgattcgatggtgagtgactgtatctggtcgatgagctggcggcggctcagattccggtagggttccggctcggggtcacttgggttcatgcttgggctcccttatgtcgttcgatcgtttcagttggtcggctatccggcacaatgcctggagcatgtcgtcacgctccccgccttgcccgagttccgataggtaccggtcttcgaggcttgcgggcttgccgcgtttccttctgcctgtcatgtgttcctccattcttctgatgcgatgccggtatgcggcgggtatgcgggtcagcattccaacaccggcaattccgggtagcggcgttgcaggtattcgcataccgcgccgatgtcgtccagccagcgttcgagttccccgcaatggttcgccagatcgcttggctggtcggggtcggtgaactgccagtagttgttgactgacggttccatgtcgaagctgagcgcggtctgtgggtcgccttccgtgaaccatgagatgccggcttggaagtccagcatgaagtcgggctgggtcgatctgaacagcacgatatcgccttggtctgtatgctcctcatgcacgaaaccgggcgtatggtcgagcatgagtttgggcttcggtgactcgttcgtatcgctgctagtgttggtgtcgggattatcgttcatgttgattcctttctcggttccgggcggtaccgacgcccggaaccattcgtttaggggtgtcccggtgttggtagcgccgggacgcctgttttttcatttcttgaactggctggttgcttcgctgcctgcggtttgacgccatgaaggcaatcgggcgtttgattctcccgcatgtatccccgcgttccggctgccgcaacaatcggagcgtgtgacagatgggatacaggcgaagcgggttcgactatggctaggtcatggcctcccccttccgcgtggtcgtggcctgttgtcgggcttctcccacttcgggtctatatgcagggtctcgggctggagctcctgcgcgagccgcaacaggcttgccgattggacggacgctatgagcgggtctgcgggaaccctgaagctcacatccttggcaccgcccttcatggcgtatgcggtggcgcgtatcagccgggcggcgagcgccttggcctcatggcggggctggctcacgtccgcgatgaaatgcgcgctcaagtcgcctttccattgggggccgatgttcaccatgcgtcgcctccgatgaacgcgggctgtatccatgtgcctttgatgtgcagtgagtcgatgaaccttgcggcctcgcacagcgggcacgagaccttcgtgtaggttcccgcccgccgcgccgtatcgcatacggctatctgagcgggcccgaactccaccgtccgcccgcacagggtgacggcggaagtcggggtgagctgacggcgtacctcgtgaacggtgagcgtgaatggccgggcggtcttcttggcgtgaatgtcattcatggttgcttccttggctttattagtcgccatgtgctttattgctgtggtggcgagtaatcatgcggttggcttggcttattactgccgtctggtcttattgcctctgtcggcactaatcgcggtagtaatcaaaaccgttgcggcagtatggctaacgattagtgccgtattagtgccgataggagcaataggggttgtcggcattactgcccctttatgccttgtctggtagggggtagtaatggggtagtattcaaaaccgttgcggcagtagggctaacgatttgtaccccattagtaccccaattgagtaatgggggctggggtactaaccggctttatgggctatgtcccagatgtagccgcgtccagcgccggtgtggttcgggtcgggtaccgaggatatgagtccggggtgccgctccctggccttgcgcaattgcttgtccgtgtaaccggccttctcggcgtcggaagacagttgggagaacttcgtaccgtgatgctcggctaggtagtcggtcagccagtcgatcacttcgccacgttccgtgcgcttcgagtccgctgattttggtaatgccttctcgctgcgcacgtcgtccacggtcttgtcggtcgggcttatcctcgtgacgatgccgaccggcttatggtctccgtcgtcggtgtccacaaagcgggtctcgaactcatacgtgtagctgggcttatccgaacggcccttgaccttcaccaactgcattacacgggtgccgtccttggcctgatcgaggctcacgacgatacgcggcttgttggtgaacgcggcggaaccgcccacggcctgcttggcgctgccgtcaaggctcttgttgttgtggtggactcccacgatcagcatgtcgtcctcggccccccacttgttaagcggcttgaacaccttgttcacctcatccaaggcgtacaggttcacgccgggcatacagtcggcgagcgcgtcgaacaccaccatacggatatcgttctgctcgcacaggcgttggagcatgggcacgtcggcgggcaggtccacggtgtcgtagtcgcttgagctcacgttctcgttgtcgttggtcacataggtgaacaggcgctgccgcatgacgttcaggctcacgccgtgcgcctgcatggcctgcttgaccatgccggggtcttcctcgctcatgatgaacagcacaccgtaaggctggcccgcccatactccctcggtggtgccgagcagcacgcgggcggcgagctgttccacgaccgacgacttgcccacgtcgttaggcccgctgaacaggatcgcgcccagtcccgcgtaaaggtaatcgacctgtttgagccgcttggtgtggaagtccgctatcgagcgcaacccgtggtagtcggtcttgcccttctccagtttcacgccccacccttccagttccgagatatgccgcacgagttcgtcggcgtcccggtcggctctcatactctccatgctcggcatgggctttcgcttcgtcatgacgctcataacctgctaactcctttccagtccaacggctcgaacggatggccgctcaagtcgcgcggcacgccgtcccccttgtagaagccggttggctccagatcgttgtcctgcatccaacgcaggaagttcaggtaacgccggtagtcggcaaccgccctcagataggcggatatggcttggaagtcgcgcggggactggtttagactggacacgtcgggttcggttggttccatctccggcaacctcctttctttgagcgcctgcctttacttgcggggcgggcgctcccttgtattccaagacgatgagcagcagggccagcaggccgcatgtgtaggcccaagcccattcctcaagcccggtcagctgccaggcggctatggcgagcgccacggcgatgattctcaacatggctatgcctcccgtttcatgtgctggtggatgtagtgcaatacggaatcacggtggtagaacaccttgccgctgacattggtttcgtattcggggcccatgccgttcaaacgcagttcgcgccagtaggagacgggggtgtccgtggccgaagccaccaccgtatccatgctcttgcgcggaatcgaacgcgcctgctccaactgctcttcggtgaaaacaatgcctctcatgcgttcaccgccgttcccatgagccaagcgtcaagatcgcttttcttgtacagcaccttgcgagggctgggcttgaagaagcgcggccccttatgcgcgtatccgagcgtggcgagcgtgccggtggtggtcttcgcatacgctgcggcctccttgcgtgtaagccacacgtcgccgtccgtgatggcggggagatgggttgccgtcatgattacctccatattgcattcattgatatttaattgcagtgattgcattatggcgtcatctattagtggttgtcaataaagacacgccgatgtgattaaagaatttccattgctgtttaatgtcaatatgattgactcatgcctaggattactaacccaatagaggccactggagagcaagtggccgcaaatatcaaaagactgcgcggttccatgcagtacaaagaactttcagagcggctagctactgttggtagatctatgactccagtagcgattcgcgatgcagagaatggcaaacggcgcgtggatgttgacgacctcatggcctttgcgattgtgttcggcgtgagtccgctcacactgctcctgcctaatagcggatcatgtgacgtgaaggcacacgttacgggacatgccggtgagatcacctgcaatcgaatatggcgctgggcgctgggagaacatcccctgccgtccgccagaccggaaacgatggacgccatgatgtctaggcgcgcgcaattccgcgaacgggccaagccgacaatagacgacatcaagccgagcgacgaaaacgtgaccgaaaccccgatgcggtatgcggcgcgagtgttcgcaaatctcacgccggaacaattgcaggccatgaccgatgccttgaacgccgatgaggactaacgcatggtttcctatgagaagtattcgctgaagtccggtgaaacccgctggcgtgtccactaccgtgaccccaaccacgtgaccaaggaaaagagcgggttccgtcgcaagatagacgctcaggactgggcggcgcgcaacgtcaccatagccatgaacgacggcagctatgtagacccgcaaggcgggcgcgccctcatatccaagctcggcgccgaatgggtggccgcgcatgagagcgtgtggaagccgtcgcaccatcacagcatcgaaaccgcatggcgcgtccatgtgaagccgaaatggggagaacggcagctatccaagataacccactccgaagtacaggactgggtgaacgaactggcgaaggcgcgatctgccacggtggttatccgtgcgttcggcatactcaagggcatctatgacacggcggtgaaggacgggcgcatagtccgtgcgccggtgactgacatacaactcccgaagaaaagccgcaagccgcgccaatacctcacgccggggcaactattggcccttgcggatgctagcggcgcatacaggccgttgatactcgtattgggcctatgcggactgcgttggggcgaggcaaccgcgttgacggtgcgggacgtggatttcaagcgtaaccggctgcatgtctccaagggcgtcaccaaagtgggcacgaccttcgagcagggcacgccgaaaagcaacaaggcgagggacgtacccatgccgcaactcgtccgtgacgcgctgcgcgaacaggtcaagggcaagaagccaaccgatctgctttttgagggagagcatggtggctatgtcgctccccagtcgcttggcaagaatcaccgctgctggtacaaaacggcggtcgagaccagcggcgtgcccaagctgacgtgccatgacctacgtcacacagcggcctccatagccgttcacagcggtgcgaacgtgaaggccgtgcaaaggatgctgggccattcttcggcggctatgacgttggacacctacgccgacctgttcgacgacgatctggacgaactggccgcaaggatggacgaaaccatgtcaaaaatcgcgtgataagtctctgaagctcagtggagttcagcggtgttgtttttagattgctggattttccgttggatttcagctaggccgttggatatgagaaaaccccggaacgttggtatttcaacgttttccggggtttctccctgcgtgcgagtggggggagttgaacccccacgagcatacactcactgccacctgaagacagcgcgtctaccattccgccacactcgcagacaatcgactaacttacacccggctgggtaatcatgcaatcttcggcgtgtcgcatgggaggcagggatatatcgcttgtgggtctcctgcgggcgccgtgatctttgagggtggcggcactcccctcagtcacttcgtgacagctcgtccgcaattaaggacgggccttgcctgcaacctgctggttcgactatcgtctcaccttcgactacaaacagcccactgggctgtttgcttaacgtctcagcctcagcgaggggagcagagagaagttcggcacaagccgcaacgaaggagaaaaactcacaaccctggccggcgctcgccgttgccgtagaagtgggccaacgcttcgtcgcggaactcatcaaagtatccgccgtcgattgaggcgcggatgtcgtctagcagcttcacgaagaaatgctcgttgtggatcgtggccaacgtaaacccgttgaactcgcgggcgcgcagcaggtggtcgacgtacgcgcgcgaataatgctggcatgtgtagcagtcgcatccctcctccagcggcccgaaatcgaacttatgctgggcgcgcttgatgttgtaccggccggcgcgcgtgtagatcgcgccgttgcgggcgcagcgcgcgggggccacgcagtcgaaggtgtcgccgccgttctccacgcacgcgaagatatcgtccacggaggcgatgcccagcacatggcgcgggcggttctccggcatcgcgtcgcagatccacgcgcaggtgtctccaatgatgcgcttctcgattgcgccgccgattcccacgccgtcgaagtccagcgaggcgatctgcgaggccgcgcgccggcgtagatcctcgtaattcgcgccctgcaccacgccatacagcgcctgatagggcttgcccagccgctcagccgtcagccgctggtgctcgtccacgcatcggcgggcccagcggaaggtgcgctccaccgagtcctcctggtaggagcgggtgttcatcagcgtggtgagttcgtcgaacgcgaacatgatgtctgcgccgattttgtgctggatgcccatcgaaatctcagcggagaaacgatgtgcgtcaccattcaaaggcgacttgaacgtcacgccgtcctcatccacccaggccatgcgctccttgcccttggcgatgatgtcgtccgacttcatgccggtcacgtccattgccagcgtcttcttgaagccgacgcccagcgacatcacttggaaaccgccagaatcggtgaacgtgggcccatcccagttcatgaaacgcgccaagccgccggccgcgtccagcacgtcctcgcccgggcgctcgaacaggtggaaggcgttggccagcaggcactgtgcgcctagatccttcatctgctcgggcaacacggccttcatcgcggcttgcgtgcccaccggcacgaaggcaggcgtgcgaatatcgccgtggggcgtgtgaatgatgccggtgcggccgtatcgggcaccgtctcgcccaagcccgctggccgtggatggcaggcgggtgatcgtttcgaaatggaaggcgctgcggtcgccgggctgtccgggctgtgcgcccaacggatgttcaagaaggctgatcgtcatatgttcactttaggcagaagggccagaaaagggccggaaattgtgaagaactcggtttcgaggggcggatttcgccgctcccgaacgtctacttccgcttcaaggggctcccggtcaagtaggccggctgcaaaaatggcggaatggcgttaaatgagggcccttgatactcggaattgaccgcgcgaacagccccttgaagtgcaagtagatgttcccgaaacaggaaatcagcccctcgaagccgagatgcccataagactctgcgatgattacgcatagactttcaatcaacgttcagaaaacctccagattgactgcctttactactgaggtagcacacgagaagtggcaatgggcaagtgcccgaatagccgccgaacagacgtgataggaatttaggaaaaggagcagcaatggctgacgaatttaacccgcagggcgtcgaccagaccccgcggaataacgaaaaccccaatagtactgccgataccggcaacgccgagccgaagaacccgtttgtgggtggcgactcggttgatgccggcaacgccagcgattccagcgagcagcaagccccggtttcctcggccgccctcgctgccgatcagcagcctacgcaagccgctaccgacactgccgccaccgagcccatcccggactacgcctccgccaagggcgagagcacggtggtctcctcctcgccggcttctccggcagcaccggccgcaggccagacctcggccacaactccgctgtatcgtccggccccggaatatggcgcttatggtccgaccccgactcaggcacagggccagcagggcggccaggccggcagcaatgcccagcccacgcagcaattcccgttcggtcagcctgcacagcaaaccccacagggccagcagggcaaccgcaatccctactacaccaataacccgcagccgcagggcaacggcaatccgttcaatccgcccacgcagccgcagcagaacaacggcaacccgtttgccagccagtccggtcagaatggccggaatggccagcagccccagcagggcggtctgttcggtttcggcactcccggtaccggtacgccgaacggtcaaggcccggcccagccgggacagcccggtcagcccggccccgccaagcagggcatgtccaagacggcgagcaacatcctcatcgccgtggtcgccgccgttctggctgcgggcctctgcctgggcctcggttacggcgccctcaccagcggcctgatcaccttgccgaccagcaattcgctgtccaacgtcagctcgaataagtccggctccgggtccgccaccgccaagagcggcgaagcccccgactggcagactgtcgccagcgatgtctccggctccgtggtctccatccagaccgcgttgagcaacggcaccgccaagggctccggcgccatcatcgacaccgaaggccacatcatcaccaacaaccacgtgatctccggtgcccagcagattcaggtgacgcttgccaacggcaacatgtattccgccacgctcgtcggcaccgacaccaccaccgatcttgcggtcatcaagctcgacaacccgccgagcgacctcaaggccgtgaaattcgccgattccgacaagctcgccgtcggcgagaacgtgatggccatcggcaacccgctcggctacgacgacaccgccaccaccggcatcgtctccgccctgaaccgcccggtgaccgtgaccgacgacaacaacaacgagatcgtcaccaacgccgtccagatcgacgcggccatcaaccccggcaactccggcggcccgaccttcaacgcggccggccaggtgatcggcatcaactcgtccatcgcctcgaccgccacctcatccgactccgcgggttcgatcggcatcggcttcgccatcccgtccaacctcgtcaagcgtgtggccgacgaaatcatcaaggacggcaaggtcaagcacgttgccctcggcgtggtcatcaagtccgacacggttgaagccgacggtgtgacccgcggcggcgcgaccatcaccaagtccagcgccactggcagcgcggtcgtctccggcggcccggccgacaaggccggcctcaaggagggcgacaccatcgtggccttcaacggcaacgcggtgaacaacaactactcgctgcttggttacgttcgtgccgcggctttgggagacaaggtgacgctgaccatcgtgcgcgacggcaagaccatggatgtggacgtgacgctcgatcaggaggagtcgtcggtgaacggttcgtccagctccgattccaacggtaacagccagaataagcagaacaaccagaacggcaacggccggaatggttacggtaacggcaatggcaacaacgatggcggcaccggtgacggcggcggcttctccgacccattcggcctgtggtaaagccgactcgacaacgtcacacggtgttgagcggtaaccgttgaacgccgtgtcagataggcaaaggcccgtggcagtgagcaactcctgctgcgggcctttcgtatacgcgggaagcgtttggctgggtcggccggagcggcggcagatatcttgttccgtgggcttttgtatgcacgggaatcgttctggcaggacgtcagctgcaggcgcataagggctgcgagcccctcatatgcacgggaattcttggcggaatcgtaggaggggggcgattgatgccttccgactgagctgccaacgtagtttcgccgcccggcatgtcgcgttcaggccgctgatagggtaggccaagcgctgattcgggcaatgtctcgaacgatgcgcacaataattcaacacataactaaaaacgatttctttacgccgtgtatcggatggtcgcgcggagccgaaaggccctaagcaaagccgccggtgggttaacaaggcgtgaccgcagcgccgattgcgcgggccacgcttgccgcaatcgactccgtatacgagcgtaaggagcaatgatgagcggactcatcagattcttcaccaaaatcctcgacatctgccgacttgtgccgatgcttcccgttgttgttatcgccgcaatcccgctggcattgctgggcgattggcgcccatggggcaacgcaattgcgatgccggtgctgggtaatcctggtgtaggccaatggctgataatcgcgctggtggcaatcattgtgattgacacagtgcgtggcatgattgacgatttgcgccacggacaagtcggcgtcgatttgctggccgtagtggcgattctttccaccgttgccgtccgcgagtactgggcaagctgggcggtcatgctgatgattacgtccggcgaggccattgaggaatacgcgcaggccaaggccgagcacagtttgaccgcattgatgcaggcagcaccgcaaactgcgcacgtcgtcaacttgcctggcgtggggtgtggggctgccgctgataaggacgattcgtccgatggcttccggcgtgtaggctcggttccggcgacgtcctcccctcagtcgacttcgccgacagctccccttggagaggggaaccaagtaccgccgtcgaggggagctgactcgcggagcgagactgaggggagctggtcggctgaggccgccacgcaccgcttcgacacggtgccggtcgagcaggtgaagctcggcgatgtgctcatggtgttgccgggcgaaaccgtgccggtcgacggcgaactgctttccggctcggccacgctcgatctgagcaacatcaatggcgagccggtgccgcgcgaggtgttcgccggtgcccgagtgatgtctggcgcagtgaacggttccactgccttgaccatgcgcgccacccaggtggccgccgattcccagtaccagcgcatcctcgaactcgtcgcttccgcacaggagtcccgtccggccgtggtgaaaaccgccgaccgattggccgttccgttcactgtgctgtcgctggtaatagcgggcgtcgcctgggcggtgtccggcataccgacgcggttcgcccaggtgttagtgctggctacgccctgtccactgcttatcgccgcgcccgtggcatacatcgccggtactggccgtctcgccgccgccggtgtgctcatcaaggcgcaggatgtgctcgaaaaccttggccgcgtcacgcaggtgttcttcgacaaaaccggtacgcttaccgtcaagcagccgcaggtcgtgcgcgtcgagatgctgcctggagctgagacccgtcttaatgaggaccatgtgctgatgatggccggcgttgtagagagctattccgtacacatcctgtcgaagggcatcgccaaagccggtgccgacgcgatggcccgcttgcgtcagcgtttcgcggacggccagcgtctctgccccgaaccagaggccagctggcccggccacggccgcgaatatccggtcgtcaagaatattaatgaggactccggcaagggcgtgtccggcgaggtgaacggccatgccgtccgcgtcgggcgactgtcgttcgctgcagccggggaggatgggttcttgactgccgaggtagcgggtgtaagccgggcggatggcccacggcaggaggcggccgacctcctcagcccgcttcacggacagtcccctctgggcggggatactgaggcaggatctggccgtacgattgccgggaacactaaggaaaaggaaacgctgcgtacgcgattcggtatgctgcagccggacgaaatggcctcctacgtgtccgttgacgggcaactgatcgcccgcatcgtgctgcgagatgtacctcgcgccaacaccaaaaccgcgctcgccaatctgcacgaactgggtgttaccaagctcgccatgcttaccggcgataagcacgcctcggccgaaatcatcgcggacgaagtcggcatcgacgaggtccacgccgagctgttccccgaagacaaggttgccgccgtcaaggctgccacggaggcaagcgccgcgccggccgggcgcgcgaatcacgccgccagccctgtgtccgatgccgtagatggcatccggtccgatggttctcaaccgtcgcgttctcgatgcagccgcgccgccgcaatccgcaagccggtcacgatgatggtcggcgacggcgtgaacgatgccccggtacttgccgtcgccgatatcggcgtggccatgaccgacggcacttccactgctgcttccgaaagcgcccaagtggtcattatgaatgacgatattgccgctgtgccgcgcgctatcgccattgcacgccgtaccaagcgcgtgatgctgcaggccgtgatcgctggtctcgtactcgccaccatcggcatgattgccgccgccttcaacctcattccagtgatcgtcggcgctttcctccaagaggccatcgacgtggtcagcatcctctgggccctcactgccctcatcgaccgcgactaggcggggtatctcctcgactgagtcgcggttttgccccgctgacggtctgtaagcggggcgattctgtgggctaataggggttttgctccactcgtggtctgcgagtggggtgattttacggtctaatagtggttttgctgcgctggtgggtgttcagcggggtgccttggcgggttagtcgcagtttcgctccgctgatgggctgtaagcggagcaatttttcgggttactcgcgattttgctccgctggcggtctgtgagtggggcaatttcttgatcgactcgtggttttgccccgctggcgtgaggctggcagagggtattaggcacaggattcccaccactcgccctctgttgcaacggaaggctttgcgttaggctagagcgcgtgactgaatctgtgaatactgaactccgcattgctgtaatcggcgctggcccggccggcgtctattcctccgacatcttcctgcgccagctcaagaaactgggcgaagaactcggcctcggcaccaaggcccgcatcgacctgttcgagaagctgccggtaccgttcggtctggtgcgttacggcgtggcccccgaccacccgtccatcaagttcatcgcctccgcgcttgagaagacgctcgacaacccgaacatccacctctattgcgacgtggaattcggcaaggacgtgactcttgacgacctgctggcccgttacgacgccgtgctgttcgccaccggcgcggtcaaggacaagccgctgaacctgcccggtgccgaccttgaaggtgtgtacggtgccgccaagttcgtcgaatggtatgacggttaccccaccggtgcccgcgaatggccgcttacggccgagaacgtcgccgtgatcggcggcggcaacgtggccatggatgtggcccgcgagctcatgcgcgacgccgacgacctcaaggccagaaccgacattcccgacaacgtgtacgagggcatcggccgcaacaaggccaaggtgctgcacctgttcatccgccgtggcgtggcccaggccaagttcagcgtgcaggaactgcgcgagatggagaagctgcccggcgtgcagctcatcatcaatgaggacgacttcgacctggacgacgagaccatcgaggtggccggcaaggacaagctcactcgtcagatggtcgaggagctgttcgccatccgcgagatggccgaagacatggaagatgacggcgacgtcgacttcgaaggcaacccggccgaccgcaagtactacgtgcacttcaactccgcccccaccgagatcctcggcgaggacggcaaggtcaaggccatccgcgtggagcgcaccgaaaccggtgccgacggcaagatgcgccgcaccggtgagttcgccgactacccggtcgaggccgtctaccacgccatcggctacaagcccgccgaagcccccggcatcacctacgacgagcacggcgcccacctggccaacgccaacggcgacggccgcatcaccaccgaggccgacggcggcgaagtgcgcgaccgcctgtacgccaccggttgggccaagcgcggaccggtgggcctgatcggctccaccaagtccgatgcgctcgccatcgtgaccaacatgcttgaggatctggccaaggccgctgaaggtggccgcgtggcagccgaccgcgaccccgaatccatcgaccgactgctggaaagccgcggcgtcaagccgattgacttcgctggctggaagaaggtcgacgccttcgagcgcgccgaaggcgccaaggagggccgcgagcacaagaaggtcatcgagcccgaccagatgcgtgagctcgctctggcctgattgactatcagctcatcgcaccggcaactgcaccagcagcaatcggcgcgattgatacatcgataaataagaacgccggttatacgccagcgttcttatttatataaaagccagtgtcatgccagtcgagcaggccgatgggccaaacgatccaagcagccaaagcaggccaaacaagcaaagcgtcccgatcagaccaatcggtaaagcggtaaagcggtaaaacaggccaagcaaccgcactgtcaagcatcgtcaatctcatgtaaacaggctattccgatccccgccaaccgcaccgtaagcaccgccaacccccatccgattcacccctcggcgcacatccagccaatattcaggcagtgattttagtgtgagcctcatggatgccaaagtacgggtgcacggccatttcaacggcctgaaaacaacgctgctgtttgccctgatgtgggccatcatcatgctgatatggtgggccacgggcggcagtcggcaaaccctgagcatctatatcgtcatcggcctgattaccacgttcggcacctactggttctccgacaaactcgccatcgcatccatgggagccagggaggtcagcgagcaggaagcccccgaaatctaccagatcgtgcgcgagctgagtgccaaggccggcaagccgatgcctcgcatctacatcgcgcccaccatgagtccgaacgccttcgccaccggccgcaacgaacgtcacgctgccgtatgctgcacgcagggcatcctgcagattctgaacgcccgcgagttgcgcggcgtgctgggtcatgaacttatgcacgtgtacaaccacgacatcctgacttccgccatcgcctctgccatggccaccgtcatcacgtacctcggttattctctgatgtatttcggcggcggcaactcgcgcgacgaccgcgataattcaggcggtctcggcttgatcggcgtgctcctcagcgtgattctcgcgccgattgccgcatcactgattcagatggccatctcccgtactcgcgaatacgacgccgacgaagacggcagtctgctgaccggcgaccccgaggccctggcctccgcgctcaacaagatctcctatggtgcccagaccacgcccatgcgcaaaacggccggcacccagtccgtctccgcgatgatgattgccaatccgttctccgcggtcggtttctccaaactgttctccacgcatccgccgactgatcagcgcatcgcgcgcctgatgcaaatggccaatgaaatgaacggcactccggtggccgcatccacgtattccacgcgcgcaattcactagtccagcacagaactcaaaccggcacatggcgcaaggtgccgcataggtgatacacttgcctctcgtgcgtggaagcgcacatgcggacgtagttcatcggtagaatgaaagcttcccaagctttagaggcgggttcgactcccgtcgtccgctccatcgattttccttgaaatttcaacggttttccctcttttgagagcttattttcctgccgtatgaccgctatatgagaacaattcacgtcgtccgcgtatcgtgatgggcgatgtgtgaacccaagaccgctgcaaccaatggccaaccaacgccaaccctcgaacgcactccgcacgacatcttcgtcggtgccggactggcgctcgccggaggcgtcttctggggcgtcaacgccaccgtctccaaactcctgatgaacgactatcacgccgatccgctgtggatcgcctgcgtgcgcgagctattggccggtgtcatctttctggtttgcgcaggaatcttcacgcctgacaagttcatcaactcgcttaaggactaccgttcctacccgagactcctgctgtgcgcgttcttctgcgtgctcatggtgcaggtctcctacttgaaggccattgactggaccaattccggcacggccacagtgctgcagacgctcaatctgctggttgtactcgtattcgtatgtattatgggcaaacggctgcccggcaaacgcgaaagcatcggtgtggtactcgcttttgtgggcacggtgctcatcgccacaggcggcgatctcagccagctcagtctgccgctgcccggtctgctgtggggcctgaccgatgccgtatgcacgtcactgcttgcgattctgcccatcgcattaatggccaaatggggcaacttcatggccagcggcgtcatgttcatcgtttccggtctaatgctgctgccgctcgtgcgtccgtggaccaccgcccccgcgttggactggttcggcattggtctgatggtattcaccgtggtgttcggcacattcggtgcctattggctattcctcggcggcacccagcgctgcggtgcaatgcgcgccaccatgctcggcaccagtgaacccgtaaccgccactatcaccggtgtcctattcgccggcgcggtctttaccccgaccgatttggtcggcttcgctatgattatcatcatggtgttcctcgtgagatagttcacagctcgcctggctccagaacctagtctggcgggcacaccccgagcgataatgaagccatgacaatcgcaacaccggaacgttatgccgaaatgctagacgccgcacgacgcggcggctacgcttaccctgccatcaacgtgaccagctcgcagacgctgaacgccgcgctgaaggggttcgcggatgccgaatccgacggcatcatccaggtgtccgtcggcgcagccgcatacctttccggcatcggcgtcaacgaccgtgtcaccggatcgctggccttggccgcttttgcacacgaggtcgccgcgaagtacccgaacatcaccatcgccctgcacaccgatcactgcgccaagcagtatctggacgaatgggtgcgaccgctgctcgcacatgaggccgatcaggtggcgcatggtcaggagcccacattccagtcgcatatgtgggacggctccaccgtgtcgctcaaggaaaatctggacatcgccgaggagctgctcgataagtcgcaggccgcgcacacggtgctggagatcgagatcggcgcggtcggcggcgaggaagacggctattccgccaaaatcgacgaacgcctctattccacgccggccgatggccttgaagtggcccgtcgccttggtttgggcgagcgtggccgatacatggccgccttcacgttcggtaatgtgcacggctcctacaagcccggcgtggtcaagctgcgtcccgccctgctcggtgatattcagtcccgtgtggcgcgcgcggtggtcgagggtgagctgcccagcgccgccggcatagtcgactttcccaacggcaagccgttcgaattggtgttccacggcggttcgggctcccgtccggaagagattgcagaagccgtgagccatggcgtgatcaagatgaacatcgacaccgacacgcaatactcgttcacgcgcccgattgccgaccatgtgttcgagaactatgacaaggtcctcaagatcgacggtgaagtgggcgaaaagaagttctacgatccgcgttcctggggccgcaaggccgaggaatccatgtccgcccgcgtggctgaggcatgcaagcaactcggctcggccggcaaagcactcagataacacccaaataaactgtcattcgccgtggcggcgcattggtgtcggcccgcctcgcgcaacgcgcggcaaagacaccagaagcccgattgcgtgagatggccgcgccccgagtagagggtgtaaggtagtctgtttccggcggaatcgtgcgaatgcggaggtgtgttatgcctggaattgttcttatcggtgctcagtggggcgacgagggtaaaggcaaggctaccgatctgatcggcaccaaggtcgattacgtcgcgcgcttcaacggcggcaacaacgcgggccatagcgtggtggtcggtgacgagtcgtacgccctgcatctgctgccctccggcatcatcaacccgaacctgaccccggtgatcggcaacggcgtggtcgtggacccggaagtgctcttcgaggagatcgacggcctggaatcccgcggtatcgattgctcccacctcaaggtgagcgaggccgcacacatcatcgcgccctaccaccgcacactcgacaaggtgactgaacgcttccttggcaagcacaagatcggcaccaccggccgtggcatcggcccagcctacgcggacaagatcaaccgtgtcggcatccgcgtgcatgacctgttcaacgccgaccatctgcacgacaaggtggaggccagcctgcaccagaagaaccagatgctggtcaagctctacaaccgtcgtccgatcgacgtggaccagaccaccgaggagctgctgaagctcggcgaacgcctcaagccgtacgtggccaacaccggcctgattctcaacaaggcgcttgacgaaggcaagaccgtactgtttgaaggcgctcaggccaccatgcttgacgtggaccacggcacctacccgttcgtcacctcttccaacccgaccgccggcggcgcctgcaccggcaccggcgtgggccccaccaagatcacccgcgtaatcggcgtctccaaggcctacgtcacccgcgtgggcgaaggcccattccccaccgaactgctggacgagtccggcgaatggctgcgtcagcagggccacgagttcggcgtgaccaccggccgcccgcgtcgctgtggttggttcgatgcggtcgtcaaccgttacgcctcccaggtcaacggcctgaccgacatcgtgctcaccaagctcgacgtgctcaccggcctgaaggagattccgatctgcgtggcctacgacgtggacggcgaacgtcacgacgatatgccgaccgatcaggccgctttcgccgccgccaagccgatttacgagaccatgcccggctgggacgaagacatctccgactgccactccttcgacgagctgcccgccacctgccaggcctacgtcaagcgtttggaagagctgagcggttgccgtatctccgcgatcggcaccggtccgcagcgcgatcatgtcatccagatcaattcgctggtcgactgaccgtctgcaacgaatttcccggcttgactggtaacgacgcggcacatgatatccgccggctgattccgcgattcgaccacttgaagtggaagatggcggcggccggcatagtcattggtctggtttcaggattgctggttgtcgtataccgtctcggcatcgaatacggcacggatgcgtcccgttggatatatgcgcggattcgcgagaccccgtggctgattgcgccgtgggcggttgccgcggtggcggccgcgctggcaatcgcgtggatggtcggcaaggagccgatggctggtggcagcggcatcccgcagaccaacggcgtggtgatatgcggcttgaagatgcgttggcagacgattctgccagtccgtttcgtcggtggactgttgggcgcgttgtttggtctgtcgctcggccgtgaggggccgtccattcagattggtgcgtcgggcgcgcagtgtgtatcccaccgtttgcgcggccgccgccgtgaggacatgcaggagcattatctggtcaccgccggtgccgcggccggcttgtccgccgcgttcagcgcgccgctgtccggcatgatgttcgctttggaaggggtgcatcggagtttttcccctgcgattctgatgggcgccaccgccgcatcgctgaccgccgatttcgtctcaaaatactgtttcggtctgcgtccggttttggatttcggtgatatcggtcagctgtcgttggaagagtatgtgtggctgattccgttgggattggtggccggtttggttggttcgctgatgaaccgctcgttgcttggcttccagacgctgtacggcaaactgccggcatggagccgcccgatgattgcgattgcgatcgcgttgcctgtcggcatctggttgcccgatgtgctcggcggcggctcgaatctgattgataccgccgaacatgcgcgcgtcggcttgggaatgctgtgtctgctgttcgtggcgaagatgctgttcacatctacgagtttcggctcaggcgcgcctggcggtattttcatgccgattcttgcggtcggttcgttggccggcggcatctgcggtgaagtgttgcatcgattcggtgatctgccatccgacgcagtggcggtgtttgcggtgtgcgtgatgacgggcacgctcgccgcgtccgtgaaaacgccgatcacgtcgattctgttggctgtggagatgtctggaacgttgacgcacatgctgccggtcgcggccgtcgctttcatcgcgctgttggtgtccgatttgctgcgcaccaaaccgatttatggggagttgctggagcggtacgtgcgcgcgcaaggcatgcagatggcgatcgcaagccatgtgggcagcggcattatggaactgccattggaaatgggagcgattgcggacggcaagcgggtgcgtgacgtgcgttggccgtctgggtgcctgatcatcggcctgcgtcgcggcgaaagcgagatcgtgccgcgcggcgatacacggctgcgtgccggcgactatctggtggtgctgttcagtggcgaggaggagcgcgaggtgcgacctgcgatgcggcggctgtgtgatgcccggcttgactgagcctggctgaattcggctggactctggatgtacgaatttgcggaatcggacatccagggtgcatacgttggcgctccgtgtaaactcatatgcgttaggaaggtggcaaccgcggcccagctcgttgttgcacggcctatgggcggaacaacgctgtccgcggaaggccagtacagggggagcgcaatggaatcgcaagaacaatcgccgggagacgtggtgactgcgggtgaggactcacatcccatcacgcaggcaatcgacactgttgaggtgacgcatgccggtgcaaccgcgcccgccgctaacaccatggatccgcctacgattcccctggcgccgatgaaacgtatgcaggcgcggttcaatccgctcgccgacggactgatatatgttgtggtgttcgtcggtggatttgttggagtcggctgtcggcatgcgttggatatgctcctgccgtcggtcagcgggacgccattcgttgtgggcacgtttgtgtcgaatatggtcgcctgcttcctgttcgcgatgctgaccgaattcatggcgaccgcttcgtggctgcgtcgccgggtgcggcaggttgtcagccgtggcgttgggctcggcttgctcggcgggctttcgacgatgtccggcgtgatgctggaaacggtggaaggtctgcacgagcggcatatcgccagtgcgcttggctatcttgcgggaaattttgcaggcggtttgctcactgccgccgccggcgtggttctgatgcaggcactgctgtcacggagtactcgaaagcgggttcggggtgcgttttcagctgtttccgtgtccgatcctgccgaatcggacacgcagggcgtacgccatgtgaaagtggccgacgtggcgcgttctgccgcgcaggccgcaatggaagccgcgcagacggcccagcagattgcacagacgggacaggttccgcgagtcgaaacaccaaccgtgccgccgaccgccagccagcctatgcagacaggccgcgttccgcagattcctccgctggccgttcctcagctgacgcagccggcgcagccgttgctgcgcgagccggatactccagacttggggcagctgcccgagattcagcagtcgcagccaatccagcagccggccaacccgcttccacccagcttcgagcccaaaccgatcactgcggagatttcgcttgtcgccgacccgactaccggggaggtgcgctgatgatgtggatgatctgtctgttcggcggtctgggagccatggcccgttacgtgctcgacgtgtcaattcaacaaggctggaaccgcgagaatcgaagaacgaaccgcaacttcccgctatccacgctcgtcatcaacggcgtcgcctcgctatgcgcgggcatcgccatgatgtcctactattcgcaatcggtggatatggacacggtcatgatgttcgttgtcggatttctcggtggtttctcaacattctccacggcgctcaacgaagtggtttcattgattcgccagcgtcgttttacgctggctctgggctatggaatagcaaccgtcgcggtgcctctcatttgtgtggccgccggtttcggcattgcgctgcttgccaatccggcgtaattttcacgttacacggacggtcgctgagtaacgtgaaagaaatctgagcgcaaccgccatcaaggccgccagtccggatgcaacgctggtgattgcattcgaccagaccaagccgctgctgaaggccttcgcctccgcaggagtcgacactaagaagctgtatttcgttgccggactgtcgaacaggttcgagagaatgtaaatgaatgtaatattagcggtaagcacgtgagcatacaacgatagaacagtgataacgggaaaggtgcgatcatggtcggcatgcgcgatgtggcgaagaaggccggggtgtctctgagcaccgtctcgctggtggtgaacggcaacgggtacgtgtctgatgacatgcgcgaccgcgtgcgtaaggccatgcaagccctcaattatgtgccgaacgagcttgcccgcaatctgtatcatgatcgtacgaatctggtcggcgtcatcgtgcccaccatccgccacccgttctttgcaacgtttaccgcacatctgcagcatgcgctcgccgcgcaaggattacgcactatgttgtgctctaccgcagatgaggcggagggcgaaatccagtatgtcgacatgttgcgtcggcacatgatggacggcatcgtcatgtgtgcgcacacttcgcatcccggcgattattggacgtcgattcatcgcccgatcgtcgcgttcgaccgtgtgcttggagacggtatttcgtcgattggatccgaccacgagcagggtgggcgattgattgcgcagatgctgatccgcaatggtgccaaacatgtggtgatgattggcggtccgcgagatcaattcttcgatttggctgcgcgcggagaagtcgaggaaggatcgttcgatttgggaaagaccacgttcccgacggtgcgctactacctcacgttggaacaggaattgacctccgcaggcgtgaaatacgagtatgttgaagctggcgaagtgatggattttgccggctatcatcgtgcggtcagcaatgcgctcgacaaggtggcgaccgacggcgtcgatgccgtggtcagttccgacattggtgcgtcgttctgcgtgcgcgaagcgttgagccgcggaatttccattcctgacgagctgcagatcgtcgcctacgatggtacgtatctgaccgatttggccggcatgaagctgaccgcggtcgcgcaggatttctcggcgatcgcacagtcggcggccgaccatatcgtgcaggctattgccaatgaggaagtggccgcggctaacgcttcacgcaggaacatccccaagccgttcgagccgaacgtgcttattcccatgacgctggtgccaggcgataccacgcgttgatgctgcgcgtcttcatgcgtgtgcccggtgtggatctcatcgatttcagcggcgtccacaaccagcggacgcccgtcgatggtcgtgctcatcatccgacttgtgcacatgtgtccgattctgccgaatcggacgtctgagttccgaaaaa

SEQ ID NO: 3912 - DNA, 3894 bp, Unknown
  R22_24m  MAG No. k141_12970
gacggcgggcatacgagtggaaccaccgacgagcaccacgtggtcgatgtcgctcacggagatgccggcgtcgtgcagcacgttgttgaacggcgtgcggcagcggcccagcaggtcggaggtcatttcctcgaagtgcgcgcgggtcagggtctcgtccaggtgcaccggggtgccgtcgggggtcatggccaggtactgcatggagatgctggtggaggtggaggaggagagttccttcttcgcctgctcggcggcttccttcaggcgctgcagcgcaatcttgtccttggacaggtcgacgccgtacttgttcttgacttcggaaaccagccaatcgatgatcttctgatcccagtcatcgccaccgaggtggttgtcgccgttggtggcctgaacctgaatggtggagaagccgtcgtcatccttgccaatctccagcagggagacatcgaaagtgccgccgccgaggtcgaagaccaggatgcgctcgtcttccttgcccttctcaaggccgtaggccagagcggctgcggtcggctcgttgatgatacgcaggacgttcaggccggcgatcttgccggcgtccttggtggcctggcgctgggcgtcattgaagtatgccgggcaggtgatgacggcgtcggtgacgggctcgccgaggtatgcctcggcgtctctcttcagcttcatcaggatctgcgcggaaatctcctgcggggtccacttcttgccgtcgatgtcgacggtccagtcggtgcccatgtggcgcttgacggaggagatggtgcggtcaacgttggtcacggcctgacgcttggccacttcgccgacgaggatctcgccggacttggagaaggccaccacggacggcgtggtgcgcgcgccttcagcgttgacgataacggtgggctcgccaccttcaagagttgcgatgcaggaattcgtggttcccagatcgataccaactgcgcgtgccataatgtgtgctcctttgtgggacttgcgattgcccggccggcgccgccgttcgccacgacctgttcgggttgtgacgcgcggtgtgcgcgagccgtctcgcacgtgttcgttctttcgttcttcgcccgggtttcggtcggttccttgtgcggttcctctcggttgtggggtttgcattcgcagccgcccattcccgtgcttccgaaacttgagcctacaccactcaactttaaaccgcaagtgcatattcccggattcggcaaaaaacttgagcgattctcactcaggtttctgcgaagcgcggcacacggcacgtatcgcgccacggccaaaagccgccggaaaaccatcgcccgccgggcatcggctcggcgggcgatcgttttccggcggctggacgactcgggattaccggtcggccaaggccgaatcagttgttcctggcgttacgcgcggccttgatgagcatcgcgatcgcaaccagcatcacagccgcgatggcgatggccatgacggcggtaccggtggcgcccagcgggccggagaccgcggaatcgttcggcaccttgcccgaagcgatcacgccgttcttgtcggcgcccggcttcttgtcggcggagccggcggccggcgcctggatggcgacggtcgcgaccttgccggactggcgaccggtgacggtgagcgtgtactcggcgccttccgacatcttgtcgagcgcgatcgaagtggtctgcgcgggcttgacgcgcacgccggacaacggggtgctggaatcggacttggacaccacggcgccgttcttgtccttcagctcgtagctgagcagcgcgtcgccgttgaagccgtcgacattggcgacgtagccggcctgcgtacgggcgaccttcacggtgccgtccttggagagcgcgttctgctcgtcgggggaggtggccaggcccagggcgccggcgatggtgtagaagttatcggtctgatcggtcaggccgatgacgcgctgggcgccggggccggaagcggcgatgcgcagctgggtgccggtgtgctccatgtcgccgccgttgtagccgccttcggcgtcggtggaggcttcctgggcggtgccgtaggagacgaccatgttgttgccgtcggcggacttgagcacagtggacagcgcgtaggccggctgggcgttgaggacctgggaggtgtgcgcatgatcggcggtgacgatcaccagcgtgttcgtgaggtccacgttcttgatggcgtaggcgatggcctggtcgaagtcgtcggtctcgccgatctggccgcaggcgttggcgttgtggtcctgtttatcgatcgaagcgccttcgacctgcaggaggaagccgttcttctggccgttcgggttggcgttgagcagatcgagcgccttcttggtcatgtccttgagcgaggcgccacggttgccgagccaggcgtcattcggggtgcacacggtcgggttggcgtccttggccggatccttggcggtggccttggacgggttgaacttggtcggcatgttgccgtcgctcatcagggcgagcaccggctggccatccttgtactgcagggcgttcatcgcggccgggtcgttctcaacggtctggaagcccatgtccttggcctgctcccacacggtcttgcccttgtattcgccgccctgcacggtctggcggaaatacttggagccaccgccgatggtcacatcggcgcgggtgtcgagcagctgctcggagatggagccgatgccgccgttctccttgagctggttggcgaggcactgtttggaggcgttgttggaagtgccgtcggtcttgccctgcgggccgtagcaggcacgctcggtggagtgcgattccagcacggccggggtggcgtcctggatttccgcggtggacacgttgccggtggccttgccggcggccttggcaagctcgaagagattcagctgcgggttgccgtagatgtcgacatccacggcgttgttgtaggtcttggtaccggtcgcccatgcggaaccggacgcggaggaatcggtgacgggggtgagcttgcccgggttggggttggcgaccagcttgccggcggcatccttgccgacggcgctgtccttgctgccgtcgccgagcgagaaggtcgtgtactggccggtgcccgcctgcacgtcgtcaagcgcgccgggctgaccgaccgcgtccagaccatcgaagtggccgttggcgcctttcagatagtcgcgggcgacggtgatttccgaatcgcccatgccgtcgccgatgaacagcacgacgttcttcgcgctcttgttgccgatggcggcgatgcgctgcgccgcgccgtgcttggcgagctcggcgaccgacttgccgttggggctgtaggtgccgtttgcggcatcgacagcaaacgccggagcggcgagcgcgccgagcgtcgcgatggaggcgaccgccgcgacggcgctcttcaaagccttgtgattgcccattgttcttccttcttccatgcagtgtcatctgcgccgtccggcccgcacttctccggccgcacccgtttggccacgtccgtcgtcgtcatgccttccagcttcgcggaaccgttccgcacctgcattgcttggatctttcgattccggatttcacggtaggccccacaagccaacgtccggataccgccggaagaacgccgggtgaacattcttcgtcgaatcggccgaggcatcatcgccgcatgaaccggcaagccatacacgatccgcacctggcagtacatgttctcgaaaatccgccccgaattccccgaggcggcgttcgtcgccgaatgtgggccgaccgaacgaatcgatgcaggccggattcgacatggacttctacctcgactggcgctgggacggcc

SEQ ID NO: 3913 - DNA, 7459 bp, Unknown
  R22_24m  MAG No. k141_13546
aatcgcgccgttctgcggccaaagtgccataatcaacggaatgccgatgaatccggcgttgccgaaaataagcgacgcctgaaatacatggctacgcgaacctttgagccgcaacagttcggcgaccagccagaacatcaggatgagcagcgcgtacatcacggcggtcagcagcatcacgccccagttggcggcaagctgcgcgcggtccgcgccgtcgacggcgttcgagaacacaagcacggggatgagcacgttgagcagcagcgagcacatgccgtccaacgccgtctgaccatagaaccggagcctcacacatccgtatccgaccatcagcatgatcagaaatccgactaactggccaatcatgacgccgaactgccccatgcacactcctctcgtttgctctcccgcgatttcctgtcactggttcatataggcagccatctggacaggctcggcggcacacgcatcagtatgttcgataccaccacatgccaatccacttctcgttcaaccgttccccgtgctaatgcgccgccggccaccccgtgttgccggtgctgcgcgagcaccgctacgtgtattgcattccggtggccctcgggcgcaacgtgtgggtcggcgcgaacgtgtcgattctgtcgggagtgaccatcggcgacaattgcgtgattggcgccggttcggtcgtgacacattccatccccgccaactccgtcacctacggcgcgccctgcgaggtcgtgcgtgaaatcggcgacaaggaccgcgagtatttctacaaaaatcgcaagctcgacgtgtgggagtgagctttcgcgctactgctctttgagcttaaaacgctcactgaattggcggtcgcgccagtagtagacgtcgtcgcgttcgttgatttcgcgaattaccttgcacgggctgccataggcgaccgtgttggcggggatgtccttggtgaccagcgagttggcgccaatgaccgcgttgtccccgatggtgaccccgggcagcacggtgacattcgcgccgatccagacgttctcgccgatgtggactggcaacgaatactgggcaccctgatagcgcaggtccggacgcacgggatggccggtggctacaagcgtgacgttggggccgatcatggtgtgggatccgatgaagatctcaccatcgtccaccagcgtcaggttgaagttggcgtaacagcgctcgccccaataagtattgcagccccagttcgcatacaccgggcattcgaggtacagaccctcccccgccgcgccgaagaacgcctgcatgagttcggtacggcgcttcgggttggtcagcggcgtggcgttgagttcgagctggagatcacgctgggcggcctgcagatcaaaaaagccgtccacatcatccggcaggtagacctcgccagagaacataagcgccattttctcgcgcgtcgcatcatcgataatcggcttggcgatcggcttgtcttcggtcatcattggctcctgttcggcgttttggcgattgtgtcggtcgaactattctgtcacagactcgttttcgacacccagcatcgagcgcagccagtcaaggattcagatgtgcgattggcaccgtgcgggcctcacacttttcttattgagaacgattcgccgtgcagtcaagccctccatccacccaaaaaggactcgcttttgggcgcgtcgtcgcggtaggccttgccgaactcgtcaatgagcccatggaattcctgcaaatccttgacactgaggttcgtatccagcaccacgggcgaataggccctgtggaatgccggatagccggccggcacgtcgaatccaaggaaggcgaacagccgccgcgcgtaggtatcggccacgaatgtgcggcgcgagaacacgtacagcatcagatcgtcggccgtctcgccgccaataccaaataatccaagcaactcggcccgtaattcggcatcggaaatagccgcggcaccctcgggcgcggccccgcaacgctccacataccaccaactcagcgactgtacggtcttggatttgttgacataaaagcctgacggtcgaatcagttcctgcaaacgctccggctccatggccaccagcttatggggttcgagcacaccctccgcgttcaacgccgcaagcgaacgattcacattgccccacgccgtattctgcgtcagcaccgcgcccaccataatctcgaacgtggtctccgccggccaccatccggtcgggccgagtgcgtcagccatggtgcggtacagcaattcgatgcgctccggcacaggccacttgtgtgcctggttggctttcatacgtttcatattctgcattcaggctccgtattagccatccgccattcatttattaggtcgattatgcgttcattaggtcacttgtgatgaacactgccttcaagaatggcttcattccaatgctcattatctcatgctaagcagggcaccgacctaatgaacgcataatcgacctaatgaacgcaacggtaaggaaaaactacagagattcagcgagatatgctcggtccacctggtctggaagtcgaaaatcttgatgacatctaccgcaattcgtgcaggattcgccgcatgaacgggatagtgactaggaatgtcagcacgtcggacaccgattgggccatttccacgccgagcacgccgaacatcatcggcagaatcagtacgatcggtgccaaaaacagaccttgtcggcacagggccaggaaggaggcgatgccggtgcggcccatggtctgggtcatcatattgcccatcatgttgaagccgttgagaatcaccgtgcagcattggatgtgcagcgcggccacacccaccgcgaccacggccgggtcggagcggaagatctcgaccagttgcggtgcgaacacccacagcaacaccgccaacaccacgagcacgcaggtggcgagccgcacgcagaaccagtacccttctttgacgcgcgcgaacaggccggcaccgtagttgtagccgcacaccggttggaaaccttggccgaggccgacgatcaccgagttggcgcccagcataatgcgcatcacaatggccatgccggcgatggccgcatcgccgaacggattggcggcaatgttcacgcaggtcacggaaatcgaaccggcgccttggcggatcagcgagggcaggccaccgccggccacttcgcgcatgagcagcacatccggcctgcaattgcgcagggacagtttcatcacgccgaatttgcggctcattgtggtcaaaatcgtgaagctcaccgtctggcagatggcggtggccaggccggcaccaaaaattccgaggtgcagcacgaagataaacaacggcgcgagcaggaaattcagcaatgcgcccgaaaccagcccgatcatgccgaacgccgattgcccttggtatcgcagcagtccgttgagcgcgaacgacccgcatacacagggtgcggcgaccaacaacggcgtcaggtattgcacggcgtatggggcgattgtcgaggtcgatcccagcatgacgaccagcggccgcagggtcagcaatccgattgtggcaatcaccaaaccagagagcaccgcacccgcgaagcccacggccagtagtcgggaggcgcactcattgttctgtttgccgagttcgcggctcatcgagttgcccgcgccgttgccaaagaagaagccgagcgcctgcatcacggtcatgatggagaacgcgatgccgatggcgccggactgcgcggtgccaagctggccaataaagaacgtgtccgtgagattgtaggcagtggtcaccagattggagatgacggccggcaagcacagtttgagaatcagcggcttgaccggctgcccggtcatctgccgatatttcgcgtccgcgcttgcgcgtctaatgccatgaatctgcaccatggacggctatcctactcgcgcagggtcctatgcaaaggcgcgttaccgccatacgagtcagcgcagataccgcccggtgatgctgttcggattggccgcgatttgttccggcgttccggtggcgacgatgcgtccgccgctttcgccgccgcccggacccatgtcgatgatccagtccgcattggcgatcacgtcaaggtcatgttcgatgaccacgactgttgcgccgctcgccacaagccggtcgaacacgcccagcagcacacgcacgtcgaacgggtgcagaccgatggtcggctcatcgaacacgaataccgcgtccgattgggccttgcccatttcgctggcgagtttcagccgctgggcttcgccgcccgaaagcgccggcgtcggttcgccgagcgtcaagtagccgaggcccaagtcgtgcagggtggtcagacgtgcgtgaaccttcttgaggtcgctggtcacggccagcgcctggtccacgctcattgccatgagttgaggcaggctcagggaaatgttgccgccaccctgatccgtcgcctcactcaatttttccttggcagctttgcgcttatccgggaccttcatcttcgccgctttgcccttagccgctttaacggcacgccgaatcgcgccggcttcgggcgcataccgggatccgccgcaatccgggcattcgatggtaacgtccggcaggaactgcacgtcgagtgagatcgaaccggtgccgtcgcacgtggggcaacgcagtcggccggtgttgtatgagaaatcgccagccttccagccgcccgccttggcgccgtccgtgcgggcgaaggcgcggcgcaattcgtcgtgaatatcggcataggtggccacggtggagcgcacgtttgcgccaatcggcgtggcgtcgatgagattcgcgcgactgatgcccgcggtctcaagctcgcgcacgtgttccggcaacagctcccccgccgcctgcgctttgagtgcgggaatcagcgattcgagcaccatcgtggttttaccggatccggagacgcctgtcaccgccacgagccggccgcgcggaatatcaacgtccagcggcttgaccgtatgcaactggctggttgtcatgcggatgtggccaaggtcgaacacctgcggttccgccacgcgctcacgaatacgcgcgtttgcctgatctgacaggaacggtgcaatgcggctgcctggattcgccgccacctcgccgaccgtcccttgcgcgatcacatgccctccttcggcgccggcaaccggtcccatttcgataagatggtcggcggccttgagcacgcgcacgtcatggtccacgaccaccacggaattgccgtccgccaccaagtcatgcatcacgccgagcagcccatccacgttcgagggatgcaggccaatggacggctcgtcgagcacatacagcacgccggtggtgcggttgcgcacggcacgggcgagctgcacacgctggcgttcaccggttgaaagcgtggcaccggcgcggtcaagcgccagatagccgaggcccagatccaacagtcggcgggccacgtccaggaatgattcgcagatgttggtggccatcgtccgcatgtcggcaggcagggattccggcactccgcgcacccaatccaccgccgcatccaaggtcatcgcgctggcttcggcaaggttcagcccgcgcacgtgcggagcccgggcggcgacgctcagtcgggtacctccgcagtcggtgcatgggccttccttgaggaaccgggccacgcgcttcaggcctttctcgtccttggctttggcgagcgcgttctccaccgtgtatacggcgttgaagtaggtgaagtcgagttcggcgaaatcgtcgcctttcttcggcttgtaaagaatatgctttttgacggccggcccgttgaatacaatgtcacgctcttcgggcgtgagctcgctgaacggcacattggtgcgcacgcccatcgcgccgcacacctgcttcatgaggtcccacatgagcgaaccccatggcagcaccgcaccgtcgtcgatacttttcgactcatccggcaccagggccgcacggttcacttcgcgcacaatgccggttccggagcaggtcgggcaggcgccggccgagttgaaggcgagcgattcggcgccgggcgcgtggaattccttgccacagctgacgcaagtaatgggcagtccggccgccacgttcagcgtcggttcgttgtgcgccccgcaatgcgggcacacgtgcgaggcgacgcgggagaacaggagccgcagactgttgagcagttcggtcatcgtgccgaacgtcgagcggatgccaggcacggtgggccgctggtgcagggccagcgcggccggcacatgcagcacttcgtccacttgggcgcggctggcctgggtcaggcgacggcgcgtgtacgtggacagcgcttccaggtaacgccgcgaaccttccgcatacagcacgccaagcgccagcgagctctttcccgaaccggagacgccggccacgcccaccagttcgcccagcggaatgtcgatgtcgatgttcttcaggttatgcacgcgcgccccgcgcacttcgatcgtctgcggccgctgatcgttgctcatgctcggcactgctccgccgccaccctactgtctgacctattatcaagcgtcacgccgttacctctttctcgacctcgccctagaccgccgccgcacgagcttcatggtctccagtatcatcacgaccaacgacggcagccgagaggctttcgctattgagcaccgcctctcgcatgctgttcgccgcgacaacgaacgaaagaaagtgccacattgccgtggttcagcgccaagaacgcgctcgcagaggatcccgtcatggggctgctccgggaacaggtgacgacgacccgcaaaggagtgtccatcgcgttggacgccgtcgaggggcagctgagcgtcgatgaatccagaaagagcgtcaacgatatcgagcacgagggggacgaggtccgttccaaggtcgttcacgcgttggccaaggcctggaccacgccgttggaccgtgaggatttgttccgtttctcccgatccatcgacgacgtgctcgacaacacccgcgatttcatacgcgagatccatctttggaaaggacatgccggcgaacacgccaatgtcgcgttgacccacgtgaacgtcgccctgcacgatctggaactcgccgtgaccgcggaaggcgccgacatgcgccgatactgcctcgaggccagcaaggaatccgcccgcgtgcggcgcgcctacgaatcggggcttgcagccgtctacaccggcgaaatgatgtaggacggattttgcggacattcaaaataaaaaagaatgtggaggtaacagacaatggcaaaatcattatttgaggaactgggcggcaaatacgaaaggcaaggggattatttgataccgtgcttaactgtacccg

SEQ ID NO: 3914 - DNA, 22242 bp, Unknown
  R22_24m  MAG No. k141_13622
gcaaacgtccatgtgccgccgacggcagtggcgtgagcaaactcagcggtgccttcttctcctgcgccggcctgagccacggaaagaatcgtggagaacagtgcggtaccggcagcgccgccaaactgaagacacgtgttgaaaatggcgttgccgtccggcttgaactcgggagagacctccgacaggccactggtcatcacattcgcattgccgatggaatagaacagaccgaaaatgaaatagaatccggcgagcagcacgggcgtaagctgcatcgagaacaccagcataagcactgggcccaaaatagcgatgccgatcggaatcagaatcggcttgaccgcgccgaacttatcgtagaaccagccgccaagcggggcacagacagcgccgaccagtgctccgggcagcaccagagagccggccacaaatgccgtggtgccgagcgagagctgtgccacattggtgatgacatagccgtagccgatggcgaccaatggcagcagcagatatgcgcaggcgtgtaacagtacggcgggatccttgagaatgccaaggcgcagcagcggggagaaggcacgcttggaactcatggcgaacacgatcaacaaggcgaggcccacaatcagactgacaatggcgataatgccggagcgtgtggctgacttgccggacaccgccgcactgatggccacgccaccttggttgagcgccagcaccagaccgaccaacgcgacaacaatggacccaagctgaatcgggtcaagataggcagcctcggtcggtgtcttctgctcaatgcacttcatgccgatgcatgctgcgattagcaccagcggaatggcgatgacgaaaatcgcgcgccacggcagcactgtggtcaccgcgccgccgacggtcgggccgatggccggagccacggtaatgaccagcgatcctacgcccatcaatcggccgattttcgaacgaggagactgctccagaatgatgttgatcatcaacggcgtggccacgcctgagccaatgccctgaataatgcgggcgacaatcagcagcgggaaggcttgggcgacgatcatgatcagcgagccaacgatggccagaatcacagccgcaagaaaaatggttttcagtgcgaatcggcgcttcaaaaacgagctgatgggcatggtagcggccaccgccaacagataaatcgtggtaatccattgcacagtggccgtgtcgacatggaattcgcgcatcagtgcggggaaaagcacggtcatcacggtttcggtcagaatgccaatgaaggcaagtgagccgacagccacaatcgcgccgataagacgtgtgggaatcttctcgttatcaatatgctgctcaggcatacatgctcctaaacgttcggttgcaatgtatggaatgtaaggtttaccaaccggcgtaggtacctgtgcgtgcggataaaccggcaatcgtactgccttggctgcacgctatggaatcacaaaaccacctgtgagtgtacggttcggggcggacgctacggtcgatgcgcaatgggttgtcccttggtttggtggggtttgatggggcggattcggcattggtccggtagcagttcggcattggttcagcatgaggaaaccgcgataatatctgccctgccgcctagtttggtgaaccatgggtattgagaacacgcataagctgattgtcaactgcctgccactcaacgaaggagaacggcgcgctttcgccaaggcggcccgcgatgtgccgcaggaattcgtgggcgacgaagcgcaccgcggcgacatggtctggtcggccgctgttcccgaggagcttcgctcccgagctaccgcagtcatcggcaactttccggtctcgcaggcttcccaatacacccgtcttgaatggttgcagaccttcagcgccggtgtggatgcgtacatccgcccgggtgtgctgcctcgcggcaccatggtcaccaatgcgagcggcgcgtatggccaaagcgtgtcggaacacatgttcgccaccatgtgggcattgatgaagaacctcaaccggtatgcctccaatcagcgtgatcatcagtggcaggatgaaggcccggtattgagcccggaaggtggcatcgcactgattatcggcgtcggcgacatcgggtcgcatttcgctcagcttgcccaatccgtaggtatgcgtaccttcggcgtgcgccgtcatgcggacgtgccggccaagggcattgaaaagatgtatggcttcgagcggctggaagcactgctgccattggcggacgtggtggcgatggcggtgccgcgctcgccgcagacccatcatctgctgaatgcggatcgtctggggcgtctgaaatccacagccatcgtgatcaatgctgggcgtggcgacgccatcgatcccgaggccttggccgacgccttgcacaatggacggctccacggtgccggattggacgtcactgagcctgagccgttgccggcggaaagtccgttgtgggatgagccgcattgcctgatcaccccgcatgtggccggcggcaatcatttggaaaagacttccgaacacatcatccgcatcgccctgaccaacgtttcccgctatgccaaacagcaggaactgttgaatctcgtgcgatactgattcgcctgtatcgggtgtacatgaactcatgtacacggccggcgtgtcgcatcccgctacgactgcggcatcgagatgatacctgcagaggcgtggttgatcagaggcccaatgaacgtggcccgaggtcagtctcagtctgatagttcgtagccgttggcgtctttatgccacggcgagccgggcttgctgcacagaatgatgatgccttcaacaaagccccagatggcggctgcgattgggccaagtccgagcagaatccagccgacaagcgtcagcagcagctgggccacggccttgccggtgttgccgagatagaagttgtgcacaccaagtccgccgaggaagatgcccaacaggccggcagccaacttggacttggatgattgccacaccggggcggcggcatacggagcggcggtgtattgcggctgtgcgtaggcattcggctgctggtaggcctgtccatagccgggctgctggccgtagcccgctgcgggctgtgcgggctggccatactgcggctggccatactgcggctgagcgtactgagactgagcgtatgcgccggcgggctggccgtattgcggctgctgctggccgtagcttccggcggcgggttgagcgtatgcggcgggctgtggggcgccatagccctgaggctgccgtgcggcatcttggccgtacgacggctgtgccggctgtgcaggttgtgccggctgcggaacactgtccgaaccgtacggttgttgttgattatcagtcatgtgggtctatcccttctcaatcgggaacggcagtaccttcttaccgtttctgcacaacatcatctcacgttttgcctaatagtaaaacctgccgcgctacgattgggccatgaaaagtttcctgaccagctggttgattatgactatcgccgccgccgtcatggtcgcggtgactcccggcatgaccccggtgggggagcctccgattctcggcatcgccgcgttcgctttgttcatggcgctgattaatgcgtcaatcaagccgattgtgcatctaatcgcactgccgtttgcgattctgtctctcgggctggtcaccttgattatcaattggctgttcatgcgactcgccagctggctggcggtcagtctgttcggcgtgggcgtcttcgtacacggtttccggtggtcggtactggggtccttggttctgaccattgttgcgggaatcgtcgggtccatcttggatcagtgacggtgctcgctgggcgaatatgaataatggcggttggaatcggactgattccaaccgccattactcatatcaagctacgggatcgagcagagcgaacgctactcgcgcaccaagcggatatgctccacatcgtcgcgccgggagcgacggaacagcacgaaacgattgccgatggactgcaccacttcggcgttcagctgctcggcaagctcggcggcggcttccttggcggtcaggccagaaccgtcctgcacggcgcacttgatgagctcgtgcttctcaatggtttcatcggcctgattgacggccgactcggtcaaatcgttcttgcccacatagaacaggggcttcagcgagtttgccatcgcgcgcagctgcttgatttgcttcttggtcaatgccatgggaatttccttacatctttcgtataaccacaccagcatagcaaccggtgctgtctgtgctgtttgccgccctacagcgcgatgatggcggcgatgtaggcgatgacggcgacggcgaacacgagatcttgcgcggcgatggtcagggcacgccagtgggtgcggcggatgctctcctcgtagcagcgggcgtcaagtgcgaggctcaggttgtccgcgtgacgcaacgtgccggcgaaaatcggcacgataatcgcgctcatcgccttgatgcgctgggccagcgaaccggtttcaatggaaccgccacgcgcggattgggcatcgacgatggcacgggtctcgtcggtcagcgttggaatgaatcgcaatgccagactcatgaccaacgcgatctcctgggcgtggatgccgagccggttgagcgggctgatcagggtggcgaaggcgtcggtcatggcggtcggcgtggtggtggtgaggaacaccgcgcccaagatgatcaccaacgcgaaacggcaggcgtacagcacggctatggtcacgccctgatcggtgatgctcagcgggcccagcgccaccaccggcgtgccggtgcgtaccacaaacagattgaccacgcccatcagccccagcaggatcagaatcggatgaatggattcgagcacccgtaacgggttcaggcgtgccgccgcgataacggccagggtgatggcgatgcccagcgcaagctggaggggtgtgttcaccgcgaacatcgtgaacatggcggccaggaagcccaccatcttcacgcgcgggtcaagtcggtggatcaccgagtgcgcgggtttgtcaggggagacggactcggcggggaaggcagtctcggttgccgagatgctctcagcaccagccgcgccggcaatcggcatacgtaccacgcgatcggcgatatgcttggcctccgctcggtcatgggtgatgatgagcacggtcacgccgcgcgatttgagcgtgcgcaacagctcatggatgcgctccttggcctggacgtccaggctcgcggtcggctcgtccatgatgagcacgtcaggattgcaggccagcacgccggcgatggccaccaatcgctgctgtccgccggacaggtcgaaaggggagcggtcggcaagatgcccgatatgcagcaggtccagtgattcgcgcacacggtcggccacctcggcctcggcgagcccctggttgcgcgggccgtacgccacgtcctcggccaccgtgtccgcgaacaactggtgctccggatgctgcatcacgtaacccacatgccggcgcaattgcgccaattgcctgcgattcgccggctccggccgtgcgttgctaccgcgtttgccggtcgaggccaccggaacgccggccacctcgatgctgccggcggtcggcgcggccagcgcgcacagcatgcgcaccagcgtcgacttgcccgaaccgttcacgcccatcagtgccacggtttcaccgcgcgcgatggtgaacgacaggtcatcgataaccgcccgtttggccgaaggatagcgataggtcagatgcgagacgcgaatgatggggttcgtcatatcaccgatgccgtcggagagcagcggcagttcggagccgtcttcgcgcttccgctggcgggggctgtcgttcgtaggacgactgggggcggcttctgtgccgataccaccctcagtctcgctttgcgagacagcctccgctagcgggggtcgattatcggcggctgcagtgacaccaacgattcgcccggcctccatgtgcacgatgcgatcggcatgaacggtctcatccggatgatgcgtgacatgcacaatagtggtgccgcgcgcctgcaaatcatccaaaatgcgcataacttcggcgcgtgcggattcgtccagcatggcggtcggttcgtccaataccagcatcgccgggttcatggccagcatgccggcgatggcggcgcgctgctgctgtccgccgctcatacgggtcgggtcggactgacgcaagttcgccaaccccacggcctgcaatgaatcaacgatgcgctcgccgatgagcccgcgctccagaccgagattctccgggccaaaagccacgtcatcctccaacacggtggtgaccagctgatcctcgggattctgaaacaccataccgatgccgcggcgggcagcgcgataggcgtcggcattcgggccggctgcgtacacgcgctgttccagtagcgtcacttcgccaccgtccggcgcggtcaatcccgcaatcagacgggccaacgtggacttgcccgatccattcggaccgaccaagcataggcgctcgccggcatggaccgtgagcgaaacgccatccaaagcccatgaagtgccgcggtcatagctgaaacgaatgtccttgagtacggcggcggggggagcgggctcggcggaatcgtggaactcgtcggcgtcgaaggaatggggtgcaacggtcatgaaacagcaatccgtaactgataggcgaaaacgcagaatcccggcaagggccggagttctgcgttcttgttctttgagtggtcgttgagtggtcgttagtcgtggcgggcataggcccgtctcaggccggtcactgctgcttggacagcaggttggagaccggcttgtagatcaggaaggtgatcacggcgtgaatcgccatcttagccacgttgaacggcagcagaatcggcagaatcatcgcggccacagcctggtagggcatgtgcgcgtaaatcggcgtgatgatgaggttgccccccagcgccactacgatggccagcaccgcacccaccagaatgccgatggcggcacccttgcgcgtacggatcttacggtagatgaacgcggccggcacagacaggaacagcgccaccagcacagccatcagcgaaccccacgggtcggcgaacatgtgcggcacaaaaccgagcacagacacgattgcggcggcggccggaccgtacgcaaagccggcgatcaggcagacgatgccggacgggtcgtacttcagccaagtgaccggcgtaatcgggaattcaatgaagctggtgaccatcgccagcgccacgaacagtgcatacatggcgatacggcgcgtggaccagcggccggaatcggccacaccagtggtgtgcgagccgagtttggcgctggtgctggcggtggacgcgctggccgaaccctcggcctcgggcgccacagaacgaacaacttgcatgcggatacgcgaagatacgctcataatgagccctcgtttcttccatccggactataccgttggctccggaatctcaccggatcagccgcttgcgcgggtcgcgggcttcctaccatccccgttatgaaacccggggtgcaggttaccgccagtaaggaattgcaccttccctgaaactgacaggcttattcatacgccatgcgccggacgtacgcaacccgcgtttcactgtgcagaaattcgtcttgtgccggtcaagtgcaacaatgggagccatggctgaagtgaagaaacccaacaacaccattgacaagcttgccctgatcgtcaccacctacaaacgtcagcagctgctcgaggtactgttcgattcgattctggcgcttgagcaggcaccgtggcgcattgtcatcgtggacaatgagcagtccgatcagacggcggacatggtcgctgcgtttgccggcaaggtgaccggccagtggggcaccaccgtggccgaccagtccggcaacgaagagcgcgtggtctatgcgccgcagaccgagaacctgggtggcgcgggcggtttctccgccggcgtggccaaggcgtatgatctgggcgccgcatggttctgggtgatggacgacgatgtggccgtgctgccggacgccattgccaagctgtccaagtggaccgacaagcacgaggtgattcagggatcccgattcgattacgatggcggcccgttctactggcagtacgacttcattgtgccgctgggcattccgaacccgatcgcgcccgccgcatttggcccggccgggtatcgagtgatggacacgctgtgcttcgaaggcggcctgttcaaccgccgtgtggtcacggaaatcggtctgccggacccgcgcttcttcatctactgggatgacacgatgtatggctaccgcgccagcaaggtcaccaacccgattgtggtgcccgacgtgattttgcgccgtacgcgcgaaatcggcaactgggatatcgccggcgtgcgccagctcaactccacgtccgacatgaaccggtaccacatcatgcgcaaccgcggctatatggcccggtacttcatgacctacggcgacttccgtccgctggtgtttggactgggcaccgtgctcaccgcggccaaggaagtcattcgcctggtgatggtggatcgcgaacacctcaagaccggtttggtgcagattgccaagggctggtgggactcgcgcaagctgatgcacgaccccacctggaagcccatgccgccgcttgaatgacggccatgccccggcccgtccggcgcgtccgcgtgatggtcgcgttagactgggcgcaaccctacgaactgatgaaaacgtatggaaaggaaggtcaacgatgattgaaactgcacaggctttcggtgttgacattggcggttccggcatcaaggccgcacctgtcgatctgaccaagggcgatttcgccgagccgcgattgaagattctcactcccgaggtctccacgcctcaggccgtggccaaaatcgtcaagcagcagctcgaccacttcgaagtgcctgaatccgcacccgttggcatcgccttccccgcgccgatcaagcccggccagaagctcgacttcatggccaacctcgaccagtcttggattggcgtggacgttactgaagtgttctccgaagcctgcggccgcccggtcgtcgtggtgaacgacgccgacgccgccggcctggccgaagtccagttcggtgccgccaagggccaggatggtctggtcatcgccaccacactgggcaccggcatcggcaccgccttgatctacaacggcgtgctcatcccgaacaccgaactcggacacatcatcctgagcgccaagcatctggacgccgagaagtatgcctcctccgcgattcgcgagaacgaggaactgggctacaagaagtgggccaagcgtctgaccaagtactacggccttatggaaaagtacttcaacccggacctgttcaccgtcggcggcggcgtgagccgtcagagcgaaaagttcctgccgtacgtggatatcaagaccccgattgtgcccgccaagctgcgtaaccaggctggcatcgtcggtgccgcctactacgccagcaccaagcagcagtgagctgagttatttctgctggcgcaggagccgtattgaccatatgtaaggccgtccaagtatttcgggcggcctttttttaatgagtaattcgttcattaggtcgattatgtgttcattaggtcactcccattccaaacctgaattgcaatgggctcggaatggcggcgtttcaagcatcaacaattgtgaggctcgactagcagtgacctaatgagcgcgaaaatgacctaatgaatgtagctaggccgttattcgatgtggattgaagtcatagtatgtctgacgactccgctgccgtgccgcacgattgtcgtagtgctggatgctggtggatatgaggcctcgatatacctggctcggcaggggtggttttatcgtggagggtatgagcgtgcatttctcttctcgtgtggatatttctgcgccgaatcccattgcggcggccgaggcggcagccaaggcaaacggcatcgcactcagcaaactcaacgattccaatccgacccgccacgggttggcacccgaattggtgccgagcgtgtatacggccgacccgcgtggaccgcgtgcggcacgagaatcattggccgcattcctcaatacggcaaacgtggtagacgcaagcagccctcagttggcttcgcccgccgccggcgagggcaggaacgagcgccatgccgctttcaccaatgtgaataccgccatcgagggcgccgacccggacgccctgtacctgctgagctccacgtccgaggcgtattcgtggctgattaagttactttgcgatgccggcgacgcggtgctggcacccaaacccggctatccgctgattgagtcgattgcacggcttgaatgcgtcgatacggtcgaataccagttgcaattcgacggctcctggttcatcgacatcgccgaactcgagcggctactcagcgagcccggtggcgaacgcgtcagagcattggtactcatcaacccgaacaatccgaccggttcgtacgtaaaaccaaccgagcgtgcacgtatcgtgacattgtgccgtgagcacggcatcgcccttatcgccgatgaagtgttcttcgattactctctcgaacctttccccggcgacgcacggctcgcgggggagcgcggcgtgctcaccttcgccctagacggattctccaaaatgctggccgcgccgcacgccaaagtcgggtggattcaggtgtccggacctgccgaggacgttgccgaggcccagcgtcgactggacgtcatcgccgacgattatctgccgatgggcgacatcatcgccgaacggattcccgcattattgaacgccgcgcccgcacagaccagacgggtgggggagcgcgtgcgcaataacctggccaagttgcacgagttgcttgacgccgatcccaacgggctggtcagcgtgctacgggccgaaggcggctggaacgtgctgttacgagtgccttccgtcatcgatgagaacgaactggtgttgcggctgattgacgagcaccaactcaccggacagcccggctacttcttcgacatgacctccaatggatacctggccgtttccctgctgcccgaaccggacgaattcgagcgtggcatccgcgccgtgctcaataccgtcgccgctttgctgcgataggccggtgtttgccggcaccacacctgtactccacgtacaatggcggcatgggattcttgtttagaccgaaagaactgccacacccggcatcgctgacgttcactttggaacaggccgggcatacgtatgatgatgggcacgtgggacttgctcccacggacatcaccatcagcgagcggcgggtggccgtgatcggactgaacggcgcaggcaaatccacattgctgggtctgctggacggttcgttgaaggccaacgccggcacggtgaccattgcgggcggtgaggaacgtcttgacccggctgtgaagaaggacgcgaagcgcatcgataatctggtcggcaaagttcgccgcgaggagattccgaacagtttctaccaagcggcgaatatttccgaggctgtttccgaagcgttgaaaaagcacaaggtgcccgagtcagaacgtcatgcgcgcatcggtaatctgttcgcgcattttgatttggcgcaggtctccaaggccaaggccggcgaattggactccgagaaacggcacctgctggctattgcggccgcgctgagctttgagccgagtgcgattgtggcggatgagccgagcaagggattggatgagattggcaccgcgcatgtggccaaggcgttgttcagctacaacaagcaggtgattttcgccacgcatgacacggatatgatccgccggcccgaatacgccatcgaccgcatactggtgctggacgagcacgcggtcgtgtttgacggagcgccggctgaggctgtggcgttttatgaggatctgattcgacgccgatacgagactagagcatcgtgaaccatgcctgaacctgatgccagagcgtcggattgttgtcgatcatcgaatcgctgcgcgactgcacgaagcagctcagtatggctatgcccagcgcccacaatacggccagcaccacgacccagcgcatcagccaacgccacggagtgacgcgggcgatgccatcgcctgaagcggcgtcgttggcccccgccaatgaccggctcggttcgcgcccattgaccagccacagtagccccggtatggacgccagcgagatcagccagccgaaatcggcggaataccgccatcccaaaccgccgacgcggctgtcgaatacgaccagcaccgccgccacggccaagcaagacatcagccatggccgcatgccgtgtgtttccaatctgcgcagcaggggcagcgccaaagccatcaaggtcagtggcgtggccgtgaaaatcgcgccgaccatcacctcgtaataaccccattgcggcatcggggcgggagagcccgccagccacgggaaacgatccatgaagcgcagcggcaggaacaggtaataccagatgttggcgggcatatccgcggacggggtggtataccgggtcatatcggatatggagaactgatacgcattgccgaaattgaacggggaatcgaaccgaaccatgttccacgccatcagaggcgtcacgacgagaatggcgggaatgattaccgccagcggcgcgcgcaacgcctgcaacggcttgatgcggcgtgtgcgcagatcggtgcccagcgcgcgaatctgcggccagaacagggggaacgcaagcaatgcggccaaggtgaacgtcggtcggcatccgaaattcgccgcaatgcacaaggcgcccaaggccagtcgtggcagggagagaggcttggcatcgcccgcctgccatcggtccgatggtctcagcggacggcgggacgtgtccgcgccgagccatagccatagtcccagcgacgtcaacgtcagcgatgcggcgaacggtatctgatagaagttcgtgcgatacagcaaataccccacttgcgcgctcaccaacgatgagaccactactaacgacgcggccgccaccgaagtcttcggcatcacacgatggatgacgcgcagcaccagcaaggagaagaagatgatgaacagcagcacgagaatatactcggcggcggatgtcggcagattatgaccggccagcagacgataggggacgaacagcagcactgcgggcaacacgccaaaataggaataccagtgaccgtcataatacgcgtaatcccagtagagcggactggctccattggcgagtagctgggcacgtgtggctacgtcataggggtgctcggtggcggccagttgttcgggaaccggcaagtcgagccagggccggccggcgaccagcgcatcggccacatgcccatactggtcgaaatcataggtgtaatcgccggaaacgtggaagacgagcgaagacgcgtaccacagttcgtggatgatggatacgccgataagcagggtaggaatcgccagaagccccacgaaagcaagtcgttgccgagtgctggacgggtcaagcgtgatacgccacaggcgcgatcccggcctccagacggcaatcatcagcagcaccaaggccatggcgagcacgcgcatccaattgatgacgaacggtacgcgcacgttggcgcgggcgtcggtgaccggtacgatcgcgccgcgctcttcctgaatccaaatacgcacgatgccggcacccggcgccttgacataatggctgcgaatagcgtcgggattcatcgactgggccttgccggtgatgccatcgacatccgcgcgcacatgaatggttgccagcggtttgaagacttccttatcgtcgttcgctttggattcggcctcggcctgctcgcgggccttatcgatgaccttgctgctttcggtatcgatgcgtaggtaatccgacgtgccgtccgcggtcagttcaagataggccttggtcggatcggtgacggtcaacatgccatcattccggcgcgtgagacccgaacccagcgtgttatgcacggcgttcgtatccgtgctcgctccgagcgtacgccagaacggcaggttgaacacgatgcactccatggcggcgatggcggcgacggcggccagcaaggcgatcagcaggcgcaccaaacgcagccggtgccgggtatccgggcggctgggcaggtgccgttcatgattcgacggcatcggacggtctgcgcgagtgtggtctatggaatgcacgcatttattctataggctttattcgggcttgatgtcgggcaaacaagagacaatgtgaatcatgccaaaacgtacatcggaccatgggaagcacaaccgcacgccactgctgggcgggctgaaggattcgatgaacgcgctcgcggccgatctgggactgtccaagccgaagaagcacgatacgaatccgttcggcgatgccttgcgggagaccagtgagcgtaaaggcggcattatcgacgaactgactcgccatgcagtggcgctgagtcctgtaatcaagcgacgcaccttccccgaattggagaacgtgccggaagggctggtgcttggatgggcgcagctgccctccaccagaggccgtggcttttcgcttggcattttccccgaccgcgatcattttgcgcaggtggcgttcgccgatacgcatggccgcgtattcgtgggcaccgaccccaacatggacgtgcaggatatgcaggcgcgattcatgttcggcaaggaaaaggaagtgactctgccggacggtgagcggctgggcgaaagcgacgagccgcgttcacgttccggtttctcccgtgcaggccatggcctgggaagtgcgctgcatcatgggcgtggtttggggcgtggccttggtcatggtgctgacggcgtgaaggccattaccggtggcgtggtggggcgtgacgacaccggacgcatgacgtggctcgcctcatggctcaaggccggcaaccggtacacgcttgagcagatgcgtgccaatctgccgcctgtgatgcgtcatgatttggaataccgcgatgccattaccatcgcgttcttcgccacgtatatgttgccgcagatcaatggtctgctcatcggattcggttccggcaatatcttccgccgtctcaaccgtgaggcgccaatcggtgcgattcgccgttcggtgcgtgacactttggcggcacgagcccacggcatgcgggcctccggtctggaggatcacttcgccgatctgatgcgcgaagccggcgccctcgacaccacgccgggactggaagcggtgcatggcgccgaaccgttgcacctgtacacctcgacgtattcgagcggctatttctttacgtgggataagtccttggcattcgggcaggcgctgaaatccttgaagatcgaaggcaacctcaaccgattcgctgcggtgagcgcttggctggagcgcaacgcttccttggggcgcaaccctacggaagatacggtgacccgtgccgaggccgcgcaaatcgacatgaaactcattgagaaccctgcgattatggcgcttgacccgtatgatggcgagcaggagcgtcgggccgtgctgagcctggtcgatatcgccgcacgcacggctgggcagattcgcagtgaattccctgatcctcgagatgtgctgacccagcagaacgtgccggattcgggtgtgacgaatgctgcgggcgctgaaagtactgagagtgttgagggcgctgtagagcggaccaataagagcgacaccaacactcaagccgctcggccttcgtattcgccggcgaggagcgacgaatgggtgtatcgtcagaccctctcctcactgttgcgccggttacggttgccgtatcggtttgatgtggagttccggtcgcgcttggattcgggtgaagtggccattggcttcaccactgccggcacctcgatgatgcccgatagccggtatgacaccactcgccgtacgtggcgtgcgctgagcagcgccgaacgcgcgtcgatgagcgccgcctacaacctgcgtgtcggcctgatgatggcagcgctgagtttcggcaccagcgaatccgtgcgccaggtgtcgttgcacatcgattccattggtcttgaagaggcgattgccgaacaggattccgccatcgaggcgatgatgagcgaggccctaagcgccttcgaacatctgcgcagtggcgatttggggcgtgtgggttccaaagccgaccccaaagatggtgatttccatggcgacccgacccgccccatcacccatgaggagacgttcgggcaggcggcgtccggtgacgaacgcggcacggccgggggaacaggcaacggtaccggaccgtctgcggatgctacggatcaggccgcggccgaatccgctgacgccgatggcgccgcgtccatcgattcgcagttcgaagacctgatgaagggcgtcgatatcgacgaaatggcgttcggcatgccggacgataccggcgcaggcgacgacctgggcggtatcggcggcgagggcgtcggcactgacgatgctgatggggccgccggcatggacgatgatccgatgagcgtgctgcgccgcaatcccaccgtgcgcaatatggtcaccgtcaccttcacccgtgatgccttcctcaagcgactggacaccgatgggcttgacaatcccgaggaaacctaccgcatgttcggtgccgtgatggacgtggacggcgaaggcggcctgaaacccatcagcgccgacttcgacttggcggacagccggttctctcccaccggatcccaggaggagcccgaactggccgaccgtcaattcagcccggcgaccgctcacgtgctgggcgcacagaatagtgccggactggctatccagcgagtggacttactacagcatggcgtcaacgaattccacgatatcgccaggaacacgtcgctcggctccgtggaaaaggcccagcgagccatgcagatcatcgaatcgatatgcgatcccgaactgaccggtttggcctctcaggtcaccagtgcgttgatcgatggcaaggacaccccggacttcacgttcacgcttgccgacgatcttgacaaggagcgtctgcgcgcccgagacatgctgttctcgggccaagccgatcaggccatcgaagcggccgaagcggctgtggtccatttggatcaggtgtatgcggcaggccatggcgtacctcgatacttcaactcctatgccgagcgcgtggtctacaaccgactgttcgccacattggacgagcgtacggtgctcatcccggacaatctgttctacgcacacatggagctggctgacgtgttgagccagatcaagggtgccgaggcggccatcccgcacctcaaccgtatggtggcgtacgcgcccgcctacccgctctcacatctgaagctcgccatccaactggcccgcaatgaggattgggattcggcacgcgccgcctgcctgaatgctctgcgcgtggccttggaccgcgacgatgccgcgttcgcctactaccggttcgcgtacgccgaatggatgcttgaccggttcgacacagccgccgcagcctacattatgagcgatcacatcgctcccggggccattggttcgttggaaagcgaactgcaggaactggtttcccgtgcggactcgcagtgcataccggtgcctgaatcggtggaggccgccgcccatgtgcttgccacgcatgatctgccggtctggccgcataacgaagtggctgacatcgtgcgtgacgccgcccgcgtgtgcgtggatgaaggcatgttcgtgccggcccgcacgctctcggtggccgtggcccgcatgaatgacggtgaaggcgacaacatcgacatcatccaagcccagttcctgcgctcgctatccgcgtagccgcctgaggggaattgacggtatagccggccgaggggagccgagcccgctaggatagacaaccatgagcacgaacgaacaactggcatgggatttcgacgatggggatgtggccgaggtccggcctgataccggtattgcacgttttgcccctggctccgaacaatggatagccgcactgcagcccactgacgacgacgcgatacgcctcgaccgtttcgacgtgaacacgatgaccgctgaggccgccgcccgcctgtgggctcgcgtgaccgcatgggtggaatccgatcagatcgcctactacatcgacgactcacccgtcagctccgacgccgcctacgacgcgcgcatgcgttgcctcgaacgactcgaagcggcgttcccctcattggacaatccacagtcgcccacccatcgcgtcggcggctccttctccaacgacttcgcctccgtgcgccaccccagccgcatgatgagccttgatgacgtcttctccatcgaagagctcaaggattggtacgactcggtgattcgcgaccttgattggcccgaatccaagcccctgcccatgagctgcgaggtcaaaatcgacggcctcgccctgaacctcatctatcgcaacggcgtgcttgaacagggcctgacgcgcggcgacggcgttaccggcgaagacatcaccctgaatgtgcgaaccatcggctccattcccgccaacctcggcggccccaaggaagacgttccggacttcgtggaaatccgaggcgaagtgttcatgcgctgggatgacttccacaccctgaacaacgagcaggaggacgccggacgagcgcccttcgccaacccgcgcaacgccgccgccggctcgctgcgtcaaaaagaccctcgcatcaccgccacccgtcgcctgagcttctatgcgcatggtctggggcagctcacctggggggcggaccatccgcgcggcacccatgatgtggtcgccgaccagtcgcaagcctacgatctatacaccaggtggggcgtgccggtctccccgcacaatcgtgcggtgacctcattccaggagatcctggacatgatcgagtactacggcgagcatcgcggcgacatcgagcacgcgctcgacggcattgtcgtcaaggtcgatgacctgggcctgcagcgcgccctcggtgccacctcgcgcgcgccgcgctgggccatcgcctacaaatacccgcccgaagaggtcaacaccgaactgctcaacatcaccgtgcaggtggggcgtaccggccgtgtgacgccggtcgccgtgctcaaacctgtctacgtggccggctccaccgtggctcgtaccacgctgcacaacggatttgaagtcaaacgcaagggcatcctgatcggcgacaccgtggtggtgcgcaaggccggcgatgtgattcccgaactggtcggtccggtgcttgaacggcgcaaagggcgtgagggccagctgcgcgaattcgtcatgcccgagttctgtccttcatgcggcgcgaaactggcacccgccaaggagggtgacaaggacatccgctgcccgaatgtggaaagctgcccggcccagttgaccgagcgcgtgatttcgctggcctcacgcaaggcgttcgacatcgagcatctgggtgaacagtcggccatcgctctgaccaacccggaggagaaccggcctgattcggtggcgacctacgcgccgaacatcaccgaggttctggtcgcccccggcgaagagcccgaaccgtacgagccggtggaggggctggaattgccggccgcgcagaagccggtgttgtccaacgaatccgggttgttcgacctgaccgccgccgatctgcgcgacgtgcgcgtgtggcgtgaggccgcaatcgtcgaggtgcatgagacggtcggtgcgaacggtaagaagaaaaaggtgcgtaagcgtgtcggtggctctggcctgtggcatcaggtgcccgccttctggaccgcgcccacgccggccaagaagctcacggccaagcagctggccgaacgcgcgcaagaagaggccgcagtcgaatctgccggaacacagggaggtgccgccagcgagacgaccggcgcacctaccggggctgaggctccacttggtactatgccgggctttgccgcagcctcctatcccgagtatgacgtgccggccgatgcggtcatcgtgcgcgtggaccacaagaccacgcgcaccggcgtcacggatgtgccggtgatcattcggcccggcgaaaacacgcgcaagatgttcgacgaaatggacaaggcccgtcacgccgacctgtggcgtgtgctggtcgcgttgtcgattcgccggctcggtccgcctaccgcacgcctgatcgcctcggcgatgggctcgctggcagccatcgaaaacgccacgattgaagatctgacggccatcgacggggtgggcccggaaatcgccgaatcggtggtgaactggttcgccgccacccgcgagcccggcgactggcgcggcgcgactttgcgtgcttggcaggccgccggcgtgggcgtcgacgaggccgagaccagttcgctgccgcagacgctggccggcaaaaccgtggtggtcaccggttctctggaaggctattcgcgcgactccgccaaagaggcgattatcgagcgcggcggcaaggcggccggttcggtgagcaagaagaccgattacgtggtgatcggcgcaaacgccggctccaaggccaccaaggccgaggaactcggcatccccatgctgggcgaagcccaattcgcccagctcctagccaccggcaccatctaaaatagccccctcagacgcttcattaaccccctctgatgagggggctgtcagcctttaggctgactgggggagagaaaaagcgaatcccgccccagtgtgacttactccactccctctggcatgccgccgcatcacacgctagggtagaacaggccctaaaggaggatacggatttatgagcgacgcacgtcagatcgaagccgacatctacgaacgcctgagcaaggtcatcgaccccgagctcggtcgttcggtcaccgacctcggcatgatcgccgctatcgaagccgcgcccgcatcgtcggacgccggcacttacgacgtcaccgtgcacgttgagctgacggttcccggatgcccactgagcgagaccatcaccaaccagatcaacggcgcggtcagctcctatccgggcgtacagctgctgcctcatatcgaagtcggttcaatgagtcgtgacaagctggccgatctggttgccgacctcaaggccgaacgcaagcggaaccccttcagcaagccgggcgtcaagacccgcatcttcgccatcgcctcgggcaagggcggcgtcggcaagtcttcggttaccgcgaacctggccgccacgtttgcggccctcggcttcgacacggccgccatcgacgcggacatctatggcttctcactgccgcgcctgttcggcgtgcacacgcagcctaccaatctgaacggtatgcttatgccggtcaccgcgtggggtgtgaaactgatctccatcggcatgttcgccggtgccgaccgggcgattctgtggcgcgggccgcgactgcagcgctccttggaacagttcctgtctgacgtatggtggggcgagccggacgtcctcttgctcgacttggctcccggcaccggcgacatggcgatttccgtggcccaggcgctgcccaacgccgaactcgtggtggtcaccaccccgcagccctctgcctccgacatcgccgtgcgctccggactcgtggccctgcaggtgccgatgaaggtgcgtggcgtggtggagaacatgagctactacgagcacaagggcgagaagctggagattttcggtgccggcggcggtcagcgcgtgtctgaacagttaagcgcggcgcttggctatgacgtgccgctgatggcccagctgccgctggaacccgaagtgcgcgagatcggcgaagcaggccgtcccgcggtgctggatgtcgatggcgccttgcgcacggatggc

SEQ ID NO: 3915 - DNA, 10504 bp, Unknown
  R22_24m  MAG No. k141_13870
aaggagccgtcctcgttcggcttgaacgaggtccacggcacgatgcacatgatggccacgagcgcgcccacgtagaagatgagcacacgcacgatgatctcgttgacggctttgggcagcacctcacgaggattcttggtctcggagacggtgacgcccacgaactcgagcagctcataggcgaagaacaccatctggaagctcatgaggaaggccatccagccgttcggggcgaacgagaagccggagaacaggttgtcgagtccggcgtggcccgccgggctcacatgatccacgccatgaatccgcgcggccgggtaatggtagccgatcacgatcatgaccacggcggtgacgatcatcgcgccgatcagcgtgatcttgatcatcgagaaccagaattccacctcgccgaacaccttgacggcgatcaggttgacggacaccagcgacaccaggaaacacagttcgatcagccatttccaatgggtcaggtcgatgccgaacgtgtcgaagaaggtgatgaagtacgtggagacggccgtgatctcggtcatgcccaacagcacgagcgcggcccaatacgtccagccggcgaaatgcccccatccgttgcccaggtagcgggtgatgaaattgatgaaggtgtgctggctggggtcgcggtacatcatctcgccgatggcgcgcatcaggaagaacatgatgacgccgaccaggatatacacgaagacgatcgagggaccggtcagcgccagcgacttgccggaccccaggaacaatccggtgccgatggtgccgccgatggcgatgaactgcacgtggcggttgttcaggccgcgctccatctcgttggtccggtccaggctttcgacagacttgagtttgcccgtagcctgccgtgtaccaccattcacattcgtatcggccatactgatttcatttctcttctctgccgcccgattgttacgtaccggacgcgatactcgttcaaaacaagttcagactgtatcaccgaaatatgtcgcgaaaaccgctcagctcaagaatacatgcgatgatgctgtaaatattcagccaagaagttcaattcaccaacaccaaattgaacttctacctctattccacggacttgagcgagctgaccgggtctacgcgatcgagcactgggttggtgaacagctgcaccagcagcgcgaacgccagcgtcgccaccacggcaatcgcatagctgtaccagtgcacttccacttcgaaatacagcgacggcatattcaacgcagcagtcagtaatccgcctatccacctgccaagcggcagaccaaccaccacacccataccggtcaatatcatcatctcgcggttcacgtagttgtgcacctcgcggtcatagaagcccagcaccttcagtgtggccatctcgcggatgcgttcggacacgttcgtattggccaacgtaaacagcaccaccagcgccaggccgccggcgagccccacaatcagcgccaccacggcacccatcaaatcgaacttaaacgtggcggccagatgcgcacagctcacggccttgagcaccgacgattcctcgcccaaccgatccgcatattcggcctgttcggtctcggaacctttcagcttggcgagcatcgcgttccacgtcaaggtcgaggcagtgccatctcccgaagccgaagacgtcacaccgccggccgcaaacttctggtcgtacagtcgctcactgatgtacacatcagagccaataagattgcgcgtcacggccgtgacctgcaccttggcccggctgctgccgccattgcccagcgtgacggtgtcgccggcatgaatatttagcgagttggcggcggactgcgacacaatcacgccactatcgtccagcgctacagtgccgccacccgctttgccgaagatattgggcagcccaaaccatccatcatcgccagcttgttccagcgtgaccatatcgttcaagatattcagcgaatcgttgggcacggtcatcagctgcacggtttcgctttcctgcgccgcattgctcatctcgccactatccacgcgcagattcagcgtttcggtggtttggccatcttgtgccacctgcttgcgcatcgcggtggcgtcatcgtcattggccacgaccatcaggtcgtactggtagatctgctcgtattgtttgacgccaatcgtgtcgacggtgtcattaatcgcaaatccgcagataatcaacgccgtgcaaccggccacgccgcccacggtcataatcaagcgcgacttgaatcggaagatattgcgcgcggtgactttgccgaggaagttcagccggctccataccgggcgaatccgctccagcaatatgcgagcgcccgctttcggtgccttcggccgcatcagcgcggcgggcgtgtgccgcatctcctcgcgacaggcgagcgcggtggccacgcccacgccgaccacgaacagcacgatgccggccgagccgtacagccagtcgtattcaagtcgcacaccgggcaatatatacagtccttcaatcaccaccagcaggaatgccgggatgccaaggaatccgaccagcagaccgatgccgccgccgaccaggcaggcgagcaacgcgaacagcagataccggctggacacggcgagtccgccatagccgagtccaaggtaggtgccgataagtccgcggtcttcctcgaccatgcgggtcatggtggtcaggctcatgagcacggcgaccagcaggaacacaatcgggaatgcgcggccgatggattcgatggaactgacgtctgatttgagcgagctgaatccgtcgatcgaagcgcgcgtctgcacataccaacgtgcgttggccacatcgtcgatgcgccgttgctgcttggcgaattcgctttccgcttcgcttcgcttcgcatcgagttcagactgcgcatcatccagtttcgccttgccgtccgcgagctgttgttcgccttcttccagctgccgctcgccttcttcgagctgctgcttgccgctggccagttgggcggcctgcgcttcaagttgcgccgactgggtttcgagggttgcggcattcgcttcgagttccgcggatttggtattgagctgtgcctctcctgcagccgcttcctgttccttggcggtcagttgcgcgttctgctggtccaaggtggattgtgcgggggcaatggtttcgtttaatgtgcgctgcaaatcggctttctgctgggtcagactgtctcgctgcgtttgcagttccgtttgcttggcggccagctgttgccgcagctcactgattgacggcacttcaggcagggtaatgccaaggcgcgcgagcagttgcttgatggcctgccatgtgggtgagttgaagtcgatattcgggtcaagttgcgccagtagattgtcggcctgttgaatcatggacagcatctgatcaatttgtgccacgccttggtcgatttgggtaatgccctgttcgattttcgtgcgattggcagtcagttccgtttgcgccgcatcgagctgtttgcgagccgaggtgagctgcgctttgcccgattcgagctgggtgcgcgcttcggctatctgctggcgaccttgcgcgatctgttgacgggccgatgcaatctgcgcacgtccatcggcgagctgccgttcgccatcggtaatggttgtcctgttgttctccaattcggtacggctatcttgcaatgtcgttttgttggcttccagctcggcccagttgtcgtcgatctgcttctgggcttcgtccagctgctcgttggcctcgtctttggcatcatccagtttgcgctgcgcgctggagacgatctgttgacgacgggctttctggcgtgtggcctgtatctgatgttcgatacggtcggccacggttttgatggcttcatcgtaggcatcggaaaacgtgtcaaaatcggacgcaccagtgacggcaaccgatatcgcagtgtatatattgccggtcacgccgtcgctgggtgcaaagaacgtatagtcctcggatgaggtggaccggaaggaggtcatgcccgaatagccgtctggattgttgaggtcgcgcgggtcgagtacgacgccggtgatggtgagtttcgtggggaactgcggggattgctcggcgtcggcgtccgtattggcgtcggacttcgcatcggatgccgaggcattggcggcgacacctaccgtatcggcattattggaatcgtcagtctccgtggccgctaccgatatgacggatgaagaggtgtcttgtggcgtcacagtaatggtgccgccaatcttgagtccgctatcgttcaggaattgctgcgtaaccgccacttcgccggccttgttcggcagtttgccctgccgtatgtacggctgatcaagcccttcggtaccgatttcctgcatggtcacggttttcttggtgccgtccaccaacgtggtcaccgtctgagaacgttcgggctgcacggtttgcacaccgtcgattcggcgcagtgccgccgcatcatcatcggtcaggccgtatgtggatagcacctgcaggtcatgcagtccctgctgatcgtaaaaacgaccggccgccagaaaagcatcgcggcatccggcgtagatgccggtcagcacggccacgccaagcagcgtgatgacggcgatcgagacgaacctcttccagctgcgcagccagcaacgcaacgtgtctttggcaaataccgcagaaacgcccgctcctcgaccgtcgttatcgtcgaggttcggccgtttcacagactgtttcacaggttgtttcacgaatcgcctcgcttgtttcacggggcgtttcacagagtgtcttgcagtgagcatcgccaatcacctaccattcgatatcggcgatgggccgcggcgttgcgttgacctcctcgctggtcaccttgccggagcggaagcgaatcactttgtgagccatcggtgcaagcgcggaattatgcgtgatgatcattacggtcatgccttgtgtttggcaaatatcctgcagcaactgcagcacttccttgccggtctcgtaatcgagcgcaccggtcggctcatcgcacaacaacagcttcggctttttggcaatcgcgcgggcgatggatacacgctgttgttcgccgccggacagttgcgcggggaagttgtccatcctctcccccagtccgactttgcgcagcgtttcccctggatcgaaatggtcagggcagatttgcgaggcgagctccacgttttcgagcgcggtaaggttaggcaccagattgtagaactggaagacgaagccgatatcgttgcgccggtaggtcaccagttcctttttccgcagacccgtaatatcgcgtccgccgaccactacgcggccggttgtggcggtatccatgccgcccagaatgttcaatgccgtggttttgccggcaccggactgccccagaatcacgcttaattcgccttgttcggcggtgaagctggcctcgtcgagcgcgcgaatcacactgctgccagaaggatattccttgaccacatggtcgaattcgatatacgccatcgcacacctccaacgcgctcgtggcagccacctagccccataggccccgccagaacttcctgctatactcaagtaaaacaacactgtgtcggttctgcaaccaacagttggattgtgggttgtcggaacttggggagaaggccatgtccaaagaattgacggaaagccgccgcacccgttacacgagacgtgccatgcaggacgcgcttatcgagttgctgcgcgatcagccgctcggctccatcaccgttaaagcgttgtgcgagcgggccgatgtgaatcgttccacgttttacgcgcattatgcgagcatcgaggaactgctgcacgacattgaagacgaaaccatggcctgggtcaccaccgcactcgaacagctactcgcccagccagatcctgccggcatcgagcatgttattgagcgcatctgccagtacattgccgacaatcgcaatcatctccaagtgctgatgagcccgaaagcggatatcggtttccagcagcagctgctgggattgatttacagccagcgcggtgtaggcgaacagttgcaatcttcggcgggttacccagccgaggcgcagatgcgtatgcgattcgccgtgtccggcagcattgggcttttgcaatattggctcgccaccgatctcgcggcctctcccgaatcggtgtcccacaccatcttcaccatgtgtatgcctgccacgcagtgagcacagtgaattcggtgaactcagtgaactcagtgaagcgtgcggtttcataagcatcgctcgctatagcttcgcctgctcaccggccgcgcccacgcccgcgcttgcaatagcgcacaaatagacgattgaccatttctgagacgatacggcggcatagaataacgaacgttgcgtatcacggcaagccccgcgtgcgccaaacccaagaaatgtgagagaagagcacaatgagtactactgatgcgcctaagaagccgcgcgaaaccgacgacgtgccggtgccggccacgctgcgcaagtcattgaaaaaccgccacatccagctgattgcgctgggcggcgccatcggaaccggcctgttctatggttccagtgaatccatcgcgctggccggaccctcgattctgctcgcctacttggttggcggcctcgcgattttcgcgattgtgcgtgcactgtctgaaatgtccgttgaggatccgaaggcgggcgcgttcagctactatgccacccgctactggtccaagcgcgccggctttatttccggctggaactactggttcaactacatcctcgtctcgatggtggagctatcagtggtgggttcgtttgtgaactactggttcccggcgattccgacatgggtgtcggcggccgtgttcttggtgatcatctgcgccgccaacctgctgggcgtctctaaattcggtgagttcgagttctggttcgccatcatcaagattgtggccgtgatcgccatgattatcggcggcctggccgtcatcatctttgtcctgcccaccgcatccggcgtgcgcgcaagcttcgcgaactggttcaccgtgggtaacggcttcttcccgaacggcctgatggggcagaattccgacggttcctggaccggcctgctgatggcactggttgtggtgatgttcagcttcggcggcaccgagctcatcggcatcaccgccggcgaaaccgaggatccgaagaccacgattccgcgcgccaccaatgatattatttggcgaatcctcgtgttctacatcggcgctctgggtgtgatcatggccgtagtgccgtggaacaccatcgatggcaagtccagcccgttcgtgcagatcttcgattccgtgggcattcacgcggctgccggtattttgaacttcgtgtgcctgaccgctgtgatgagcgtctacaactccggcctgtacgccaactcccgcatgttgtactcgctggccaagcagggcaatgcgcccgcttacttgggcaagctcaactcgcgcggcgtgccagtggccggcgtgctgacgtccgccgcgatcaccgccatcgccgtggtcgtggtgttcgtgtggcctgagttcgcgttcaactacctgatgtcgattgccaccattgccggcatcatcaactggacgatgatcatgctcaccgaaatgaagttccgtaaggtggtcgccgcgggcggcgctcccgaggattccgagctggccggtctgagcggccaggaggcactggacgcgattcacttcaaactgccgtttgccaaggtgaccccgtgggtggtgctggcgttcctggcgctggtcgtggtgctgatgtgcttctccaccagctaccgcatcgccgtcatcgccggcgtgatctggctggccatcctcttcgccgcctaccagctcactcaggcgaagaagtaaggctccatttgcgaatagctctcactgatgagcactcagtgagagctattcgcaaatgggatttattcatgaaacagctcatcgatgccgacgagctgaacgtcggattgagacgccgcagcatcgtcgaccagtgattgatcgaaaccgccgagcgaaaacagcaggtatgttcgctggccgataccggttcgcgcagcacggtctcgcagtagattcagcacggaacggtccaccggcgcattgcggaatttgcactcgcccacaatggcagcatcagacgcattgtcaacggccatcacgtctatctcatcctgacgatcccaccaacggccaaccgcacgcgcacggaagggcaaccgtccagcagcactctcacgccacatccattcacggcacagaccctcgaacggtttgccggcaaaatcatgtaataccggcttgatatgacgctcgtatacgccttccacatcgccccgctccaattccgaacgatacggaaagacaaacgaataccagaatcggaagaaattgtcgctcagctgatacagcccacgcgaacctttcgcccgctccttaggcttcgccgtgactgggaactcacgttccacaatccccagttccataagattggcgagatacgacgatactgttgcgtttgccatcatcgtgtgtgtcgcgatctcattcagcgaagttgcgccgagcgcgatcgcccgtatcacgctgttatatttcgcagtttcccgcagttcttcgtgcaacaataattcaacctcgctgtatagcggagcaatgcgtctcagaatatgccgcttgacatttgcgtctatggtctcatctgggtcaaattcctctaggtaacgcgggataccgcccagtattgcgtaggccagcgccttatcctcgctactatagttggggaagaattgcgctgcatcccaatatggcatcggcagcatcttcaggatgccggtcgcacgaccatatagcggcgatttttctcccaacagctccttttcgatgaagctcatggcactgccgcaaatcacaatcatcagatttgcatgacgcaacgtgtggtcccaaagattctgtagcactgacggcaatgacggatcagatttgaccagataaggaaactcatcgaatatcacaagcctgcggccgccatcgctcggctctggcagccgggttaactcggttaacgccctttcccaagaaggatattgactcagataatccttgcccggggcacccgcctcgaacatgagacgggagaacgatgccagctgttcatctttagtggcattctgcgccgcgaagaataaggtttccttgtcttttgcgagttgaataagcgtctctgtttttcccacgcgcctgcggccgtagacgaacacaagctgtgccctacgctcagtgaaacattcctgcagttgcttgaggtcatcgtctcgtccgatgaatgccatgctgcccgcctcctttatgccatacgccggcgtatttctatcgcatcacgatttattgtatcacgattagtataatcgtgattatacaagctgtgacgaggtgcgggtacgggccaatcggcatcgacgagaccagccgcaggggccacaattacatcaccgtggtcgccgatctcgtggagcacgatgtcatcaacgtgacgccgggcaaggacccggccacggtcgaacggttctcgcgtgatttcatggaccacaacggggtcccggaatatgtgcgtctggtcgcctgcgacatgagcctgggcttccggaagggcatccgtgagcatctgccccatgcgcggcggatcgtcgacaggttccacgtggccaggcacgccaacgaggccgtcgacaaggccgggaagacggaaggccgctccaacccgctgctcaaacggaccaagtacctgtggctgcgcaacgaggaaagcctgaccgaactgcaggtggagaccaagcgcaacctgacgaggcaacggttgaagaccggccgcgcctgccggatgcgcgaggtcctgcaggacatctacacggacagccgcaccccgtccgaggcatgggtgcgtctgcatcgcctgtgctcgtggatgatgcactcgaggctcgagcccatgaaggacttcgcccgcatgatccgacgccacttcgccgagatcgtcgcctacttcgagcacccgtacaccaacgccgtgttcgagggcgccgacagcgtcatccagaacgtcaaacgacgggcgagaggcttccgcaacatggactacttcgccaccatgatctacctgacctgcggcagactcgacctcaaagccgtcaccaccacttgaccatcacccaccacaaacagcgaatagcctcaatttgttatctttaccgcgcttgcgtggacagagaacgctcagacctcgaagatcgccgcatattcgcgagagaacccgcctagtcaatgagatatggattgaaaacacgctcggt

SEQ ID NO: 3916 - DNA, 8153 bp, Unknown
  R22_24m  MAG No. k141_14452
catcctgctggagccggcccgctacaactaccagcgtttcctggaaggcagcgcctaccgcggccatgccaagatcgtcgcggccactgcgggccaggatgccggtctgatcggcgcggccaacctggctctgcgctgacgatgtcgctccggcaacgggacgttagtctaatggtgagtcatggccggtgccatggctcactgccgcgctgatagtgcggtcgatgagtttccgctgcctgaccatggaatcgaattccgggttctcagcgatttcctcgtactcgtgttcggtggtcacgccggcgatttcggcgataatctcctcataggacgtttcgacggttcgatgcacgccggtgacgtgcccctgacgtatcacgacaatgcggtcggataccgcgaacacatccggcagatcgtggcagaccatcaccacggaccggccttcggagcgcagtctcttgatatatgcgagcacttccgccgactgcatcaccgacagtgcggtggtcggttcgtccagcagaataagctgcgggtcattgagcagcgtgcgtgctatggccacggtctggcgctggccgacggataaggatgcgataggggagccgacccgaatcgccgagctcagggtcttcagcacggaacgggcacgcgagttcatcgaatcgtcatcgcgtatgccaatctgattgatctccttgccgaggaacaggttcgaggccacgtccaggttgtcgcagaactcctgcccctggaacaccgatgcgatgcccatgcggtccgcctccctgatcgagggaatggtcacctgttcgccgttgagataaatatggccgaatcccggctgcagaaatcccgcgatgaccttgatcagagtggactttcctgcgccgttatcgcccacgatggcgacgacctcctggcgttggatggacagattcaccgatttcaacgcctcgacgaagccgaacttcacacagatgtcctccagccgcagcagaggaggtgtgctcgaattcctcatggtgtgttccttcttctcactcttctcctggtaccggtcactggctgacgtcattgcgaaccgagaactcgatggcgcataatgcgccgcctagcgcgcagttgtcgttcgggtgggatgacacgagtacatcgatgggtgccacggcatcagggaacagcatgcgctgcaacgcttcattgaacggttggatgaatacgtcgccggtcatggccagcttgccgccgagcacaatgacctccggatccacgctgatgcacagatcagccgccacctgaccgatacgcacggccgtgtcggcgatgatgcgacggcaaccggggtcgccttcgttggcaaaggacaccagatcatccagcgtcatattgccgtgtgtgacgctgagcaactgcaccagcctgttttccgccacgacggtgtcaaggcagccgcggttaccgcacgaacagatggcacccagcgggtcgacctggatatggccgatttcaccggccaggccggtcacgccatgcatgatttcgccgttgatgacgatgcctgcgccaaccccgtcgttggctgagatatatacgaaattgcgtttgcctgccgccacgcccatacgggattcgccgtatgccgcgaaattcgcgtcattatcgacgtatacgggaacgttgaacgccgtgcgcaacggggccgtgatatcgacgccgtcccatccgggcagaatgccgggaatcgctatggtgtggtcgctggtggccaccggtgcggccacagccacgccgatgccgaccagctcgctggcttcggcgtcgatgctgctcagggtctcattgatgagcagcatggcgcgttccagcgttgtgtccgccttgtggcccaacggcagggggagcgtgtgctcagcgatgattgacttcgagaagtcaacgatagaaagcgtaagatgacgtcgcgcgatccaaagcccgacgccgaggccctgatgccgtgcaagggtcactagagtggctctgcgaccgttgcgaacggtgtttttggtctccagctggtcttcgtcgacaagctgatggacgagcgtggacacggtcgcagtggacagtcctgtcacctctgccagttcgacctgtgtcatggcgccgaacttgtggatgctggccagcaagttggcgcggtttgcctcgcgaagcgaggtctgcgaaccgaaaagccttgttgccataagagttcagtgtagtcgttaccggcatgaggcacagcgaggcgcagagcgtggatttttcggcgtgtcgcctggtgatgcgcgaaaaatcgacattgcgttcattggttgaacataaacgacaggaaattcgctttcttgagtttgacaacttaactcaatacggtattctatgagatgaacctgaggttattctcaggttcgggcgaccaaggagggttcgccatcccctcgaagatgaaggagaacaaatgaagttcactaagaagatcgtcgccgtggtggcaggcgttgccatgtgcgcgggcctcgcggcctgcggtggcagccgtagcggccaggcaactggcggtgatgccaagatcgaaaagggcgccactatcggcatttcgatgccgaccaagtccgaagagcgttggaacaaggacggcaacaacctgaaggccaagctggagaaggccggatacaaggtcatcctgtccttcgccgacgataagccggcccagcagaacgctgacatcgagaacatggtcaacaacgacgccaagatcgtcgtggtcgcttccaaggacggcaccgcagtgggccccgccgttgagaaggcccgcgatgcaggtgccaaggtcatcgcctacgatcgactgatcatgaacaccgacgccgtcgactactacgccaccttccagctggagcaggtcggcgtgctcgaggccacgtatctcattgaccagctcaagcttaaggatggcgccaccggcccgttcaatatcgagctgttcaccggttccccggatgacaacaacgccaagtacttcttcaagggcgcttgggatctgctgcagccgtacttcgagaagggcgtgctcgtctccccgtcccagcacggtcagggtggcgtgaccaaggacttcaccgttgaggattggcagaagatctccgtgatgagctggaagaccgagcaggcgcagaaggacatggaatccatccttgactccacctacgcccacggcgagaagctcgacgcggtcctcactccgtacgacggcatcgcccagggtgtgatcaacgccatcgaatccaagcgtcccgacatgaagccgggcaccgactcctggccgtacatcaccggtcaggacgccatggagatcgcagttgccaacatcgccaaggataagcagggcgagaccgtgttcaaggacgtgaacaagctggctgacgccgtgtacgacatggtcgtcgagatcgccgagggcaaggaagtctccggtctgaacggcaagttcaacaacaacaacatcgacgtcccgtccaagctgcttgacccccagaacatcaccaaggacaacctccaggatctggtcacggccaactacatcacccaggatcgcttcgacgagctgactaagtagtcctcatcaggcaatccgtaaacaaacacaatgacatgcggcgcatagccgatatgcgccgcatgtccatgaacacagaactgtgacgaggagtgatgacatgtcatcaaatgacaccatcttgacgatggaaaacatcacgaagacgttcggtccggtcaaagccctcaccgatgtgaatctttccgtcgatcgcggcgagatccacgccatctgcggcgagaacggtgcaggcaaatcgaccctgatgaacgtgctttcgggtgtgtacccatacggtagctattccggcaaaatcacctttgatggcaaggaatgcaaataccatactattaatgattccgaggccgacggcatcgtaatcattcatcaggaactggcgttgagcccgttcctgtccattgcggagaacatcttcatcggcaacgagcaggccaagggtggcgtgatcgactgggacaagacccgcgccgaggcgaagaagctgctcgatcgtgtgggacttcccgaagacccggataccagggttatggacatcggcgtcggcaagcagcagctcgtcgaaatcgccaaggcattgtccaaggacgtgaagctgctcatcctcgatgagccgaccgctgcactgaacgatgaggattccgcccacctgcttgacctggttcgtcagctacgtgacgagcagggcgtgaccagcatcatcatcactcataaactcaacgaggtcgccgccattgccgacaatgtcaccatcattcgagacggttcgaccgtcggtgtgatgtacgtgacgccggagacgccgctcgaccaggaagaactcatccgcaagatggtgggtcgtccgctgcacaacctgtacccgaaccacccctccaataccccgggcgaggaatacctgcgcgtcgaggattggaccgtgcatcatccgctcgacgcggagcgcgtgatcgtagaccatgcgaacatcaacgtgcacgccggcgagatcgtcggtctggcgggtctgatgggtgcgggtcgtaccgaaatggccatgtccatcttcggccactcttacggttccaacatctccggcaaggtgttcgtcaagggcaaggaagtcaagatgcccaacgtgcagtccgcgattgacgcaggtctcgcctacgccaccgaggatcgtaagggcaacggtctgaacctgctgcagaacatccgagagaacgcatccctggcctccctgaccaagatcagcaagggcggggttgtggacgacaaccttgagcgcaaggaagtcgaacagtaccgcaaggacttcaacatcaagtgtcatgacatcgatgtgaatgtctccaccctctccggtggtaaccagcagaaagtgctgctcgccaagtgggttatctcgcagccggacatcctcatcctcgatgagccgacccgaggcatcgacgtcggcgccaagtatgagatctacgaaatcatcgataagcttgccgatgcaggcaaggccgtcatcgtgatttcctccgagctgcctgagctcatcggtatctgcgaccgcatttacacggtgtcctacggtgtcgtcaccgacaatgtcgagaagaatggatttacccaggaatacctgatgaagggtatgaccaaggaaagggaggtggcagcctgatgagcgccgcaactgcaacacctgcaaagaaagaagaaaagaccggcctgctggccacggtcgccaacaatgcccgtcaatacggtattgtcggcgcactgctgatcatcgtcgtggccttcgagatcctgaccggaggtgtgctgctgaagccgaactccttcgtgtccctgatccagcagaacgcctacgtgatcatcctggccattggtatggtgatggtcatcatcgccacccacatcgacctttcggttggttccttggtagccttcatcggtggtgtgtgtgcactgctgatggaacgcgccggagtcaactggatgctcgccatcgtcatcgctctggtcgtcggtctgatcgtcggcgtctggcagggcttctgggtcgccgtcatcggcatcccgggcttcattaccactctggccggcatgttgatcttccgtggtctcgccaccgtgatcgtcggcgaatccgtgccgattacctccctcgaattccgtggcattgcccgtaactacctgcccaacatccttggctggtggggtccgttcgacggtctgaccattgtgctcggcatcctgtgcattgtcggctttgcctggagccagctgcgcaagcgcgcccgtgtggccaaggtcggcctggtgcccgagccgatgagcctgaccgccctcaagattgtgcttgtcgcggtcgtcatcgccttcgtcacctacctgctggcttcctccggtaacgctgatcagggtggtaccccgatcatgctggtgatcgtcggtgtgctggtcttcatctacaacttcatcctgaccaagaccgtgttcggtcgccacgtgtacgccgttggtggcaaccgcaaggccgccatcctctccggtatcaacacccgccgcgtggacttcctgctgttcgtccacatgggcttcctgtccgcagtggccgctgtctgcatgctttcccgtctggcttccgcaactgctcaggccggtatggagttcgagatggacgccatcgctgcctgcttcatcggtggcacggccgtcaccggtggtattggtaccatcccgggcgctgtgattggtgcattcgtgatgggtgttatcaaccagggtctgtcgattatgggtgttgacaccgccgtggtgaagaccatcaagggcctcgtgctcctgctggccgtcgccgtggacatcatatccaagcgcaagaagagctgaccttcccctttctcctcctcgatgtgggattcgtgccggtgccgctggtgcggatcccacactgttatctgccgtcattcttgtaatcaaaggactttttccgccatgaaactcaccgcgcgctccacctcccgtatgtatgcattgacctgcttggcctgcgttatctggctctggcagtcactggtcgaggccaataacgatggctcgctgttcaattgggccactattgtcttctcgctgtgcttgctagtggtcatcggatggagtggttggaatgccgtcaccgggtggaacgccaaggaggctgaggctgccacggcgggtgccaaggatgatgagggcagcactgatcggtaacgtatatacggctgttgttgccgggaacatataggtcccggcaaacctgcagcgatatgtgcattgcaagccagggatcccctggcttttttatgccgaaacggaactcgacacgggcgcgcaggtcgttgggtttgtctagagcctgcatatagttacttatggtaatgactattggtaattaattggaggttgggccagcgatgtgcgattcccgaaccgataccaagaccggcttgcttccggtggatgaggtgcggagcctcctggatgtctgctggaaggccaagaccatcaccgaactgatgccggcattgccgaaaggtatgaaaccgcgctatgtccacgtgatcgacgccgtctggcatatcaacgaaccgaatgggcaagataccggcaccgcgcgcgtgggcgacgtcagcgcattcctcggcgtcactacgccgagcatcaccaagctcgtcggcgaaatggccgacctcggactcgtcgtcaaacacgccgatgccgccgatcggcgtgcagtgacgctcacgctcaccgaacgcggcttggatatccgccgcatctatgtggaggaatatcacgcgcatttgagccaactgctgggcggattgacctcggaccagtgcgaaaccacggtacgcaccttgaccgaggctctgcgactcatgcaggaagacttccaacgtcgtagtcagaatatctgaatgaatggaggagagaacaagatcgtgactcattccgcaacacagctgcctaacggcggcaagcaaccggtctccaacaaactcgtcatcgcggtcgtctcgctcgcgatcctgaccttcctcggcatcctatcggaaacgtcactgaacatcgcctactccacgccgatggaggagttctccatcggcgcctcggtggtgcagtggcttgtcaccggttatctgctcttgctgtcggtgtcgattccgagctcgccgttcatggtgcgcaaattcgccaccaaaacactgttcatcatggccatcgtgattttcaccgccggcacattactgggcgcgctcgcggtcaacttcccgatgctgctcgccgcccgactggtcatgtcgctcggtaccggcatctccctgccgcttatcaccaacatccactggcacgaagaagcgtgattccaacatgcaacgccctattatgacttcgcggtcgtttttgcgcacgccgtctgaagcggctgggcccggcgacgaggcaactattcaggacctcgtggatacgttggaggccaacc

SEQ ID NO: 3917 - DNA, 4169 bp, Unknown
  R22_24m  MAG No. k141_14738
catcgaggatgcgacaccgaccacggccataccttccgaaaccgacgagaccaccgagaccacaaccatggtgaccgtcgatgaccgaaccgataccacggtgctgccatccgcagcggatgatgacaaaacggctgtgctgcccgtccccgacgatcatgcggatgcgtcggtctcggatgtggatacgcaggtgacaactgcctctccatcgcccatcgaaccatccacagatcggattgccctggaagcagttgccgatgccgtggagggggatggcgggccgattccatctgccgatgatgtaccgatgtacgcagcatcttcagcgcaaccttcctatgggcagtctcagaccgccggcaaaccatgccagcctggggggagcgccaagaacgtccagaatgctaaggatgtcaagagtgccaagaacatccagaaacagagcatcagcgcgcctaccgtggtattcggactattaggcgtgattatcggcgtgatcgcgctggttttcgggtgcatatctccggatcggatgatttcgctgttctcgccgaatccgcaattgctgacggctattatctgcgccgtagtgggacttattctggtaatagtagccgttgtatgggccatagtcggtgccgtcaagaagagaaaatagcgttacaaccattgcattacggtcccagtagaagcacattatgacgggagccgaccgataagagccgaccgttctatgctgatggggggaggcatagtaactatgaaacggatttcggcgcggcgggtagcgagcgtcatcgccaccgcgatggcgatgacgctggtattcgccacacttggctgggcgatgatgccgcaatggaacacacggccctacaccaagcacatcgctatcgcttctgccgacaccaccatcacccctgcccatgcgaacattccccacgaggggcgatatcgtacgcgtgaaacccgactatccatcaagaccggcgacggcgtcacgctacccgccgtactacgtgaaccggtcgacgctcccgggccacgcccggcttgtctgttcattcacgggtccggtaccagcggtgccgaggatttcggcgatatcgccaacgccatggcctctgccggcatcgtgaccttggtgccggccaagcgcaacgacaactacaccgtgctgcatcgcgactacccgcgttttgctcgcgaatacgggcgttcgctcgacgtgctgcgtggcataagcggcgtggaccccgccaaaaccggcatctacgccgaatccgaaggcacctggatcgccacgattctaacctcgaaacggcaagacattgcctttgccatacttacatccgcaccggtgttcaatggacgtgagcaaatggccatggctgtcagcgcctatacgcatgaggccggcgcgcccaagcccgtggtcaaagacatggccaaattgatgtcgctggactacgcgccattcgatctggcctatgccgactttgatgccgaccggtatctgaaatccctcaccatgccggtgctggtgaactacggcacctacgatacggccatgcccatcgaacagggggcgcagcggatcatcgccacggccaacaagtccggcaacgagaacgtcaccgtacgctatttcgccggcaaccatcagatgcgggctggtgagggcttattcaccccgaacctgccattggccgaaggctatacgcaagcgctggaaaattgggtgaacggtgtgactgccggaaccaaagccgatggatgggcaacgccccaagtcgccggtgcgacacctcaccagcgcttcgccgcgccgcaacgtaccagatccggtatcgtcggctcgctcggcgtgctggccggtctgatggtggcagggcccgtgctgatcgtgatggcggcgatattaggtattggcttgactgtgttttcttggctacagacgttgctggccgggcgacgtagtgtggcgactgtgcgggccatgcatgcgacgccgagtgggctgggagccgcccaacagcgtacgttgcacggcattgccggcttatctgccggtatcggcacagcggtgatggtgattaccgtgctgttgtatggctatatgagcgccgtaggcgtatcggctgtattggttatgcctcaaccgcagttgttttcccttgggtggagggcattgcaggtgctgaccgtgctgttggtcatgctgttcgcgtgggaactggaacgtatgtggcggtatcgcgccagcattatcggcgtgcgtcgtgtcatttgcgtgatggtgacactggctgcacttgtcacattgacgatattgtctttctgggggttgttcagtctgtgatattcacggtcgttaccggctccttcccgaatatgtgccactgagtcgccgtgagcgtcacaaattcgggaaggtggatggggcgtgacggcgtggaggcactgtcgtcagcgctgagcggcttcagcctcatccaaagtgtcgaaaccgccgagctggactgtgtgcaacaaggtttcctcagtgatattgcgttgcgggctggctgcggcgcgctcgctaatcatcacctcgtagagctggaaggtccgttcggaatacgtaccaagctcgccgcgcagataggtttcgaatgaggtggcagatggtgtgtcttcggtggtggtgagtacgcgcatcgcctcgccgagcttggggtagcgctcgcggaaatccttggcccaggcgacttgctgggcgatgacctgttcctgacgggccacgcgctcttcagagggacgcggaatatacggctctatgttcttcgtgaaatcttccggcgcggtggaggccatcatgcggccgtatttttcggtcacgaggttgcggcccacgtggtcggccgcgtcaagatcagcggcatagctggtgagtaatggccgctcccatgtgaggaactgggccagccgcatctggtggaacaccggccagttgccttggcatgccgcgcgtccaccctcattgttggtgcgctggaactgatcccattcatggcgcacaatagcctcgcgcagttcatcatcagtcagttcgttggtcatcgacgttcctttcactaatatctccctctgatgagggagatggcacggcgaagccgtgacagagggagggaagcgacggctgtactgaggtccctccctcagtacagccgcaggctgacagctccctctgatgagggagctctaaagcgccggatcatcagagggagcttgaatctacaaacttttaagcaccggatcatcggagacgatgtggtcctcgacatacgggcgctgccattcgaggaaggtctcgccggacgtggtcaggtgttcgcgtttgagttctctgacgatatccgccgcaatctgctccacgatatcgttgattttctcgattgctgtagccgcgcccttgccgccttcgccgaatccggcccctccatagcaggctgccgaactcaatcgcatcacggtttccaactgttcgcccacgttcggcaacagcgcgaacatcgagccagacagcttgcgcaatgctgcgaactgccacttgtaatacggcatatagcccaccaccatcggcacgttaaccaggaacaccaacgaggcggtggcctgcacgaactcgtggatggacagccatgcggccgcgccgtcgccgcgcttcaacgaacgcggcagattatattgaccggcttgggcgatcatgccgagtcgcttggagatcagcgcgagccgcacatcgtctggcatgtttttgaacccttggcgcgtcttggaaaacagaccggtgggatcggcgaacacctcgccattggtggcggcggccaaggtcgattcctgaagcatcagccactcgtgcggcgcggtctgcgcgggcgcagtgcgatacccggtgatcgactcaaagaagtcaccgatgcggaacacgccgtcacggcgattcgcgccctgtgcgcgcggcgtgacgggggagagcggtgcatcaatcggagtcgtcatcgcttccgccacatcagaggacgccgcgcctgactcggcagtggcggcatcgtccgtagcggtgccgggggtgggtgcgtttgtcgcatcgggtatgacggtggagcctgcacctgcggagg

SEQ ID NO: 3918 - DNA, 6112 bp, Unknown
  R22_24m  MAG No. k141_16295
ccgtagatgcgcatggtctcgccgcgcgggatgaacgcgccgatggactggcctccggaaccgtgcagggtcatgtcgatggtgtcgtccggcagaccttcctcgccgtaacggcgggtgatctcgtagccgaccatggtgccgaccgtacggttgacgttgcgaatcggcatttcgatgcgcacgggttccttgtgttcgagggccggctgggcaagttcgatgagcttgttgtccagtgccttctccagctcgtggttctgctcgatggtctggtgcaggatcgtgccgggtaccgggccggcctgcttgagcacgttggtcaggtcgatgccgccggacttccagcgcttgatggcctcgtcctgatccaaacactcaacgtggccgatggcctcctcaagagtcctgaagccgagctgggcgaggatctcgcgcacctcctcagcgatgaacatgaagaagttgaccacgtactcgggcttgcccttaaagcgggcgcgcagctcaggatcctgggtggcaatgccctgcgggcaggtgttcttctggcaggcgcgcatcatgacgcagccttccacgatcagggccgcagtagcgaagccgaattcctcggcaccaagcagggcggcgatgaccacgtcacgaccggtcttgagctcgccgtcgcactgtacgacgatgcgggagcgcaggccgttcaggatcagcgtctgctgggtttcggacaggccgatctcccacggggtgccggcgtgcttgatggcgttgagcggggctgcacccgtaccgccgtcatagccggagataagcaccacgtcggcatggcacttggccacaccggccgcgatggtgccgacgccgaactcggaaacgagcttgacgtggatacgtgccttcgggttggccatcttcgcatcgttgatcagctgcttcagatcctcgatggagtagatgtcgtggtgcggcggcggggagataagctccacgcccgggttggcgtgacggaccttggcgatccacggcgggaccttggcaccgggcaggtggccaccctcaccgggcttggcgccctgggcgagcttgatctgcaggtcggtggcgtgcacgaggtaatcggaggtcacgccgaagcgagcggacgcgatctgcttgatgcggctgtagcgctgcgggtcgttgatacgatcgtcggattcgccgccctcaccggagttggagcgtgcgccaatcgaattcatggcgatggcaagcgtctcgtgcgcttcctgtgagatggaaccgtagctcatggcaccggtggagaagcgcttgacgatctcggaggccggctcgacttcggagatgtcgattggcttgcggttgttgttgaacttcatcaggccacgcagggtcatgagtcggttcgacgtgtcgttgatgtggtgcgaatacttcttgaacatctggtagtcgccacggtgggtcgactgctggagcaggaagatggcctcgggatcgttgaggtggtcctcgccggtacgacgccacttgtagtcgccgcccgtgcgcaggttgcggtgcggggatgcgctccactggttcgggtaggccacgcggtgacggatggccacttcttcggcgatctcgtcaaggcccacgccacccacacgggaggtggtgccggtgaagtattcgtcgatgacttcctggctcaggcccacagcctcgaacagctgtgcgccacggtagctcatgatggtggagacgcccatcttggacatgatcttgagcacaccggtggaaagcgccttggtgaggttcttcacggcggtgtccgcgtcgaccttgaggtagccgttacgggccaaatcctcaacggattcgaaggccaggtacgggttcacgcaggcggcaccataagcgatcagcagtgcgacgtggtgaatctcgcgcacgtcgccggcctcgacggccatggagatctgcgtacgggtgtggcggcgcagcaggtggtgctgcacggcggaggtcagcagcagggacgggatcgggccccacgtgtggttggattcacggtcggagagcacgatgaagttcttgccgtcggcgatggcctcgtcgatttcggcaaagatctcgtcaagtcgctcttcgagggccttgccgccgccggcgacctggtagaggcccttgaccacgtacgggcgatagtagccgccgaggatgcgggccttgtcaaggcgcttgagctgggccatctcatcagagttgaccacgggcagcgggatgaggatcttcttggcgtgcagctcggaatcggccagtaggttaggctcggggccgatggcggattcgagcgaggtgacgatctcctcacgctcccagtccagcggcgggttggtgacctgcgcgaacttctgggtgaagtagtcgaacagcatgcggctgcggctggagagtgcgggcataggcgcatcgttacccatggatcccagcggttccttaccggtgttggccatcggagtgagcaacagcttcagatcctcttcggtgtagccgaaggcacgctgacggcgctggacggactgtccggagtggctcacgtgctcgcggcggggcagatcgctcatctcgaccgagttgccttccacccacttgcggtacgggtgctgggaggcgagggtcttcttgatctcttcatcggggatgatgcggccttcggcggtgtcgaccaggaacatcttgccgggctcaagacggcccttggacacgatgtgctcctgcgcgatctccggcagaacgccggcctcggaggccagcacgatgtagccgtcgtcggtgagctgccagcggccggggcggaagccgttgcggtcgagcagggcgccgacctgggtgccgtcggtgaagacgatgtcggccgggccatcccacggctcgataagcgtgttgttgtactcgtagaaggcgcgcacgtccggatcgagatccgggttcttctcccaagccggcggcagcatcatgcagatggcgtgcggcagggaacggccggcgaggtgcagtagttcgaggcactcgtcgaaggtgccagaatcggagtagcccggagtggtgatgggcagcagcggctcgaactcgccgagcagttcgctgctcaggcggccttcacgggcggagagccagttgcggttgccctgaatggtgttgatctcgccattgtgggccagcagacggaacggctgggccagcggccagctcgggaaggtgttggtggagaagcgggagtggacgatggcgatggtggccttcatgcgatcgtcgttcagatcctcgaagaagtgggtgagctgcatggtggtgagcatgcccttgtacgtgatggtacgggcggacagggaagcgaagtagacgcctacctcatgctcgacgcgcttgcggatgcggaaggtcttgcgatccaagtccacgccggccagagcaccgtccggagaggcgaccacgagagtcttgaatcccggcatggcggcaagggcctgcaggccgaggccgtccgggttggtgggcaccacgcgccatgcgagaacttcaaggccctcctcgcgcacgatcttggcaatggcctgttcctgctgaccggaggtttcgatgtcgcggtcgaggaaggcgatgcctgcggcgtagtggccggcttcgggcagttcggcgggcacggtggcacgcatgaactcatccggcatgctcatcagaatgccggcgccgtcacctgtgttctcctcggcacccacggcaccgcggtggtcgagattgaccagtacctcaatggcgtcagtgacgattttgcgttcaggacgcttgttcaaagtggtgaccatacccacaccacaggcgtcatgctcgttggcgggatcatacataccgtccggagcgtggaccgtgagatcgagcggggctttgaatgtcaccggaatcacctcaattgcttgtgggcacgtaagggaatcgtgcctcttcgttcattgctgttgacacagtaccgttgctccatgtcattttcgtttcgcgtgtccatataccgagtcgccataaaagtcaatagtgattctcaagcaattgtttttatggccagttatgggggtatttcgaactttttcgcccgaaatgtctatttggccacacgaaaatacgatacggaaacgtccgtatcgtgaaatgctgcgttgggtgatgttacggattggcggctgtggaccaccctcagtcatgcttcgcatgacagctcccgccagcgggagcgataaatgcgaactgccagtcaacggtaaggttgactggcagttcgcatttatacaaggcgcaatagtctataagcgtttgttgccccgtctggagggtttctcgcctcttgatgctggtgccggactggccggtgaccggagcgatgccggcgtgggcggccaggtgggccgcgcttttgaagttggcgatgtcgccgccgatgccgagcaggatgctgcttgcggtcctgacgcctgtcccgggcgattgtggcatcctgtgcatgtctgacaccatagcgatcggcgcgctccgcgaactcaccgaacatggcatccgcgtgcccgacgacgtacggctcatgggattcgacggcatccccttctccgactgcgccaacccacccattagcactgtggcgatagacgtccccgcaatggctcgtacggttatcgatcgcatggtgacgctgatcgagtcgaacctacggcatgaacggcccgatgacatcacccatgaccatatccagttccaggtgatgccacgcacgtcgactctggccgcctgataccggccggcacccttatgagtgccggccttcatccctgaaaatatgggtctatgccacgtacagcgcggcgggatacgtgagatatgaaatttcatcgagctgatcgaccgtcacatatccggctggcgcgttgagcacgtccggaatgcggttgacgattgtggcgcacgtatgttcgacggtcgccggcttgaccacgtggaactccacgtccggttcaccctcgatcttccaatcgcacatatcgccatcatccggcccgtacaccttgccgatacaggcagtttccaacgtgatgccctgattcgtttcggtggttaccacggcggacatgccgatgcatttgccgaccggaatcgtctcgtccatcgtctcggaatacacgtcgacatcgctgaaatacggcacactggcctgggtctgcgatgcgatggtaagcccaagcttctgggccagcgcttcattggaattccatacatacgagggcaccacggtttcgggatgcgcaagctcggcctcgaactcctcggcggtcagaccgcagccgtgcgctttggccaaagccaggccgtaatcctcgacgttgtagctcaccgcaccggtgatcttcttgatgctgtggcatccggcggcgacggtggagaccatgttcacccagtagatgtcctgcatgccggagccgaccatggtggcaccggcttccttggcgatgatgtcgagacggttcgtggtggccggatcggtggtccacgggtagatgcattcctcgcaggtggtgatcacgctgatgccgcgggccaagcactgctcgcacatggtggcgatttcgttctcgaagctgaatagcgtgactaccgcgatatccgcgtcgcactcgttgagtacagcctcggcatcggcgcgaatcggcacattgatggggccgatgcctgcaaacacaccggcatccatgcccacgacttccggattcacgtcgatggcaccgacgatttgaatgcctttctcgtgcatatagcgaatcgtgtacttcgccattttgccgcagccgtattgaatggctttgattggttgcataccgcatactcctttgcaacagtgcatattggccattggagaagtctcaccgtcgagaccaagccaatagccttaactctaccgacatcaggctgggcattcactgatatcggcggcactggagcgtcgggaagagtcggcgtagcggtaccgctaccgagcagaaggactgggccagtacaggtcctcccgccgaatcacggcatctcg

SEQ ID NO: 3919 - DNA, 17462 bp, Unknown
  R22_24m  MAG No. k141_16415
cccgcctagtacactcgtcaccatgcgagtgatcggacagcgaatcaaaagaatggcaaccatagcagtgactgccatcctttccgtatccctggcctcgtgcgggcaggccacggacgacaaccgtacggagatcagcgtatggagctgggaaccgagcatgggggaggtcatccgccgtttcgaaaaagccaatccggacatccgcgtgaaatggaccaatatctccggctacggcaatcttaataccgccattcaagacggttacggcacgccggacgtggctcaaatcgaatactatgcactgttgcagtacgcggtctccggccaattgcttgatctgaccgacaaaatcggctcggattattccaacttctttaccctcggcacatggtcgtccgtgcagctcgccggccgtacctatggactgcccatggattcgggcccgatgggcttcttctacaacgaagacgtgttccgccaagccggcgtggacgccaccaagatcaagacttgggatgactattacgaggccgccgaaaagctcaaggagatcggcgcgtatatcgccgccgactcgggcgacggcagtttctatgacgcgatggtctggctcgccggtggtcagccgttccacacgtcggccgacggcaaaaccgtgaccatcgatttggatgaggatgccggcacccaacggttcaccgaattctggcagaaaatgatcgatgaggggcttgttgacactacctccgccacatggtcggatcggtggaaaagcagagtgggcaccggcaccatcgcctccgtgttctctggggcttggatgccgtcgttgctgctgtccaatgtgccgggcgcggccggtctgtggcgcgtggctcccatgcccacctatggtgggcagcctgccaacgccgaaaatggcggctcggcgctgaccgtgttgcaactgacccgtaagccggatgcggcctatcgtttcgtggactttgtggcgcatgacgcccaaggcattagcgcgcgtgtagacggcggtgccttcccggccgattacgccaccctgaattccgctgattttctggataaaaccacgattaccaatgaccgtggcattgaaatcccgtatttcggcgggcagaagttcaaccgggtactgtcggaggccgccgaggatgtgtcggtcggataccagtatctgccattcgaagtgtatgcgcgcagtgacttcaaatcgacggtgggccaggcatacgagtggtccggcagtttccacgcctatcagcagcgacaggaagccattgagatgggcatgaaggacgaggaaggcaacccgctcgaaccattggagaagcccggcaagaaagtcagtctctccgacggcctggcccgatggcagaaagacctccgagaatacggcctcaatcagggctttacgatcaagtagggtattgagtaggtttttcggggagggacggaatcgactgcgctatgcgcggccgatgcctgcacaccgcgttacttcacattgcgcgagtagatgtatgccatgcctttgaagatcaggtctgaatcgtagacgtcgatcatgtcggtgtcgttcttgaaaatgcggctgagccctcccgtggctaccacttggaacggctcatcgatttccttgcggaactgctgaatcgtgcgctcaatgccaccgaggaacgtgtaatacagtccggcctgcatagcagtgcgcgtattggtggccagaatcgactgcggttgcgtgatctccacttccggcagctgggcggtctgcccccacaacgcctcggccccggtgcggatgcccgtggtgatgaagccggagcgaatcgtgccggaaccgtccacatagttgaacgtggtggcggtgccgaagtcggccaccagcaccgggccgccataggtgtggtaggcgccggcgcagtcggcgatgcagtcagagcccaaggttttggggtcgtcgagacgaatgttcatgccggtcttgacgccagggcccaccaccatcggttccaatccgaggaatttgatcagcgaggcgcggaaggaatacatcaccttcggcaccaccgagcagacgatcacatcgtccacatcgtcggccgtgtaatcgctcaaagccaggaactgcgtgatcatcagaccgtattcgtctgaggtgtgcgtcgccttggtggtgatgcggtaggagccgacgatgcggtcgccctccagaaaaccgatcacgatattcgtattgccgatatcgaccgccatcagcatgggtcaggcctccttgttctcgtcatcgacattgctcgcgccgccggaacgcaacgctgcgagccgcagcaacagtcgttgcgcaagcacggttttgtccatcttgtcccaatgctcgatcttcggggtgccggcatcctccgctccggacgtgagcacggtgacaacgttggtgtcggtgccgaacccggcaccggcgtcgcgcagattgttggccaccagcatgtcgcaatgcttggacgtcagcttcttctccgcattacgaatcagatgctcggtctccatcgcgaatccgcacaggatctgcgagccgtcgtcgcgcttgcgttcgccggcccacgccagaatatccgggttggaaaccagctccacggtgatgctgctgcggccggccttcttgattttctccggcgcaatctcggtcacgcggaaatcgcccacggcggcggccataatcgtgatatccgccgccgggaaggcgtcggccaccgcatcgaacatatcctgcgcggtcgtgacgcgcaccacatccaccgcatcgggcgcggtcaaggcgactggaccggagaccagcgttacgtcggcaccaaattcggctgcggccgaggcaatcgcataccccatcttgccggtggaatggttcgtcagatagcggaccgggtctagcggctcctgcgttggcccggcagtgaccagcacgcgcagccccttgagcggggaagatgagggagcctggtcatcctgcgcatccgccagcagccgagcggccacttcctcgatgcgcgccggctcttccatacggcctcgtcccacgtcgccgcaagccagattgccttcctccggctccacaatctgccagcccaattcggcgcaggttttcagattgcgctgcgtggccggattgttgtacatatgcacgttcatcgccgggcataggatcttcggcccctcataggccagaatggtggacgtcagcgtatcgttcgccaatccacaggcgatgcgggcgatgacgtcggcgctcgccggggccaccaccagcagattggcccaggccgcatcggccacatgattgatggtcgttggcacggtcggattggccgtcacgtcgccgtgcgcggccggataagcggggaacatcgtggtacgggtgggttgatgggtcagtgaggtgaatgtcaggggagtgacgaagccttcggccgctgtggtttcgataacccgcacctcgtggccggccttggtccaatcggatgccagatgacaggccttgaatgcggcgatgctgccggtgacgcccagaagaatatgtgccatagctgcctcccggccttatgccaaggccgcacgtgtgcccacgccagcgcttcccgcgtcgttgcccgacgatgcgccgcgtgttgtggtcgccgcggaccctccgtcggcgccgcaatccagtatagccattgcctccggcgtgtccggggatatagtagaacgtggtgatcgacccgaatgggcggtcaaccacgcaagataacaacgaaaccatattcgggcgtaagcatgcccgaatgcatcagggagtatccatgtcccagaacaatggtgtgcacggcgagtctggcgcaaccgaagacaggaacatcgacggcgcgaatcaagccgccagcaccgacgcgagcctgaacgcgcgcgcgaaatcatcaaacaacaagaagaacggcggcccgaaatggtggctgtggacgctgatcgcggtcgtcgtggccgcggcgctcatcgtgggcgtcaccgtcttcggcgggaaaggcaagggcaaggacgcgaacgcctccgtctcggccagccgatccgacaccgtggccgtcggcctcaaactcgccccggtcaatcttgacatccgccaccagtcgggttcggcccttgagcagatcctcatcggcaacgtgtacgagggcctcgtctcgcgcggctcggacaacaaggtccaccccggtctggccaagagctgggagatctccaaggatggcctgacctacacgttccacctcaacgagaagatgaacttctccaacggcgacaagctcgacgccgaggacgtggcgtggtccatcaacgagctcaaggcccagaagtactacgactacgagcaggtcaagagcctggacaaggccgaggccgtggacgccaacacggtcaggctcaccctctccgcgcccaactcgaacatgctgtggtacctcaccagccgtcccggcctggtctacgacaaggacgccacctgggatcagaagaacggcgcgttgggctcgggtccgtacaccgtggtctccttcgacccgaacgacaagatcgtgctcaaggcgaaccccaagtattggggcaccgagcacaaggcgaggaccgagaacgtgatcgtccggttcctgccggacgagaacgccagcatcaacgccctcaagagcggcgacgtgcaggtgctttcgcccatctccgccacccttgccgatccgttccgcaaggatccgaactatgtggtcaagtccggtgatggttccgacaagttcgtgctcgccttcaacatggccaacgacaagctctccgacaagcgcgtccgccaggccatccgatacgccatcgaccataagcagatcatcgcctcgcgcggcggcgtggacgcccccctcggcggtccgatccccaaggtcgatcccggttacgaggatctgagcggcctgtacccgcatgacgtggccaaggccaagaagctcatggagcaggccggatactccgagtcgaagccgctggacctgaccctcacctacgccaacgtgtacggcaccgagctcggcgaccagctcaagagccagctcaagcccatcggcatcgacctgaagatcaactacgtggagttctccacttggctgcaggacgtgcacgccaacggcaactacgatctttcgctcgtggaccatgccgaaagccacgacttctacggatggaccacgccgagctactacttccactacgacaacaaggacgtgcaggccctgtacgccaaggcgctggaggccacctccgatgacgaggcctcgaagtatctggccaaggccgcgaagatcgtctccgaggacgcgccggccgactggctgttcagctggaaggtcaccatcgcctacgccaagggcgtggacggcttcccgcagaacctgagccagaccgtgctgcccctctggcggatcacctacaccaagtagtcccggaacccatcgctcgggcgcggcgcgggagcgattccgctgcgcgcccgaccgtggacggcccatccggccggtgacgccacgggcggtggcgagggaatcgataagggaggcgttatgcggttcttgatgcaacgcttgctgctgttcgcggcggcgctgttcggcatttcggtgctggtgttcgcgatgctgcgcatcctgccgggcgacgtggcggtcgtgatggccggcatgaacgcatcgccggcgcgtgtggcggccctgcgcgccgaattcggccttgatcggccgtatgtcgtgcagtatctcgactgggccggagggctgttgcacggcgacctcggcgtgtcggcgctgaccgggcgggcggtgacctcccaggtcggccaacgtgcgacgatcacgttcccgctgatcgtgatgagcctggccatcgcgctcaccctcggcttgtccatgggcgccgccgccgtgatctcccggtcgccggccgtgcgcggtttcctgcgcgtgctgtccatcgtgggcggcgccgtgccggccctgtggagcggcctgctgctcatcctcctgttcgcacggggcgtgggccttgtcggtctgctgccctcgcaggggttccccgccgctgggtggggcgctcccgggcgggcggtctcgtccctgatcctgccggcgcttgccaccggattcgtgtccggtgcgggcatcatgcgttacacgcgctccattctggaaggcatcgccgatgagggaggtccgatcgatatggccatgtcctgcggcatgacccgcacccaggcgttggtgcgcgtgggattgcggttggcggctccgcaactcgtctcggtggtggggctggcgttcgcctcgatgatcaccggcgtgatggtggtggagaacctgttcgccctgcccggtctgggcgccctgctggtgggcgatgtcggcaaccgcgatctggtggccgtgcaaagcgagctgttcctgctcgccgcgttcttcctgctgatcggcctggcggtggatctgctgcacgcgctgcttgacccgcgtctggccgccggaaaggaggaatgatggttgatcgcaatggtcgatggcgtcgttcgggcgtggttctgggcaccatctggtcccgtggcaccggccgctactcgctgatcgtgctggggttgtggatggtcgtcgccctggtgtcgttgttctggaccccgcagtcgctgctggccaccgacggctaccacgtgtgggacaagccgtcgtccgcgcattggctgggcaccgacggcaccggcgcggacgtgctgagctggctgatggccggatcgcgtacgaaccttgccatcgccctgctgaccgttgtctgctcggctgccatcggcatcctactggtcgggctgatggtcgcccgttcttcggcgctcgcttcggcgtcggtcgccgtggtcgacgcgctgatctccatccccaccgtgctcatcgccctgctgctcgccgtgccgttcggcgcatccgcggccgtggtgatcggcgcgtgctccatcggctacgggctgcatctggcgcgcgtcgcccgtccggccgccctgctcgccgcccgctcgggatacgtgcagtcggcccgggcgaacggcgccagcgggttcggcgtactggtcagacacatcgtgccgaacatcacgccggtgctgatggtgcaatcgtcgatgtcggcgggcacctcggtgctggccgaggcgggcctgacctatctgggcgtgggcgtcggcgcgggggtgccgagctggggccattcgctggccacctcggtcaaactcatcaacgtgtttccgttgacggtggtgtggcccggtctgatcgtcaccctggtggtggtcgcgctgaacctgttcggcgacgcgttgcgcgacgccaccgacccggtggctaatcccgcgttgcggcagatgactgtgcccggtgcggttgtgccggtggctaggggagccggtgacactgcggcgcagtccgcagtggcagcgccgaaggagacggatgatgagcgttgaaattcacgggctgaatattgctatcggcggcaaaccgattgtcacggatgtcgatctgtccatcgcggacggcgaacgggtcggcctgatcggttcctccggctccggcaaatcgatgatcgccaagtcattgctcggcctgttgccgcgcgaggccgtgctgtccggcaccatcacgatgggagaaaccgccatcctgtccggagaaaccgccgagtcgcggcatgggcaggaagatgactcaggatctgacgaagaacgcggcgcggcagataggcaccatgttgccggtgaacgcagggttgccacctcgggccacgattccgctgcgtacgccgacgagcatacgcttgccgatctgcgcggccggtatgtgggtacggtattccagaatccggcccatgcgctgaacccggtgatgaccgtggcgcagcagattgcgttgccgttgagactgcactacgatctgaccaaggccgaacgtgctgagcgagtgaataccatgctggacaaggtcggactggaccgtgacgtggccggcacatacccgcacgaactgtccggcggccaacagcagcgcgtgggcatcgccacggcgctgatcacctcaccgcgattcatcatcgcggacgaacccaccaccgcgctcgactccatcacgcaacgtcagatcgtggacctgctgacctcgttggtggacgacgccggcgcatccatgctgttcatcacccatgatttctccgtactcgcgcgtgccaccacccgctgctacgtgctggacgccggccgcatcgtcgaatccggacccaccgccgacctgcttgctgcaccgaccacgccgcaagcccaacgcttggtcgccgccgcccaaaccctcaccctccacacccccaaggaggattcgcatgagtaacagcagtgtgccactcctctccgcccactccatcaccaaatccttcggaccgcgcaccgcacgccaccaagtcctcttcgacgtctccgccgacgtccacgccggcgaatgtctggccgtgatcggcggctccggatccggcaaatccacgctgacccgcattatgctgggcttggaatccgcggactccggcagcgtggaatacgagagccaatccattgtcggcggccgaaaatcgccgggattcgcgaccctgcgccgcgaatcgggactggtgttccaggacccgttctcatcactcgacccgcgttggcaagtcgccaaatcggtggctgaaccgctgagtctgcagcgacgtgatctgaacaacaccgatatcgacgagcgggtggtcgcggctctgaccatggcgggtcttgaaccggcggacttcctgaaccggtacccaatcgacctgtctggtggccaggcgcagcgcgtggtcatcgcccgcgccatcatcaacgagcccaaggtaatcctcgccgacgaaccaatgagcgccatcgacgtggccgcgcgcatccagatcctcgacaccttcgccgctatccgtgaggcccggccgagcaccgccatcatcatggtctcccacgatctcggcgtggtgcagcacatcgccaaccgcatcctcgtgcttcacgacgggcgcgtcgaagagacgggtcccaccgccgaagtgctcggcaacccccaatccgattacacccgtcagctcatcgaggcagcctcgttatagatctttttggctcccctccctgaggggagctgtcgaatgcagtgaggctgaggggagttacgggtgccgtcgtactcccctcagtccgccggcgacacgcgcttgtcgcgggttgtgctatggtgtgaggcatgcagattatctcatgttgttgtcgctaaccgacgcccctgggcgagcggtcagtgacgcataacttgagatggagcattcgaatcgcggcgaatctgccgcatacttttcatgtatccgatggcacaagcgtaatcgtgtaatgcgcgagccgtggttaacatgaaaaaccggttcacttttcggattcaccgtacagtgagcgggaatactcgattttcaaaccaaagccacagtccattcgtctgggaacgtcggttcacgaacgcaacgcagcaaaacccccacaaccccagcaacgaaggacttcacatgaccatccacaacagcctcgcagaactcatcggcaacaccccgctcgtcaagctcaaccacatcccgcaggcggccggcgtcaaagccaccatcgccgtcaaagtcgaatacttcaaccccggcggctcctccaaggaccgcatcgccgagcgcatcatcgacgccgccgaacagtccggccagctgaagcccggcggcgtgatcgtcgagcccacctcgggcaacaccggcgtcggcctggccctggtcgcccagcagcgcggctaccgcacgattttcaccctgccggacaaggtttccgaatccaagcgcgcggtgctgcgcgcctacggtgccgaagtcatcgtcacaccgaccgacgccggcccggacgacccgcgctcctactaccaggtcgccgaacgactggccaacacgattcccggcggcttccgcccgaaccagtacgacaacccgaacggcccgctgagccactactacaccaccggccccgagatctgggaggctatggaccacaaggtcacgcacttcgtggccggcattggcaccggcggcaccatctccggcaccggcaagtacctcaaggaagcctccaacggcgcggtcaaggtcatcggctccgacccggaaggctccatctactccgcttcctcacgcgacgaagtccaccagtacgacatcgagggcgtgggggaggacttctaccccaaggctttcgaccggaacatcaccgacgacatcgtgcgcgtatccgacgccgaagcctttgaaatgacccgccgtctggccggcgaggaggcgttgctggtcggcggctcgtccggcatggccgtggccagcgccatcaagtacgcgcttgccaatgatttggacgagaaccagattgtggtggtgctcgcccctgattccggccgcagttatctggagaagatcttcaatgacgactggatgcgtgccaacggctacggcgacatcgtggaacgcaccagcaagccctccctcgccgagcagtaccttaacggaactccctctgatgagggagctgcggatggactccataactagctatcaaaagaatcaataccaacatccgcactaactaaccgcacctgttttaccttcgaatacggaacaatcccgaaaggaacccaatatcatgtccgctgaatacaacgccaagttcgccaataccgacatcgccactcgcgccatccacgccggccaggagcccgacccgaccaccggtgcggtcgtcacgccgatcttcgccacctccactttcaagcaggatggcgtgttgggcctcaggggaggccacgactactctcgctccatcaaccccactcgcaccagcttcgacgagcagctcgccgccgtggaaggcggcaagtacgcgctgagcttctcctcgggcttggccgccatcgacgtgctgctgcgctccaccatcaagcccggcgacaacatcctgctcggcaacgatgtgtacggtggcacctaccgcctgctctccaaggtgttcgtgccgtggggtgtgggcctcgacgtggtggacatcaccgatctgaaagccgtggaaaccgcattggcctccaagcactaccagtatgtgtgggtcgagaccccgtccaacccgctgctcaacatcaccgacatcgcggccaccgccgaagttgcccacaagtacggcaccaaggtcgcggtcgacaacaccttcgcctcgcccgcccttcagcacccgctggccgatggcgccgatgtggtggtctactccaccaccaagtacatcggcggccactccgacgtggtcggcggtgccgtggtggtcaacgacgaggagacccgtgagaaggtcgccttcctgcagaacgccgccggcgcagtgccctccccgttcgactcctggctggacatccgcggcctgaagaccctggatctgcgcgtcaagcgccacagtgccaacgccctgaaggtggccgaatggctcgaatcccagccctctgatgtgattgagcgcgtctggtacccgggcctcgagtcccacccgggtcatgaaatcgccgcccgccagatgcacggcggcttcggcggcatcgtctccgtgcagctcgcggccggtgccgaggcggccaagcacttcgtggaccacacgcagatcttcacactggccgaatcgctcggcggtgtggaaagcctcatcgaggtgcccgccgccatgacccacgcctccgtggccggcaccaccctgcaggtgcccgccaatctggtgcgtatttcggtcggtatcgagaacgccgacgaccttatcgccgatctcaagcaggcattggatcgtatctgaccgtactgacggtactggtggcaccgtattgacggtgccaccacgcttatcggcggactcgctatcgattggtacctacaaaaaatccccggcccacaagggtcggggattttccgttatcgattaaacatggatcgaatcagctggcgttgccgccctgccatccggtggcatccgcaccagccgggcgcaacgcctgaccggaagtcggtgtggtgccatcaacgaccacacgagtgccgatggtggcaaagtcgtacatccacttggcgtcggccacctgcatgttgatgcagccgtgcgagcctgggataccctgctgcacatagatggggtgctcgccccacatgtatgcaggaacaccgtgcagggcctcgccgccgttatagtaggaaatccacggcgtgcctggctggttgtagccttcgccaaccatggtctgcgattcgtacttgagatacacgtagaacgtgccggtatcggacagcatggaaccatcggcggtgggcttgccagaagcgatgttgaacttcttgaccaccgtggtgccctgatatgcagtggcagtctggttcgtcagatcaacatgaacccacttatcgccatttgccgtatcgaagttatgaggcacctcgacctgcttgacatcatatgggctgtctttcacagccacagtggaatcagtggactggttctgctcgatggcggtagccagacgttcgggggcgtccccggcaccagtcacttcaataccatccacaccgagtgtcttatcggcaccaatttccacgccgccttcgtctttcggcgtgatgtagacctcgcgtgtcaccttgggaacagtcagttccttggttacgctgtcactggtgacgtacttggtgatggcatcgcggtcgactaccagactcatggtgccacccgccttattcaccgtgggcttgaggaatgaggcaatggtatcggccgggatggtgacgctcttgttcacgccgttgtccacggtcagtttgaggccaagcttggcattggcgtcaaactgtgtttgctgtgcgctcgcgtcatcaatcggattctttgcagtctgtagcttgaccggcaccgtcgcattttcgcccggggtcgcgacggcctccttgactgcagcattgacaacattgatatccgggcccttgccatcctgacccgcggtgtaatcgaactgcttggtgctcttgttgtagacaacggtggcaatctgcgctcggtcggcctcatcgaccaggccggcggtgacgaattgttcggcagtctctttgtctctggtggcggtcagagcgatatgcggctgatcgaaaatattgagcttggccacgtcgccggtcttcgcgttcaacagcgcatctacggttttatccgtgtcgacggtgacgccaaggtccttcagcgaggctttgacgctgttgccttcggcggtgaacgtcactgtggtgttattcagctgctgcttcacagtattcgcaagttcttcgcgggtctggcccatgacagagacattgcccaaatgaacaccgggcgcagccttgtcttggaagtaccaacgtccgacgaagaaataggctattaatgcggcaagcaacactgcaaatatggttatgatggcaatccgtgcggccttgccatgtgatttagcggtggtagatgccataacatgttcacccacataggctgtattgtcggcatggttattggtgccattgtcgctttgctgtggcgtggcggtacctgtggccgcggctgcgaacagcccatcggcggccacaggctgcagcaccgccgtctcctgatcgtcaggagaggaaaaggaaaatgtattgttggccataaaatgccccgtcttagttctctcaaagcggcatatcgtgtgatatgccgggaatagcgttcctcgacgcataataatacggaagggctacgtacatcggtacgaggtattccgttatacgatgaaatccatccgcggtcggcctacactggtcgtttatgacagcacatcaggcggcgctggaggcgctcacacgatacttcggctatgactcgtttaggcccggacagcaaggaattgtcgaggctttgcttgccggacgcgatgtcttgggcgtgatgcccaccggcgcaggcaagtccgtgtgctaccagattcccgccgcgctcagcccgggtgcgactttggtcatatctcccttgatttccctgatgcgcgaccaggtcgatgcgctgaacgacctcggtctgccggccgcgttcatcaacaccactcaaactcccgacgagcaggcgatggtgttcgcccaagccgccgccgggcagatcaaactgctgtacgtggccccggaacgcttggaaaccgggcgattccgcgactttgccgcccgtacgccgatctcgctgatcgccgtggacgaagcccactgcgtctcccagtggggtcaggacttccgctcgtcgtacttaggtatcggcgatttcatcgccgggctgccgcagcgtccaccggtgggtgcgttcaccgccaccgccaccgaacgggtgcgtcgggacatcgtgggactgctgggattgcggaatccggccgtcaccgtcaccggattcgaccggccgaacctgtattttgatgtggtcaaactggagaccaaatacaaggccgcatgggtggcgcggtatgtggccgaccatccggacgaatccggcatcgtctactgcgccacccgcaagaccaccgaagcgctcgccgacacgctgaaccagatggggcatccggccgtcgcctaccatggcggcatgtcgccggacgcgcgtgaggtggcccagcgcgacttcatcaccgacaaggtgccggtggtcgtggccaccaacgccttcggcatgggcatcgataagtccaacgtgcgttacgtcatccaccacaatctgcccgaatccattgaggcctactatcaggaggccggccgcgcgggccgtgacggcgagcccagccgatgcacgctgctgtggaatgagtcagacatcgtcacccggcgtcggttgctggataacgattatgagaacgagcgattgactcccgaagagcaggagatcgttcgccagtccaagcgccggctgctggacggtatggtcggctactgccgcaccaccgactgcctgcaccggtatatgacccggtatttcggtcaggaattgtcgccgaatgctggttccgcggcgggtgaagacattgcggcggactcttcgcagtccggcagatgcggtgcctgctcgaactgcgaaagcacgttcgagaccatcgacgtgacccgcgtggcgcaggcgatcagccgttgcgtgcatgacgtggggcagcgcgtcggttccggcaagatcgtcaagatcctgcgcggttcgcgggcacaggatctggcatggctgaacccggagcggatgcccaccttcggcatgctcaaggacgtgaacgaggctcgcgtgcgcgacgtgttgagccagatggccacggacgggtacctgtcaatcgccgaagggcgtatgccaatcgtcatgttcggtgcgcgggcggccgaaaccgccgctcccgacttccactatgagatcaaacaggtggaacgcaagtcggcggcggccggttccggtcggagcgggggagtggctgatactgccgattccgccaatgttcccggcgatgcgctgggctcgtatatcccggacgatgacgaggaatcgctgttccagaagctacgcgaactgcgacgcaccatcgcccaggaaatcggcaagccgccgtacatcgtgttctccgacaagaccttgcgcgacatggcccgcatcaagccggttaccaacgcgcaatttctggcggtcaacggcgtcggtcaacacaagctcgacctctacggccagcgcttcatgcaaaccatcgcctcgttcaatgccgggagtgcgtcataacaatctcctatagcgaaccgcggagtatttgcgggcgttcttgggctggcgcgactacgatgactgttcgatacttcatgaccgaacactcagcaagtagaaaggcaacagcatggcagaagacaaggccgaaaagcccgtcgtcgaatcattccagcttgatcacaccaaggtcaaggcgccgtacgtgcgttacatcgacaccgaaacgggccctcacggcgacgtgatctccaattacgatctgcgcctgacccagccgaacgagcaggccatccccaccggcggcctgcacaccatcgaacacaccatcgccgtgctgctgcgtgaacgcattcccggctacatcgactgctcgccgttcggctgccgcaccggcttccacctgctgacctggggcacccactccaccgaggatgtggccaaggcgttgaaggaatcgttggagttcatcgcatacaaggccacatgggatgacgtgcccgccaccaccgagaagagctgcggcaactatcgcgaccacagcctgttcgccgccaaggaatgggccaagcagatccttgaggaaggcatcagctccgacccgttcgagcgcaaggtcgtctgattcgtctgattcgattcaattctgattcggctcccgctggcgggagccgggggcgaagccgactgagggtggctgtcctcaactcggctggactgtccggctcctgcggacgggagtcattgtttattagtgtccgtcatgcaacgcggaggggatttcttgtgcctacggcatggtaggttggccgtcagttagtcgccggtcaccgtgccggcaacccggcatgtcggagaggtgagaagtgactcagtcgaacgctgcaaacaaggcgacaggccgccgtttccgccacgccaccatgcgcgatctgccgcagatgcagaaaatctacgcacgcgcacgcgcgttgatggccgccaacggcaaccccacccagtggggcaacgaatttccgcgtgaatcggtgattgaagacgacatcgccaaccagcgtacgatgctgctggtcgacacctgcaatggccacgaacgcattctggcccagttcgccctgtgcccgggcaaggatccgacctacgccaaaatcgacggcgcctggctggacaacgacacctatgtgaccatccaccgcatcgccgcatccggtctggtgcgccacgcggcccgcgactgcatcaggtgggccctgaagcactacggcaacgtgcgcgccgacacccaccccaataacaaggccatgcagcacgtgctcgaaagctccggcttcgcccgttgcggcctgatccagctgctcgaccggccggtcgacaccaccagaatcgcctatcagcgccacgagtggtgagtgtggctgccggctgatgtgctcgtttctgc

SEQ ID NO: 3920 - DNA, 22640 bp, Unknown
  R22_24m  MAG No. k141_16554
cggcggccatggcccaggagagacgcccggtcccattccgaacccggaagctaaggcctggcacggcgatggtactgcacccgacagggtgtgggagagtagcacgccgccgcaccacacgtacaggaagccccgatacccctcaaaggtaccggggcttcccgcatatcaggacacttgcgcgtgggggggggtatctcgcgtccttgggccccggcaggagtatcccgtcggggcccagtgcgttttgggcggcaacccgctgaatacccggtaagatgtctgaggtatcaacaaacaggtcaggaggtgacgcgcatggtggcgccaagccgtgatgaccgtagcgtagatgcattggtgaaatccaaggcagtacttgatgtattggcggaactgggaccaagcaccgcaaaaaccataagcgaacgtactggtgaacccgtaagctcaacgtatcgtttgctggataatctcgtcgcagtcggttgggtggaacggggcatcaatcgtggcgagtatcggcttggcatcgattgcgtacgtatcggcggccaaatcgaaagcagactggacattcagcagatcgctcgccgtaccttccgcgcccatcacggccagttcggcatctggggtctgttcgttcggaggcgattgcgcacggtgtgcatcgagacacgcacccgtgagacattgcaaagctatgcacagctggtgggcaatagcttgcctctgagcatgagcgctccctctcatgtactgacggcctggcttcccccggctcgctacgagcagctgttggaacactatgcctataccaacgagctcggcggcacattctccacgatgcgtgccacagcaatgggacaggctcgtcatatacgcgaatgcggcttcacctatgacgtcggccagaccatggccggctccgtgactatcagcgtaccggtattcaatcacgccggagagattcaagcggcaatcgccctgagtggcctttcccgctccttggaacctgagctggcctgtctggtagatgggcaaccggcaacggcatcggctcaagacatggtgcgattggtgcagactgccggccgtgaggtgtcgcgaggccttggatacagtggtgatcatcttggcctgaacagttgaatatgatgagtcagggataagtcaggggaaggaacgtcgacgatggcggaagacaaacgtgaaccgacccgcgctttagacaaggcgagtcgtgtgatggacgcattggcggcggagaatggcctgtcgccggcagatatcgccgacgcctgtgatatcccgcgatcctccgtataccgcgtgctggatggactggtcgatgtggggtgggccgtaacggatacggatggtaactactcattatcactggactggctgcgattggctgatgccgctcgcacgtctcgtaccgaatggcagcctgcgattgcggtcatgcatgccatcaccgcgcaaaccggcatgacctcattcctcagtgtggtctccggcactgaattggtatgcgtggaatgtgcgcaaggtcatgccatcgattcgctgatcctgcgcccgggccgcgtgctgcctctgcatgctggcgcggccggccgcgtggccttggcgtatttcgaggatgccgatgtcgaacgctatcttgcaggagcgccgtttccggcatataacgagaacacgctggtcagtgtggaacagttgcgcgaggatattcgcttgactcgcgaacgtggatatgcactgtcggatgaggatgtgacgttgggtgtcggtgccgtcggtgtaccgattgtggacaacgagtccggtcgcgtgatcgccagcctgtccgccggtggattcgtggacgaagtgttagccactcaagaatccttggccgcgttactgcgcgatggcgtacgcgaaattcaggcagcctgattcggcccgctaggctgtcgggctggacggttatgtccggtcagctatggcctttgccggctacggttctgctggttatgcttctgcccgactacgctgcggtccgttacgcttcggccacacgacccaacgcgatggcggtgatcagcacgtacgcctcgcgcgggtcggtggcatcccagccggtggattcggcggcgcgcttcaaacggtagcggatcgtattgggatgtacgttgagctccttggccgtggtctcgagcgaaccgccgaacttcaggaatgtggagacggtgagcagcgtcggatcatccgggcctgctgctgtcaggcttccgtagaccacgcggaccagttcgtcacgggcgtccgcgtcgccgatcaacgcacgttcgggcagggcgtcgtcggtgcgtaacgggcgcggcaatggctgcacggtggcggccagggccggcgcggcctgaagacagtagagcgtggcctgaatcgaacgcatcgcgccatcggcaccggtgcgctgtggacccaaggcgattggccgatcggcggcgaacgacggggcgatggtattgcagatgatttccggcgtggccgcaccgaccggacgaatcaacgccactacggcggtgctgttgccgatcgggcgcttggcggtcagacacacaccgccgaaatcggccacgattttctcgatttccttggccgtacgtgcggcggaccgggcagggtatccggcgatggtgtaacaatcgaagtcatgctcgaaaccgaggatggtgaacagggactccactcgttcgtcggccagatgattgaacaggcactcgaacagcacggtgcgtacgcggttggtcgcggtgatgccgggtgcggccgaatcggatgaatcgggcgcacccggcataccggatgcaccggacgaatcggcaacgtcggcagcaagaagttcgagaaaatctgacatagtcactagtgtagcgtcgctgattggcgttgcctttcagccaaagactctcgccaatacgtcagcaccacgaatccgaatacaaacgcaaccggcaacatgtgccgctcgaaattattggccggcgcggtaatcatcacgcccatcagcagtagcagcggaatatgggtcatgagggtgagccaacgtcggcgaatcacctcggccgcgccgatcagcaatgtcatcaccacgtagaaattgccgtgcgtaggccagccgagcacgggaatactgccccatacgcgagtgaagccggcgatgtgctcacgccagtcatggttgtaatccttgatccatgtggagtttttctgcacgtaatcgctggccacgtaataatccatcgatacgtacggctgatcgttcacattgaagtatccgaagcatttggccagcaacgcatccagcgcgatgatcggattgtccttgacgatttcgaaccatgccttgttgaaattggtcatatcctcgggcgtcaccgtgcgccacttgtagctgaccttcttggcctgaataccggaggatttcaccgggtcggcatcctgctgggagtaagcgtcggccatctgatcgagattgaagacgggcgcgaggttctttttggcttcgtctgaaataccgtccggattgcgctgagccacgcgggcgatcatttgcagctgtacgccgcggctttcgattggatcgccgccgatgatcgcaccagaggagatggcgaaggagatgccgccgtgaatcagtacggtggggatgagcagcgccacgacgtaagtcgcccagcgtttgcggtcggcgatcagagccagcacgatttgcagagcgatgatgtaccacgcatatttcgcggaaatcagcatcaccgacgtggccaggatgaaggcgatgaagctgtggcacggcaagtggacgggcgtggcgatggcaggggtctgaggatgtttgcgggtgccggcggggtgccaggtctggacgagttcataccagacgctgaaccaccagacgaacgagaacgcgaacagcggcgatttggtgatggagatagtggaaaacacggccagcgggcagaccatgaagaacagcagaatcaggaatctggccaatcctccggcctgtgggggaacggcggaatccgttgccgtttttcctatccaaggccggttcaggaatcgattggcggcggcagcgcagcagaacacggcgaacagcgtctgcagggcagccaacgtcacgatgccggcatcgtttgagccggtcagatgcctcgcaaacgtgactatcgcgccatagaacacagtgagtaccacattgtgttggtcggtcagatacgtgggatcggacggccacatgtagtgcgcggtggggtagatgtccatcggcacgaaggagaagaagccgatatagggctgtttcaggccggtccactggttccaggcccagctgaattcgcggatctgtgagcggaggtccgcgccgaatgcggccagcagagtggtcggcacccagagccagccgacaaaaaacaccagcataagcttccagaaccggttcgtgccgcgtgtgatccagcggtccagaacagtgacggtggacgtgacgataacgcgaacggtacgacgggtcttggctggttggctggcctgctgatcggcggcgggccgtgatgtttcgctattctgctgatggtggcgtaggcgcttgccgatggtcttcggcagtatgcgctggcctgctgcgaatcgcgccatcagcgtgatgattccgagatatatcaggaacgacacgacgaatattgcggtattggcccagttccaatgggcgagggtgccgttctcctcgtcccggtacagcgggccgaccgccgagcacagtgcaagccacaggcaggccagcacggccagtgtccagcgcgcggcagcgcccacgcgcgcaagatgcgggtgggactggcggctggatacggcggcaagcttcgcggtggctggtgacgtcatgacaatatatggtagccgcacaggtcaacggttgatattcgatgtctgccgggcatcgccattgttcgcaagccaatacgacggccgggtgcatgcgtgggctcggcgaatgcggaatttccgaagttgtgaacgctaacacgggctgtccggcccaaaatggttgattttgtgcgcttttccgtggaatatcgcgggcaaaaaacggcgcaaccgaggtaacgtagtgtccatgatgattgcattgaaagctgcaacgccgcagctacccagaactacagccgtcgcggatcatgtggtcgccgtggacgaaaccgattcgaccaacgcgctggccgcgcagatgatcggcgacgggtcgttgacgctgcccgaccaccaggatggcgaactggcggtggccgtggtggccgccgaccggcagatcgccggccgtggccgcaatggtcacaagtggatcagtcagcccggccgttgctcgacgatgtcctatgccgtgcgcattccgcgcgcgatcgccaccgacgaatccgtcaatggctggctgcagatgatcgccggactggtcacgctggatgccctgaacggcatgatcgaggaatacggtgccgcgccgaaccagccggactgcttgctggaactcaaatggccgaacgacgtgttctgccacgggctcaagctgggcgggctgctctcggaactggtgattccgccgtcgtccggtactgatgccgatgccgatgacgacgtcgtcatcgtgttcggcgtaggcctgaatctggcgctgggtgcctgttggctgcccacgccgcagtcgacttcgctgcagctgcatgtcacgggcttgccgtcgtttggcgagatgcgcgatgcggtggccgaacgtcaggtcgagggcttccgtgaacgactggcgaagttcatcgccgacccgaagggccaggccgagtcgttgcgcgaggaaatgaaggcggtgtgctgggcgcgcggccgtcaggtcgaggcgcatttcacggacggcaccacgctgaccggcgaagccatcggcctcaacgaagacgcctcactgatcctgagaacacaagacggcacggaccatacggtccgcaccgccgatgtgggagtgctgtaatagccggccagtagctagctagtagctcaggtcagcgaccgagcttggacaggccggcggcggccagagaggccaccacggccttgatggcgtcgccgacgacgaagcccatggaggccagggccacggcggcgagcggcgcaccggtcaacgcggactggatgatgaagccgaaggcgtacaccaccacgacgccgccgaccagcgcggccagcaggtagcggcccgcggtgcgcgcggcggccgcgaaggacgaagtgtcggacttgccgcgcagcagggcgatgaccaccacacccggcaggaagccgaagaggaagccggcgctcgggccgaccagggccagcgtggaggtgccgccggcgaacaccggcaggccgaccgcaccggccgccagataggtggcgacggcggcaccggcctgacgccacggcagcatgagaccggcgagcatcaccacgaacgtctgcagcgtgatcggcaccggcgtgcccggaatcggaatctcgccggcggccgcggacagccacatcagcacggcgaacagcaccggcttccaggatgcggcgacgatacgacgggcgagcgatgtggtggccgcagcggatgtggtggtgtgtgaagtctgcatatcaatgacccctatgttgcgtgatatcgccgtgaacggcgggcggtatgcgatggatgaggggaggttccggcgggccgtgcggtatccccgacagcccgaaccgtccatatggtggacggtcccaaatgaatccggccctgtgcgggcgaatcgtgcggcgatggaccgatgccggtccggtcgccttccgttcgcccgcagatgagccttcccccgaacttacggttgccatcgtagaggtgttcgatttcgtgcggtttcgtaccaacttacaaaattgtcgatttcgatttgtcataagttgacgaacgcaaccgtaacgtcaacttcttgaaccggcgcgcaaggatgtgcaatcggcggatttgcaacgtttttgatagccggcgccaacggttacgttgccggaacctacgcgcgcgtttgttcgtagcctacaaaagggcgtgaaagcttttgtgcgaacgcggcttgccctctcctctatatggagagcacaatttgacactatggctcatactgtcaaaaaactgctgattgcgaaccgaggtgagatcgctctgcgcgtggtgcgcacggccaaggagatgggtatctccaccgtggccgtctactccgaacaggaccgcaatagccgctatgtggacatggccgacgaggcatacctgctctccggcgacacctacaaggacacgtacctcaacgaggatctgctgatcgacatcctgcacaaaaccggtgcggacgccgtgcaccccggctacggattcctttccgaagtgccgagcttcgcgcagaaggtcgaggatgccggtgccatctgggtgggtccgcaccacaccgcgctggtggatttgggcgacaagatcaccgcccgccgagtggccttgcgcgccaaagtgccgccggtgcctggcctgtccgaaccggtgaccgacgtgcgaacgctgctcgacttcgcacacacccacggctacccgattatgatgaagcgcactgatggcggtggcggccacggcatcaccgtggtgcatgacgacgaggagctgcgccgcttctacatgaaccacgacgcgctgcaaggcggcgatctgaaggaatacttcatcgagaagttcgtggacaaggcacgccacgtcgagacccagtccgggcgcgactcgcacggcaacttcaccgtgtactccacccgtgactgctcgctgcagcgccgcaaccagaaactcgtggaagaggcgcccgcgcccttcctatccgaggaaatcgtcagcacgctggaggaatactcccgccgcctgttcaccacggtcggctacgtgggcctgggcacctgcgaattcatggtgaccccgaacggcaaagtgtacttcctggaagtcaacccgcgtctgcaggtggagcacaccgtctccgaagaggtcagcggcctcgacctggtgcgcgaacagctcaatatcgccgccggtggcgagctcacccgcgcccccgaaccgcgcggccacagcttcgaactgcgcatcaccagcgaagacccggccaccaacctgacccccggctccggcaccttggagaagatccagtggccggccggccccggcgtgcgcatcgataccggtgtggaacagggcgacaccatctccccgaagttcgattcgatgatgggcaaggtcatcgtcactgcccagaaccgtctcgatgccgtggcccgtgtgcgccgcgtgctcgacgagctcgtgatcgaaggcgtgcccacgccgattccgctgttcaaggagatcttccgcaacgacgacttcaccgccgagcatggccatccgttcgccgtgtccaccaagtggctggagcgcacgtacctgaaccgcacaccggcttccgccgcctccggccagccggcctccttggccaccgccccgggtgccgctgccccggccgcgcccgacaagtccaagtcggagacgttcgtcatcgagatgaacaaccgccgcgtcaagctcaccgtgccactcgacatcgtggagaacatcaccggctcggcccgcgcccgcggtgccaagcgccccacccagccgttgcgcggcgcaggcttgcacaacgtggcctccggtgccgccacggccaacgacggtgccaaatccggcgtcatcgcctccccgatgcaggccgtggtcacgcgcatcaacgtgtccgaaggccagcaagtggccaagggcgaccttctggtggtgctcgaatccatgaagatggagaactacgtgtacgcgccggccgccggcgaagtgaagaagattttcgttggcccggccgatggcgtggaggccggcgacacgctggtcacgctggacgtgaacgccggcaaggccaaggccgccgacgccaagaaggagggcggcaatgactgacatcatggattcgccggccgtgaaggccgcggctgcggcctcggccgccaacgccgcccagccctcggcccaccagccgctgcgcaccgccgtggtcaaggccgccgaactggcccgcgccgccgaagagcgcgcccgcgacaagcagcacgccaaaggcaagaaaaccgcgcgcgaacgcctcgacctgctcttcgacaccggcacgttcgaggagatcggccgcttccagggcggcaacatcgccggcggcaacgccggtgcagctgtcatcaccggcttcggccaggtctacggccgcaaagtggccgtctacgcccaggacttctccgtcaagggcggcaccctcggcaccgccgaaggcgagaagatctgccgactgatggacatggccatcgacctcaaagtgccgatcgtggccatcgtggactccggcggcgcccgcatacaggagggcgtggccgctctgacccagtacggccgcatcttccgcaagacttgcgaggccagcggcttcgtgccccagctgagcctgattctcggcccctgcgccggcggtgccgtctactgcccggccctgacggacctcatcatcatgacccgtgagaactcgaacatgttcgtcaccgggccggacgtggtcaaggcctcgaccggcgagaccatctccatggccgaccttggtggcggcgaagtgcataaccgggtgtccggcgtggcccactacctcggcgaggacgaatccgacgccatcgactatgcgcgcaccgtgctcgcctacctgccgtccaacagtgaaagcaagccgccggtctacgcctacgccgtcacccgcgccgaacgcgagacagccaagcgactcgccaccatcgtgcccgccaacgaacgtcagccctacgacatgctcgaagtgattcgttgcatcgtcgattacggcgaattcgtgcaggtgcaggaactgttcggcgcctccgcgctcgtcggcttcgcctgtatcgacggcaagccggtcggcatcgtggcgaaccagccgaacgtgctcgccggcatcctggacgtcgactcgtccgagaaggtcgcccgattcgtacgcctgtgcgacgcgttcaacctgcccgtggtcaccctcgtggatgtgcccggctacaagcccggctccgaccaggaacacgccggcatcatccgccgcggcgccaaggtgatctacgcctacgccaacgcgcaagtgccgatggtgaccgtggtgttgcgcaaggcgttcggcggcgcgtacatcgtgatgggctccaaagccatcggcgcggacctgaacttcgcgtggccctcctcccagatcgcggtgctcggcgcggccggcgcggtgaacatcatccaccgccacgacctggccaaggccaaagcctccgggcaggacgtcgatgcgctgcgggccaagtacatcaaggagtacgagaccagcaccgtcaacgcgaacctgtcgctggaaatcgggcagatcgacggcatgatcgaccccgaacagacccgtgaggtgatcgtcgaatcgctggccacgctcgccaccaagcggcgcgtcaagcgcaccaccaaacaccacggcaaccagcccctctgatttctgaagacatcaaccaaacacaagtaaggaaagcaatgaccaccttcttcctcaatcgcctggccaccgagccccatgcgctcgccttcgccggccagtccaccccgtggccggtagccctggcagaccagaccaccgatcccagccttgacgaggccctgcgcggccacatcgccgcagccaaccgactgctcaccccggtcgccgccgacctgctgaccaccaccggccgtccggtcgacctgttcggcttcgctccgaacccggcccgcctcggcgccgcagccgacgccaccgcgtccgtggaaggcgtggcactgacccagctcggcgccctgctcgacctcgaacacctcggctacagcgtggcccaggccaagccgctcgccgtgctcggccactcccagggcgtgctcgccgtgcacatggcccgcgccatcgaggccgccggctccatcgaggccgccggcaagaccctcgacgagattctggccgtcgccgccctgatcggtgcagccggcactcgccgcgtgcgcgaactgggcctgaaccccaagtatggcgaagccagtccgatgctctccgtcaagggcgccacccgcgaacaggttgaggctctggtcaagcgcgtgaacaacgcccgaggcccgatctccatcgccgtcaccaactccgacaaccaccacgtgctttccggctacccggaagacctggcagccttcgccctcgaagccgagcgcgagcacaagcaccaggccaagctgcgcgagcagaagctccacggcggcaccgtgttcaacccgaccctcgaataccttgaagtcaccctgcccttccactctccgctcatggccgacgctgttgagcggaccgtgtcttgggccggcgcctgcggctttgaccaggatcgcacccgtgcgcttgccgaggaagtgcttctgaaccatgtggactggaacgcccgcgtcaaggcgctgttcgacgccgccgacccggccaagctgtggattgtggacctcggccccggcaacacgctcggcaagctgatcggcaacgtggtgcagggcaccggcatcggcgtggtcgaagccaccacgctgtccgaacgctccacgctctccacgctggaaagcgagcctgagcgcacccagaactggaaggcgttcgccccgcgcgtcatcaacaccccggccggcgccaagctggtcaccaagttctccaagctcaccggcaagccgccggtactgctgcccggcatgacccccaccaccgtggaaccggaaatcgtggccgccgcggccaacgccggctactgggccgagctcgccggcggcggccaggtgaccgccgaagtgttcgaccgccacatcgccgccctcgaagacgagctggaggaaggccgcacggtcgaattcaacgcgatgttcatggaccgttacctgtggaacctgcagttcggctcctcccgcatcgtgcccaagaagcgtgcttccggcgcgccgatcgacggcgtggtcgtctccgccggcatccccgagctggacgaagccgtggccctgatcgagtcgctgcaggcggacggtctgccgtacgtgagcttcaagcccggcaccgtggaccagattcgccaggtcgtgcgcatcgccaaggccgtgtcccccaccaccatcatggttcaggtcgagggcggtgaagccggcggccaccacagctgggaagcgctggacgacctgcttgccgccacctacgccgaagtgcgcgcctgcgacaacctcgtgctggtcgccggcggcggcatcggcacccccgaacgcgcggccgactacatttccggccagtgggcccacgcctacggcctgcccgacatgccggtcgacggcgtgcttatcggtaccgccgcgatgaccgccaaggaggctcacaccagccccgaagtcaagcagctgctcgtcaagacgcccggtattccggccgacgccaagtccgacgacgtgttcgccccgcaggccgcccactgggtgccgtccggcaagtccgtcggtggcatgtcctccggcctgagccacctgcacgccgacatttacgagctcgagaacgactccgccgaatgcggccgtctgctcgtgcgcgtcatgaagcaccccgaagagctcgactcccgccgcaaggaaatcatcgaagccctgaacaagaccgccaagccttacttcggcgacctggcctccatgacctaccttgagtgggcgcagcgcttcgccgaactcgccttcccgtgggtcgacccgacttacgccgaccgcttccagcacctgctgcagcgcatcgaagcccgtgtgaacgacacggactccggcgaattcacctccaagttgttcgccgctgatggcgtttctgctgaagaggcagctgccgctggcctgctgacccacgacgacattctcgccgacccggcccccgcgctcgaaaagctcgcactggcctacccgcagaccgccgaactcaaggtggtcccgaccgacgtggcttggttcccggtgctcgtgcgcgaataccccaagcccatgccgttcgtacccgtcatcgacaacgacctgctgcgttggtggggtcaggaccagctctggcagtccgaagaccagcgctactccgccgattccgtgcgtgccatccccggcccgatctccgttgccggcatcaccaccatcgacgagccgatcgccgacatcctcggccgcttcgaaaccgccgccatcaagcgcgtgcaggacgaacagcaagccgccgatgccgctgagaacgacgatttcgccgcacttggcgaggccaccagcgccgaagacttcatccgcaagtccccgaacatctcctgggtcggccacatcaccgacaacccggcctacggcaccgccctgggcgaccagtactacgaaatccgcgcgtttgacgccgcggccggcaagtacgatctggacatccacctcgacacctactgggacaacgacccggacggcggcacctccaagcacgccgtgcgcgatatcgtcatcccgctcatcgtggaaggcaccgagcccggccgtgtgccggtcgtggaccgcgaacgcctgattccggacgtctacgcgatgctcgccgccaccgcaggcatcggcaacaccgccatcaccggcgacaagctcaccgagatgccgcagcttgacgacaagacctctgacgagcgtccgttcggtaccgcaaccgcaacctacaccctatccgccaacctcggcttcgaccacgaagcggccactggcgccgctctgccgaccaccctgcagcccagccgcatcgcccccgatgcgctggtcggccctgcctggccggcaatctacacggcgctcggctccgtgtacgtcaagggctacccggtgattgaaggcctgctcaacgccgtccacctcgaccacctcatcgaacttgaggtgaacgaggaggacctgctcaagcacaccggcgaaaccatcaccctgaagtcttgggccgaggattacttcgagtccgcctccggccgcgtggtcaccatccacgtgacccacaccgccgccgacggcacgccgcttgcccgcgaaaccgagcgtttcgcgatccgcggccgcgtctactccgatgctttgcctgcagacgcccccgagtatggtggtgccctcctgaataaggaagcggatggctccgtcgccggacagtccactggactgtccgcctcctcgcgcggcctgcaagtagtgcagaccactccgcgccgtctgctgcgccgcgtgaaggtcgtcgccccacacgacatgaccgccttcgcccgcacttccggcgacttcaacccgatccacacctccactcgtggcgctcgcatctccggcctggccgccccgctcgtgcacggcatgtggctgtccgccaccgcccagcacgccgtgcaggcgaccgacgagaagggtgcccactacgagattgccggctggacctacaacatgtacggcatggtccagcttgacgacaccgtcgaaatctccgtcgagcgcgtcggcaaagtgcgccacggcggcatgaccctcgaagtcacctgccgtatcgacggccagctcgtctcccgtggcaccgcactggtccgtgcgccgcgcgccgccttcgtctaccccggccagggcatccagaagcagggcatggttctggacgagcgcgccaagtccgccgccgcccgcgacgtgtgggagcgcgccgacaagctcacccgctccaagctcggcttctcgatcctgggcctcgtgcgtgacaacccgaaggaactcaccgccgacggcgtgacctaccgtcaccccgaaggcctgctcaacctgacgcagttcacgcaggtggcgctcgcgacggttgcttttgcccagaccgcccgtctgcgcgaagccggcgccgatatctggcctgcatacttcgccggccactcgctcggcgaatacaacgcgttgtccgcattcgccgacgtgattccgctggaaaccgtgctggagctcgtgttccaccgtggttccaccatgcaccacctcatcgagcgtgacgcacagggtcgctccaactaccgcatgggtgcccttcgtccgaaccagttcggtgtggacgacgcgcacgtcaaggaatatgtggaatccgtggccaaggcgtccggcgaattcctggagattgtgaactacaacctcgccggccagcagtacgccatcgccggtacgatcgccggactcaaggccctgaaggccgattccgcccgccgcgtggccgcattcggtggcaagcccgcgttcatgctggtgcccggcatcgatgtgccgttccactccacgctactgcgcaagggcgtgccggaattccgcgacaagctcgacgcgctgcttcctgcttacatcgactaccgtggccgtctggtggaccgctacatcccgaacctggtggccaccccgttcgagatgaccaaggaattcgccgccaagatcctcgaagccgtgccgtccgaacgcatcaaggccgtgctcgacgacccggccgtgtgggattcctacgccgccgacgaccagaagctcggccgtctgctcttgaccgaactgctctcctggcagttcgcctccccggtgcgttggattgaaacccaggcgctgctcttcggtcagcgcgaacagggcggcctcggcgtggaagaatacgtcgaagtcggcctcggcaacgccccgaccctggccaacctcggtaccaagaccctacgtctgcccgaattcgccggcaacgatacggtcgtctacaacgtcggccgcgatgaaggccgcgtctacatgaccgacaccgattcgctggttcccgacgacgagccggaagaggctgcggcctcggccccggtcgaaaccgctcctgccggtggttccgccgtcgccaagctcggatcgggtgctgctccggcaaatgccgcgactgaggctgctcagacaacggatggctctgtcgccggacagtccactggactgtccgactcctcgcgcggcctgcaatcagggcaggccgctgctggcgcaccgtctggtgccgccgtcgccgacctgcccttcaaggcttccgatgccatcggcgtactcatggcctactccgccaaggtgcgcctcgaccagatcggcagcaacgacaccaccgacaccctgaccaacggtgtctcttctcgccgcaaccagctgctcatggacatcagctccgagctgggagtcgccagcgtggacggtgctgctgaagcgacgctcgacaagctcgcccaaatcgtcaacaaggccgccccgaactacaagccgttcggtgccgtgctctccgaggcgctgcgcgaccgcctgcgctcgctgttcggtgccgccggcgtcaaacagcagcacatccgcgaccgcgtgaccaacgtatggcagctcggcgaaggctgggtggccagcgtgctcgccgcactgctgctcgacactcgcgagggtgccagctcccgtggcggcgacctggccaagctgcccaccgccgccgtgcagaacaagccggaagccgacaagctgatcgatgcggccgttgaggtcgtcgcccaactcaagggtgttgccgtggccctgccgtccgccggtggtgccgctggtggcgctgtggtcgattccgccgcgctcgacgccttcgccgagaaggtcaccggttccaacggcgtgctcgccgccaccgcccgcttcgtgctgaacgagctcggcgtggccgctccggctccggaagaatccgaggacgagaacgccgccgtcgtggccgcggtcgaagccgaacttggctccgactggaccaagcaggtcgctccgcgcttcgacgccaacaaggccatcctcttcgatgaccggtgggcctccgcccgtgaagacctcgcccgcgcctactacggcaacgaccccgccgccttgaacggcagcttcatcggccttggcaagaccatcgccgccgaagcccagtggttcgccaacgagtcggagagcgaggagcttaaggccgccttccagaaggccggctccgaggccctcgaacaggtcgcttccaacaagaacgcctcccgttacgcgaatgatatcgccatcgtcaccggcgtgagcccgaactcgattgccgctcaggtggtcgaaggcctgctcgcaggcggtgccactgtggtggccacctcgcacagcttcaagccgtccatcaaggcttgggccaagcaggcctaccgcgagcacgccaccggcaacgccaagctgtggctggttccggccaacctctccagctaccgcgacgtcgacgctctggtcgactgggtgggccacgagcagaagaagacctccggtgccaccaccacgattctgaagcccgcgtgggagccgaccctgttcttcccgttcgccgctccgccggtccacggcacgctcgccgactccggcgacctgttcgaatcacaggcgcgactgatgctgtggggcgtggaacgcgccatcgtcggcttcagccacatcggtgccgacaccaacgtgcagcacaagctccacgtggtgctgcccggctccccgaaccgcggcgtattcggcggcgacggtgcctacggcgaagtcaagagcgcctttgacgccatcgtcaaccgtgcccgcgctgaaaaggtgtggtcgagccgcgtcaccttcgctcacccgaagatcggctgggtgcgtggcaccggcctgatgggcggtaacgacccgctggtcgccgtcgttgagcgtcacggcatccacacctactccaccgcgcagattgcggccaagctgctcgacctgtgcactgccgaatcgcgcgagcaggccctcaaggccccgctcgatgtggacctgaccggtggcctcggctccgagcccatcgacatcaaggcgttgcgcgcggaggctatggccgatgcggagaaggaagctgctgcggcctcgtctcaggaaacggatggctccgtcgccggacagtccactggactgtccgactcctcgcgtgggcagcaaatcaaggcgctgcccaccccgatcgtcaccaagcaggcttcggtcgaccttgccgactggaccaacgtcaccgccaagccggaagacgaaatcgtcatcgtttccgtcggtgagctgggcccgtggggctccggtcgtacgcgcacccaggccgagctcggcatccactcggacggcactgtcgacctgagcgccggcgcagtgctcgaacttgcgtggaacatgggtctgctgacttgggccgacagcccgaagcccggctggtacgacaccgacggcaacctcgtgcccgaagaggacatcgccgagcgctaccacgacgaggtcgtggcccgctccggcatccgcccgttcgaggaaggcatgggcaacgactacaaggacggtgctgacgaagaggaagccgaggtcttcctcgaccacgacgtcaccttctctgtgcccacccgcgaagtcgccgccgaatacgtcaagttggacgaggctcacaccaccatcgccccggatgaggaatccggcgaatggaacgtgacccgccacgccggctcgatgatccgcgtgccgcgccgcgccaccatgacccgcacagtcggcggccagttcccgaagggcttcgacccgacccgatggggcattcccgcctcgatggtcggcgacgtcgacaagatcgccctgtggaacatcgtcaccactgtggacgcctacctgggcgccggcttcaccccggccgaaatcctcgagtccatccacccctcgctggtggcttcgacccagggcaccggctttggcggcatgatgtcgatgcgcaagctgtacctcgaccgcttcctcaaccacgagatcccgaccgacatcctgcaggaggccctgccgaatgtggtcgcggctcacgtgatgcagtcctacatcggcggttacggcaacatgatccagcccgtctccgcctgcgccaccgcggccgtctcccttgaagagggcgtcgacaagatcgccctcggcaaggccgacttcgtggtcaccggtgcgatcgacgacatcggcgtggaatccgtgatcggcttcggcaacatgaacgccaccgccaactcggaggaaatgtacggcaagggcatcgacgcgcgcttcttcagccgcgcgaacgatcgtcgccgtggcggcttcctggaatcccagggcggcggcacgatcctcgtgacccgcggtgacatcgccgaaaagctcggcctgccggtcgcggccgtggtcggcttcatccactcctacgcggatggtgcccacacctcgatcccggctccgggcctcggtgccctggctgccggcctcggtggcaaggactccaagctcgtgcacgacctggctaagctcggcgtctcagccgacgacatcgccgtggtctccaagcacgacacgtccaccaacgccaacgacccgaacgaatccgagctgcacaacacgctggcccacgccatcggccgcaccgacggcaacccgctgttcgtgatctcgcagaagacgcttaccggccacgccaagggtggtgcctgcatcttccaggtcaacggtctgacgcagctgttcaagtccggcgtgattccggcgaacgcagcgctcgattgcgtggatccgaagctccagcgcgacgaccacatggtctgggttaggaagcccctgcgcatcggcggtggcgaggacgagttcggtcgcgagaccgctggtcgcccggtcaaggccggtctggccacctcgctcggcttcggacatgtttccggcttcgtggccctggttcatccgggtgccttcgaagcggccgtggccaaggccgatggcgaggccgcgctggaagcctggcgtgagcgtgccaacgcccgcctggccgccggccagcgtcacctcgaggaaggcatgatgggtcgcgccgcgctctacgagccgatcgacaaccgtcgcttccgcgaggatcaccgtggctacgaccaccacgaggtcgaaaaggcgatgctcctcaacccggacgtccgcctcggtgccgacggctactacgaggcctgattcctctggctcccctcggttgatgggagccagtagcgcaccggatctcggctcccctctttgaggggagctcccgcgaagcgggtgaggggagtttcccctggagctttctcgctggcacaaactcagtgagagaaatatgcagaacatacgaaagcccctccctcggagtgagctttctgcgtttcaaggggctgatttggcattcgccggaggtctacttccgtttcaaggggctgttgcccaagtagacaaggcgtaaaaacggcggaatggcgttggcgttatgctgcggatactcgtggtatggaggatgaccagccccttgaaacggaagtagacctccggaacggtcaaaatccgcccctcgaaacggagatagacctccggggcggggcgcggatgtttttttggacggctaggcggccagcccaagatgtttgcggtgttgcgcgaggtcatccagcctagtgaatcttttcccccgaaatggaaatcaggccccaattctgatgaggtgtagagattacgcgcgaagcggtacacaataggaagcatgaatacttgtggtttggggcatgacgtggtggatgtggccgcattcgccgaacagttggcggagccggggtctcgcatgcgtgctctgttctccgtgcgtgaggtgcggcaggcatccgaccgcgcgcgccagaagaatgacggggaggccgtgcatctggccgccaagtgggcaggcaaggaggcgttcctcaaagcgtggtgcgattatcttggcaatgccccctatccgttcacgcttgataatttcccgtggcctgaaatcgagatcttggatgattcccgtggtgtgccgcatgtgtctctgggtaagggggcggcgtcagtcttccaaactgattacgcgaattcggctgccggcgctcgctattcctctgcttattcccctgcttccgataacgggccttatgcagtgatgcaggagcggcggaatgcgcgttcggcgcagcgctcggctctcggtgcggggtcgatgccgcatatccatatttccctgagccacgatggtccgattgcctccgcggtggtgacgatttctgtggaatagcgcccgaggcccccgagtgctacatgctgtacaacgtctccatcatggttaacctgtggagcgcgctcaccggccgcgacgtgcgcctgctcaagaaccagatcgacaagctcgactcgctgcccgaaaactgctggttcgtgattctgaatgcgatgggcgccgacctccaaccatacgagtcccagctcatccatttgtgatttcgacggtttccagctcccctctctgaagggagctgtcgccgtaggcggctgaggggagtcctcggcaaagccacaatccatcaactagattggctggtcctgctgcagccacacgcgtttgccatccccgaagaaatatgtataataactcaagtcgccaaaagcgacgcttaacgcggatgtagctcaatggtagagcctcagtcttccaaactgattacgcgggttcgattcccgtcatccgctccactatttatatgttggtgtatctaattgggaataccggaagggtgagctaccccgagtagtattagtactcatggtgttgagaatcgacgaagctgaactgcgtgccaagctctttgagcacaaagagcagattggtttcgggccgattgccaatggggtcgtcatcatcatcgaaggattgttttacattcctgctgctctcacatctggactcgaccaaatgtttcaaggattgctccttgcattgagcattatcttcatattctatggagtatggagtttgattactgcttgcagaaataagtatgatgccataacactgtatgaggatatcgccaacatggatagaaccgaacgaagaagctcgatcattgcggtgaaagatgctaaccgatatcttctgtatcgtgatttaggttggggatgcgactttttccctaatcatgcaaccgcaagcagtactgatgaggatgttcgtcagctgacgacgtattttgccgatgaattcgaaattcctgctaaagactttactctgtctcacatttgtgtgaaggattctgagaagccatccacggagcatgatggagagattcgttattacgaatacacgctataccgcgctagcgtaacggtaatgcctgacgcctggcgttccactgagttccatgttggtgccaaggactgccgctggatgactcttgatgagatgcttgccgaccccggcatcaacaaa

SEQ ID NO: 3921 - DNA, 11972 bp, Unknown
  R22_24m  MAG No. k141_16826
accccactcgcatttgaaatcatcaccttcgtggtgctcgcgctgttcttcatcgtcgacctgttcgtcatcgggcgccgaccgcatgtgccctccaccaaggaatgcgtgcagcatatcgccttcttcgtggttatggcgttgatcttcggcggatgcatctggttcttcgccggctccaggcccgccatcgagttctattccggctggctcaccgaatactcgttgtccatcgacaatctgttcgtgttcgtcattatcatgtcgaacttcgcggtgcccaagcagattcagaagtatgtgctgtccatcggcatcaccattgctttgattttccgtggcattttcattctgatcggcgcggccctgatcgcccgcttcacgtgggtgttcttcctgttcggtgccttcctgatctacaccgccgtcaaactggtgctcggcggcgatgaggacgaggaatatcacgaaaacggcatcatccgtaatctgcgcaagatcatcaagatcaccgacgactatgacggcgagaagctgcgcaccaccaagaacggcgtgcgttactggaccccgatgctcatcgtgttcctgaccatcggcaccaccgacgtcatgtttgccttcgactcgattcccgcgatcttcggcctgaccaaggatccgttcctggtgttcacctccaacgtgttcgccctgctcggcctgcagcagctgtacttcctgctgggtgctctgctcgacaagctcgtctacctgcctgccggcctgtccgtggtgctgggcttcatcggcgtcaagctcatcatggaggccctgcacggcaataccttgccgttcatcaacggcggcgaaggcatccattgggtgccggaagtgcccacatggctgtcgctggctgtgattgtggtcgcaattggcggcgcatccgtggcttccgtgatcaagatgaagagcatggaaagcgctgaaaaggcctgaaaccgttagagaatacaacccttaaacctagtcaacacaacaatgtgagcgctcacaacacaccgtgaagaaaacttgtcatgagtcggctcgcgctagtagactgggtttcggcaaatggggcaatcgtgcctcgaaccaaattgaacaagaataggcaggcattcatgcgtaaagccaagatcgtagacaccatcggtccttccaccgaggattacgacaacctcctgaagctcgttgaagccggtatggacgttgctcgtctgaaccgctcccacggcacccccgaggatcacctcaaggtctacaacaacgtgcgcaaggccagcgaagccactggtcgcaacgttgccgcgcttgttgatttgcagggcccgaagattcgctgcggttggttcaagaagaacgccgatggcgaagacaaggttcagctgcagctcggccaggaattcgtcatcaccactgatgacgtcgagggcgacgagcacatcacctccaccaccttcaagggcctgccgggcgattgccacccgggcgacccgatcctgatcgatgacggtaaggttcgtcttgaggtcaccaaggtcgagggcaacaacgtgtacaccaaggtcgtcgtggccggtcctgtgtcctcccacaagggcatcaacctgccgggcgtcgccgtctccctgccggctctgaccgagaaggatgaggctgacctgcgttgggccatccgcaccggtgccgacatcatcgccatgtccttcgtgcgtttcgccaccgacatcgaccgcgcccacgagatcatggacgaggaaggccgtcgcatcccgatcgttgccaagatcgagaagccgcaggctctggagaacctcgaagagatcgtcaagaccttcgacggtgtcatggccgcccgtggcgacatggccgttgagtgcccgctggaagaggtcccgctggccaccaagcgcatcatcgagctggcccgccagtatgccaagccggtcatcgtggccaccgaagtcctcggctccatggtgaactccccggtcccgacccgtgcagaggcctccgactgcgccaacgccgtcctcgacggctccgacgccaccatgacctccaacgagaccgccgtcggcaagtacccggatgtgaccgtggccaccatgtcgcgcatctccggctacgccaccgaccacggcttcgaccgcatcccggagctcaagaacctcgacatgtcctccaccggcgccgtctcctccgccgccgtggacctggccgacaagctcaacgccaaggccatcgtcgcctacacccagaccggcgccaccgtgcaccgcgtctcccgtgagcgtccggccgccccgatctacggcctgaccagcaacgagcacacctaccactggctggctctgtcctggggcaccgaagccttcctgctcaaggaggactaccacgacaagtcccgtaaggatctcatgatctacacggacaagatcctcaaggacgccggcaaggttgctgacggcgacaagatcgtcatcctgagctctgctcagggcgatcaccagccgggccgcaccgactccatctacgtgcacaccgttggcgcttgcgactgatttcaggccgctggtagctgctgacagctagcacatagcacgcgaaagccccccatccagaaagtggatggggggctttcgttatccgttatgttgcgattgtgcggtgattgcaatggcacgtagtcaccgcgatgatcgagcgtggtgactagtcgttgagatgatcgagcgtgccgctcttcagacgcagaatggcgaccatggtcttggcatccacaatcgtgccattgaccaccatctcataggcatcgtccaccgacaccatacgcacgtcggaacgcggagtctccgggccgatttcctgacgggaagccggggtaagtccggtggcgaagaagattgcggtgtgctgggtggaatagctcggcgtgttcataaaacgggtgaactgtgtaagcttggaggcatcgaaaccagcctcttcggccagcttgcgcttagccacatcggtcgggcgttcggacgggttgttggcgtggcctgccggaatctccaacgtccaacgatggttggcgatgcgatactgctcgaccagcggaatcatgccgtcatcggtgacggccagcacagccacagtgtcgccattgttctcctgaacaaagtagcgttcaaacgaaccgatctgattcgactcataggagacgtgatcgacattgaaataatgcgtctccacaatctgtctacgggaaatctccttgaccggagaggggcgccagggatcgaactgacggtaagtttcgttgctcataagccctcctaacaaaagcgatacatcgaaactacagcccattgtaagcggtgaaaccacgcagaagaacgggcaacacacgggtacgccgtccacgatatcgacgtgtttcgcctgttttaccggggggaatggaggactggcgcgtgtcttgtgtcgcaggagtcgaatcggtatgctactctcttcagagtgcttaggcacgccctcgtatcccaattggtagaggaagcagcctcaaaatctgcgcagtgtgggttcgagtcccaccgagggcactttagctaggagttcgctgaaattattacgaaccccattgttgggtaattcaagaaagaggttggcatggctgcaaggaagaagtccgaagaaccgagtatcaacgtcgatgaggtgctgaccgacgaagaactcaaggccgtagccgatgaaagcgaacctgctgagcgcaaggccgtggccgaggatggtccgcgtaccgtcgtcgtggccgaggatgaagccgtgaaccgcatggatctggtcgccatgctggaagacaacggttatgaggtcgttggtcaggccgccaacggcgaggaagccgtggaactgacccgcaagtatcgccctgatgtggtgtgcatggatgtcaagatgccgcgtatggacggcatcgccgctgccggcattatctgcgatgagaacatcgcccctgtcgtcatgctcaccgcattctcccagaccgatctggtgaagaaggccaccggtgccggcgccatggcatacgtcaccaagccgtacgaggaatccaagttgctgccgaccctcgaggtggccatgggccgtttcgccgagatcaacgatctgctggacaacgtggagcgcagcgaacgcaagctcaaggaaaccaccgaccagctcaaggaaaccgaagagaagctcaagaaggccgaagacacgcttgaggagcgcaagctcgtcgaccgcgccaagggtctgctgatggacaaggctgacttctccgagcagggtgccttccgttggattcagaagacctccatggaccagcgcatccccaagaagcgcctggctcaggccatcatcgccaagtatggcgatccgaagccttctgattcgggcgaacgctgattatcggcatcaccgtgctgagtcgtaaagcaacacaaacacactatgggagaggccagcgtgaccgtacccaccaatgaaacattgctggtggtggacggccactcgctggccttccgtgcatttttcgccctgccggtcgacaacttcagtacttccagcggccaggccaccaacgccgtctggggttttgccaccatgctcgcgcaggtgatcgatgcggagaaccccgaccatctgggcgtcgccttcgatgtgaagggcggcacattccgcaatgagatgcttccgcaatacaaaggcacccgtgaggcggctcccgaagagctgctcacccagctgccattgattcaacgcatgctcacggccctcggcgtcacctacatcgagaagccgggattcgaaggcgacgacgtgatcgccaccctcgccaccatgggagacaaggccggctaccacacactggtattgtccggagaccgagacgccttccagctggtggatgacaacgtcaccgtgttgtacccgggtcatcacttcaaagacctgaagcatatgacgccgcagtccatcatcgacaaatacaaagtcactcccgcacaatatccggatctggcggcgctccgcggcgaaaccgccgacaatattcccggtgtgcccggtgtaggcgatggctttgcggccaagtggatcaaccaattcggttccctcgacggcatttgcgagcacgccgatgaaatcggcggcaaaaaaggcgaatcactgcgggccaatatcgaccaggtcaagctcaatcgcaaagtcaacgcactggtacgagatgtcgatcttggcgtcgatattgaggatctgacattcggcaccgtggacgtggcacaaatcgacgccctgttcaaggaacttgaattcggaccgcgtaccaggagtcgcgtgctgaaaaccttcaataccggtgccaaggtttccaacacatacggagccggcgagtctacgaataatgaacaggacgagcaggataacagtctcgatctgaacctgccggaacccacgagcatcacctcttcggagcagttcgacgaatgggtcaaggcccatcgcgtcgagatcaatgttcccggtgaaatcgccgatttcacggtttccgactatggcgatggatcgcagcggcataccgtctgcggcgacgcggtcggccgcgcttggaccgtggccgcatggggcgacgaaaggccggggcgtgccacggcacaaaccattgccgtggccacggcaacatcagcggccatagtgccccttccaatcaccgataccctgcgagcacagcttgcgcggttcctgaaaagcgaacactcccgcaccatcgtgcatgggtataaagaattgctgcatcttttgggcgcggtcgatcttgacatggacctgccgatgttcgacaccaagcttgccgggtatctgacccaaccggatttccacgccgatagcctcaagcaggcggccgagcacttcctcgacatccacttcaccgaaaccgaacagccttcgcaaggcacgttggacttcgatgacgatcaggtcgaagaagatccgaacgaacatcgtctgcgcgatttggccattatccgcagcctcgccgtcacgctcgggccgattatcgacgagcgtgaacaatgctggctgatgcgcgcgattgaacttcctgtttcccgcgtgctgcacggcatggagcacacaggagccaaagtcgatagcgttcgactcgtttccatgcgtgaccagtttgccgccgaggctcgtcaggcgcaggaaatggcttgggagtatgccggcaccgaaatcaacctgcaaagtcccaagcagttgcagaaggtgctgttcgaagatatgggtttgaagcccaccaaacgcaccaagtccggctcatacaccacgaatgcggccgcattgcaggatctgtatgtcaaatcagtggacaatgagcgggccaacggtttcctcggggcgttgctgcgccaccgagagatcaacaagctcaagcagatcgtccaaacgctgatcgatgccaccaatacatcagatgagcgcatccacaccactttcgagcaaaccgtcgcggccaccggccgattgagctccgtggacccgaacctgcagaacatccccaatcggaacgccgccggccgtgagattcgcggcgtgttcgtgccgggggaggggtacgaggccctgatgagctgcgattactcacaggtcgagctgcgcatcatggccgatctgtccggtgatgaggcgctgatcgaagcgttccgctccggagccgacttccacaaatacgtggcctcgatggtctacaagctgccggtcgaccagatcaccggcgaccagcgcagccacgtaaaagccatgagctacggattggcctatggtctgagcacgtatggtctcgcccagcagctcaagatcgcgccacgtgaagcggaagcgttgaaaaaccggtatttcgataccttcggcaaggtgcacgattaccttgaatcgctggtggccaatgcccgagagaaggggtatacggaaaccattttcggacggcgtcgctacttcccggccctgcattcgaccaatcgtgttgcgcgtgaggccgccgaacgtgcggcactcaacgcaccgattcagggatctgccgccgacatcatgaagatcgcgatgattcgcgccgagcagaccttggcagaggcccacgtcaagagccgtatcattctgcagattcacgatgaactggtagtggaaatcgcgccgggagaaggcgaccaggtcaccgaactggtacgcaacgccatggaacacgccgtcgaccttgccgtgccgctggacgtatcgtgcggcatcggttccgactggcagctcgccgcacactgacaatttctagctcccctcgggtgaggggtgctgagccgttgagcaaacagtccagtggattgtttgtaggcgaagacgagccgatagtcgagcaatgaagagcacgagcatggcttgtccgcaattgcagaatgagtcccttgccgcaatagcccactacaatgggacatatgccgaatctcaagcaagtcatcgacgttctcgagaccctgtacccattgcgctacgccgaggaatgggatgagccgggtctcatcgtcggcgatctgagccacgacgtgcaccgcatcgtgttcgccgccgacccgacctccgccatcattgacaaggccatcgccaccggcgcggacctgctcatcacccatcacccgttgttcttccgttccgtacacgagacgagcggactcggtttccggggcgacatcgtccgcaggctctaccagcacggctgcgggctgtgggtagggcacaccaatgctgacgctgcgtatcgcggcgtggggcaggcggcggccgactacttcggactcatcgaccagaaaccactcgtgccgattgacgatgccaacgcctctcatccggtcggcttggggcgtgtgggtcgtttgccgaagcctgttgccctgaaggatttcgctcagtgtgtattcgacgaagtgtccgatcatggcatgaccaccgcgctcggcatccaggtatgcggcgattcggacacttttgttcagtatgtggccattctgcctggctccggtgactccctgttcaacgaggtgcgtgccaccggtgcggacgtgtacgtaaccagcgatttgcgtcaccacccggtgaccgacgccatcgaacaagcccggtatgaagcccgtatgagggcccaaggcatcatgctcggccgtggaatggcgggggagagccatgtgcgtccctgcttcatcaacacccctcatgccgccatcgaatccatgtggttcaactacgcgatcgatgacgtgccagccgccatcgaacaagcgaccggagcaaggcctgaagtcgagtggttccacgacacgaccgatccatggacgctgtccattaccgcgcatcgggattaaggcgctatagtgacgtggcgaaaacgttttttccgaggagatgacatgtttgggggaagcaagcaggaacaactggagcatcggctcgaccataagctgaacgcctcctcggacggcatcgacatggacgtgcccgccaaagtgatcagtagcgaaaccgtttataccgggcgcatcttccacgtggacgacatgcgcatcgctctgaccgacaagcagggcaaggaacacgagatcggccgccaggtgctgcgtcacgccccctgtgtggtcatgctcgtgcacgacatgtccaccgaccgttacctcatcgaacgcgaataccgtgccggatcggacatgttcgcctacgggcttcccgccggtctcatggacgagggcgaggacatcatggacgcggccctgagggaactggccgaggaaaccggcgtggtgccggaccgtgacaccatgggtgttgacttcgtgggcgatttctactcgtccgaaggcatgaccgacgaactggcccacatcatggtgttgcatttgggcccgttcagacgggagcagcgccatttcgacgcggacgagcacgtggaatccgcgtggattccgtggagcgaccttgccgccacgcgcatcacctcatccaattcgatgatcgccatccagcatgaggcgttacgcagactcatcgccaggaactccgacaaagacaagccgtcgctgttctcctgacgttcaactccccggcacatcagtgacacaagaaagtgggatactgaaaactatgcagatcagacctggatcaatgtatccgctgggcgccagctatgacggcgccggtgtgaacttcgcgctgtactcacaggttgcgcagaaagtcgagctatgcctgttcgacgagcacgatgcggaaacgcgcatcgaaatgaccgaacagaactcatacgtatggcataactacatccccggcctccagcccggccaacgctacggctaccgcgtctacggtccctatgacccgatgcacggcctcagatgcaaccccaacaaactgctgctcgacccgtatgccaaggccatcgaaggcaacatcgacggcgacgaaagcctgttctcctactggttcaaaagcccggacgacacctcggcgatgaacgaccttgactcggccgcccacaccatgaagtcggccgtcatcaatccgtatttcgactggggcaacgaccagcacccctacatctcgtaccacgattcggtgatctacgaggcgcatgtgcgcggcatgaccaacctcaacatggacgtgccgccggacatccgcggcacctacgccggcctggcctatccgagcgtcatcgaatacctgaagaagctcggcgtcaccgccatcgaactcatgccgatccaccagttcgtcaacgactccttcctgcaggagaagggcctgtcgaactactggggctacaacaccatcggcttcttcgcgccgcacaacgcctactcctcctccggagagcgcggcgagcaggtcaacgaattcaagtccatggtcaaggcctaccatcacgccggcatggaggtcatcctcgacgtggtgtacaaccacaccgccgaaggcaaccatatgggccccaccctgagcttcaagggcatcgacaacgcctcctactaccgactggtggaaggcgaccagcagcactacttcgacaccaccggtaccggcaactcgctgcttatgcgctcgccgcacgcgctgcagttgattaccgattcgctgcgctactgggttaccgaaatgcacgtcgacggcttccgcttcgatctggccgccacgctggcacgccagttccaggaggtcgacaagctgtccgcgttcttcgacatcgtggagcaggacccgatcatctcgcgcgtgaagctgattgccgaaccgtgggatctgggctccggcggctatcaggtgggcggcttcccgtccagctggtccgaatggaatggccgctaccgcgacaccgtgcgcgacttctggcgctcgcagccctccacgctgcccgaattcgcctcgcgcctgatgggcagttccgatctgtatcaggtcaacggccgtcgaccggtggcgtccgtgaacttcatcaccgcgcatgacggtttcacaatgaacgacctggtcagctacaacgaaaagcacaacgaagccaatggcgagggcaatcgcgacggcgagagcaacaatcgctcttggaattgcggcgttgaaggcccgaccaatattccggacgtcaacgacttgcgtcagcgtcagatgcgcaacatgttcgccacgttgctgttcagccagggtatcccgatgatttgcggtggcgacgaagtggcccgcacccagcagggcaacaacaacgcctactgtcaggacaacgagatctcctggaccaactggcatcttgacaagggacgcaaggaactgctcgccttcgtttccaaactcattcatctgcgtttggatcatccggtgttgcaccgccgtcgcttcttcacaggccgtgagcccggcgacgattcgaacatgattccgcaggtcgaatggttcgaccacaccggttcgatcatggatatggacgactggcagaacacgcatgcgttctccatgatgatctatctgaacggttcggatattccggaggtagactggtacggcaaccggatggtcgacaatgacttcatcctgatcttcaacgcgcattacgagccgattatgttcaccctgccggatgagcgatacggccgcaaatggcagctggtcgtggatacgcacaacccgaatgggccggaactgagctatgaggcgggcttcatgatcaccgcccagtcccgcagcttcctcatgctcatgagcgacaaaaagcccaagaagcccatgggcctataaccagaccgaatttaagctccctctgacgagggagctcccagtatagccgggtgagggagagaccgcagcaaagccgcgaacccctactcgcgctccttacgctcctccacgagccgagcatccccgaacgcaagtagatgctcgccggcaagcgggcgcggctggtcgagcagctcgcggaaatccaggattccatcgacttcatcgacgccaaacagcgcttctacgacgacgtcctgtctggcgcaaccccatacgtaagcgtgctcatcccatccgcggcgctcgcaaaggagtcagaggaaccgggagaattgaagggggtggagaggaaataggttcgaccgagctgtttcttcctccgggatacaagcgcgaacaacggtttgttgtacccgcgcttggcgaacgggacatgcccttagactggaatcagcaagcgcacagcgagacgcgcgaatcgttttccgatgtcgggaggtagtcatgtcgatcggtcaggttatcaaagtcgtgcgcgaggagcgaggtcttacgcagtcgcagttcgcgcacgagctgttcgtcacccaacaggcgctttc

SEQ ID NO: 3922 - DNA, 15314 bp, Unknown
  R22_24m  MAG No. k141_16972
cggcggatcatgccgttcctgttctcgttgcttccccgccgccggctggagtacgggtcggcgaagcacgtgtccatgcccggctcgtcgcgcaggcgcgtgtggcgggcgaactcggtgccgttgtcgtgcgtgacgccgccgcgcgcgccggccggcagcggcgagaacatcgccagctgcgccccgacgctttccccggcggtcttgccgggcacgatcccggccatgaggaacctggtcttcctctcgacctcggtgtgcgggttgcatccggcgccgatcacgccgtcggcctcccaatggccgaaaccgctgcggtcgccggcctccggcggacgctcggagatgggaacccgtccgggaatcgggaaacgcgacgtcctcccgccgccacgcctgcgacgcctcccgtggccacgtggaagacgacgcgcccagcgttcacggcgacggcggtcggcgtggatccaacggtagacggtctccgggcacacgcgcatggcggagtcgtcggggaacaggacgcgcagcctgccgctgacgggcagcggcgaccagccgcgacccagccattcggccacccgcgcccacaggcgttcgcatgacaggcggtagcgcttgcgcggtttggcgcgcctgcggccggccttgcgccgccgcggggccggcgatgtatccgcccgtccacgggcccgtcttcagccgtttcggccggtacggccggcaggactcgttctcgttggacgggaaccacgtgtcgcgtttgatctccctgccgaccgtcgaggcgttgcggccgagcatcagaccgatcctgcggatgatggtgccgttgccgatctcgatccggatgacctggcgttcctcttccgacaggtgcgaacatgcttccccccataggtgcaacatcccttcggactggttatccggacaatctccaatccaacgggtgttgcactttcaattagacaacggggcgcctgacatttcaccaagggcggcttataatggtggaatcagcatatagagattggggttacaggagggtgattgtggaaaacaaaggttggagaattttccaaatcattcaattcatattgttcttatgcattagtgtattccttttcataagaacagtggacgggcatggaactgtacagacactaggagtaaagctaattagtttttccgtatgggcgcttttctaccttggtatcttagccatagagtggttgatttactgtattgtccgacatgctaaaaaataaattgatatacgaatttgctgaactaatagaattcctttagtctctaaggggataacgaccgaattcttgcgcatttttggattccggccttgatggaaaaggacatgggccgtaccgggtacgattttcagtcgccagacaatgaaaaaccgcgattggaaagaggcatggagccatgtccaaggaaatcatacagttcgaccaggccatgttcgagagcaagctcgacgccatggtgcgcgagaaggtcgagcggatcgtcaacgcgatgcccgacgcttcaggcgaacgagatcgccaacgccgcgagatacgagcgttccggctgatggtggccgaccggtggggtgggaatcagttgagattattcttgggtgcctgtgggtgcctcgtggagaaacgagggtaatcggtaggtttcccaaaaatcgaaagccttggaacaaagccaaaaacagttggctaggattatcatgcgaggtgcgcatgatgatggtagccatggttccaagtgtctcatgggcttgagaccggcgatggtgcgattgcgggaatggcgcggagagccgtggactggccgcggccgatagccgggaagccgagccgcagcgtgaagcgtcatacgagttgtctcgcgatggccaacgcgccggcaacgaccatgagcgccgagaagacacgcagaagagtccttttgcgttctcttcccagttttttggatccaatcacgacgtatatcaggaccaatccgacggccagcggcaccaaggccagcggaaacagcggtttttccatggcatctcatctcgaatgctgtggttcagatttttcgatgttcggtttttctgcgcttactgacaagagccatggagcagcatgccgatacgcacagattcactatgcaggtcgccgccggcagtagccgtatgaacggctgactgtagaaatcgaggacatccggatccatagatcctgagtatatttcaaaaaccggatatgatgcgagagccggcgccgaactcacgaggaacagtatccaaatgacgggcaatctcaggatggatactgttcggcctttccgatggacttctttcgagaacatgaaaagagcccaagaggtcactgcgattaatgcacccgcgcaatacaacagaccagagaactcgctacgcatgattccgtcctcacttcagtcgcaggtaatttggcttatcgatcttctggctggttcgagattaccatacctgacatggcagtcgaattgcccgttgtctattggcagagcatccgactgttaatcggacggtcgctggttcaagcccagccgcaggagccagacaaaaacccggaacttcggttccgggtttttgttacccgcccctcgaaactcctttatcaaggaatcatccataagggatgccgcagcagacggtctccaaggcgtactacaccgtgctcatccccatggacgacggcaactggcacgtcaccgtgtactgtcccgcctcgctggacggcccactgctcgacaaggattccaacgaattcgacacggacgacgtgaaacccggcgacaagtcgtacaccgttgccaatccattccacctggatcacgcacccggaacagacggtttcatcttcggccctgacaccctccgacgatagcgatggactaaccattcaaccgcacgcgtaggaggagcgcattccaaccatgaatgaatgacatatagacgtcaagggcttgcgggcatcgtgcccgcaagcccttgacgtctcaatccaacgaaatatcgacttttacccgtttgtcggattcaggctttcgcgcaagtccggcgatgaggagggccaccagcagggggatcgtcgtcagtgtaccccaggaaatcgagaacgtgtcggcgatgtagccgcacagcggggtgacgaccgcggtgaaggccatcaatacgagcgatcccacggagaacgcggtcgcgcggatcgaatcgtcaatgctctcgtgcaagctgctggagatcgtgttcgccacgtacatctgcgcgcaggagaacacgaagaacgccaggatcctcaccgccggcatcggcgtggccgcaagcaccaccgccgacacgatgagcacgaggatcgcaatgtcgccggaacgtggatgcagccgcagcatacccagacgactgccgacgatctgcgcgatattagtgaacactaggccggcgaactgccaccagaccccggtctggtggcccatcagcagcagctgccagaacgtcagcaccgacaacgtacccagattgaacaccaccatattccatatctccggcttccgcagcagcacggccgcggccgccacggtctgcctgacatgatccaacaccgtcagcgaggtcccggactcgcccggctcggcggatccatcggattcgacggacgcctcggcctgccgttccgtcgtcccgctcccatccgtcgctgcggccttggtgcgcgacccggccctcatcagaccgagaagcgggatgatcgccaatacgtagaacaccgtcgcgcccagccagatcagctgggagtcaagcaggaacagcacggcaccgaccgcaccgccgcatatcgtgcacacagcgatcatcgccgacagtcttgacaccaaggtcttcatacccagcgagggatcgtgcttgctggcgtattcgatgtacagcgaggacgccgcgccgctttcgaccgcggccccgatgccggccagcacgttggccaggcacagcacggcgaagttcgtggaccagaacagcatcaatatgaatcctgcgacgcggcacaacacgccgatgatcagcgtccgttcccgggaccaccggtcgaacagcacggacgtgggcagctcgctggccgattcgctgacgtcgaacaccacattgacgatggagatcagcagcaccgacaggcccacatcatgataggccaccatatagtagaccgaaaaacatccggcaccaagataaataagcgcattatacaaacaggcaaaccgaaccatcaatcattcccttacataaacaaagaaccggtatacgtgggactgtctctcgaagtgtgtaactggccttaactggccggtcgtgtggccggtcggaaaggctggtggacgatgtgtgctgggacaatgggaaacatgacaccgacgaagaagccggacgcggaaaaacgcaacgccgagcgggaggcggcgctcacattcgtgcgcatggccaaggaaaaaggactggacctgacagggcccgacggactgctcaaacagttcaccaaaagcgtgctggagacggccctggacgaggagatgaccgagcacctgggccgcgccaagcacaagaaatccaaggacggcagggccgcgaacacgcgcaacggcaccaccgccaagaccgtggtcaccgattcggtaggtccggtcgggatcgaggtgccgcgagaccgcgatggctcgttcgagccggtcgtcgtcaggaaacggcagcggcggctgcccggggtgggcgaggtggtgctgtccctgtatgccaggggcctgaccaccggcgagatcagcgcccacttccaggagatctacggggcggacgtgtccagggagaccgtcagtcgcatcaccgagcgggtcgtggccgagaaggacgaatggtgctcgcgtcccctggatcgtgtgtacgcggccgtgttcatcgacgcgaccgtcgtcaaggtgcgcgacgggcaggtcgccaaccgcgcgttctacgtggccgttggcgtggatctggagggcgaccgcgacgtgctgggcatctggacgtcgcccgccgccgcggcggcggcccgcgacgcgatgctggacaagtgggaggcgagatatcccgcgatccgcaggctgtgggtggacgcgtgggaacggttcataccgttcctggactatgacgtggagatccggcgcgtgatctgcacgaccaacgccatcgaatcgctcaacgcgagattcaagcgctccattcgcgcccgcggccacttccccgacgagcaggccgcgctcaagtgcatgtacctgaccgtccgctcgctggaccccaccggcaagggacggatacgatggagcgcgcgccggaagcccgcgctcaacgcctttgccatcaccttcgccgaccgctggccaagcgagggaacacaacaatgaaaacgccagttacacacttaacgagacaggcccgcgtctgggccggtggccggcgatccgctggtgccgctggtgccggtgctggttgaagtcgattccgacggatctttttgcgtcgagccggtgccggtgccgttcgaaccggtctggctgccgccgacgccttggctggtcgggtcttcggtggtcggattctttgaggtgccggtgccgttcgaaccgttggcggtgccgtcggttttcgaatccgaggcgccggcgccggtcgaacccgaggtgccgttggcgtcgaggtcggtggagggggcgtcggttttcgaatccttgccggttcccttcgaatcatcgccggtgcccgtctggggcagagcgttgttctgatcgggggtgcccgttcgcgtgccggtgtcgttgcgcgcgggcgtggtcgtggtgggggatacgagattgtccgtgccgcgtccctgcgtggccagcatcacgacgccggccgtcaccgccacggcgagcaggccggacaccaaggtgacgatcatggcggtgtgcttcgaagcgcggaagcgggacttgcgcagctcatcgaccgagtacgtcctgccgttcgcccgactgaacacgatttcacgcggtctgcgtgtggaggaagcatcatcggcggtcacgcccgtcgccgtatcgggctcgtcccgaacgtcggtccggctgccggccgttcggggggtgccgccatcggcatcgccgttctcggcgtccttcgtgatcccgttgccggaggacgaggccgattggagtttttcgccggaggcggtgagcacgttctggtagatcttggtggccacggcggagacgacgtaactggccgccgctccgatcactgaaccgccgatgccgatcttcgatgcgagcaggaacgaggtgacggcggcaagggtgcccgccacgatggatgagagggagattccttcaaaaaacttcttcacaatgcacgaccgtagggtgtcgggctgacaggttgcctgagactcgatggaagcggggcgaggcctacacgagaccttcaaaatcggccttcgtgcaggtccgacacgccctgcagcgcacacacgtgcgtttcgcgtcgccgcaggccgcgggacatcgtcaattacgatgcagcgactgcccggtcggtctgatcaccgacatcagtacggcggcgaaaatcaaagcgaaacccaccagtgagctccacatgatcctctcgccccagaacaaagcggaaaacgtgacggcgaacagactttccgtacacatgatgattgacgcctgcgaggcaggcacgtgagccagaccgatgttctgcatgatctgggcactcatcgtggcgccgaggaacagatagagcacgctggccactactgagggtgccagccagctggcgttcggcatgggttcggtgaacaacgcgccgatgatgaacaatacgccggcaacgccgaactgcacaaaagtgacggcgatagggtcgaagcgtttggtgtagacaccaaggcaggtcagattgaacgagaagatgacggcggttgcgatggtcagccagtcgccggcgcccagcgacaacgaaccgcccggcttcaacgagacgaagccgacgccgatcagacagatcacgccggcgaccagattgatggccttcgggcgggttttcgaaatgatccacgtggcgaacggggtgagtacgcagtaggcggccgtcaggaacgcgctgcggcccggttcaatggtctgcaggccgatggtctgggtgaccatcgtgccccagtaggtcagacccaccacgagcgccggcacaatgatcttcggcgtcagatacggcacgatgtgcttatggaacaaggccagcatgcacaggcaggcgcctatcatgcgcagacccatcagccattggggcggaatcgcctccatggcgaatttggcgagcagataactgccaccccataatgcggcgcagcccagcaacatgagtcgggcgagattcgggggaaagctgcgggaccagcggctgcgcagcttgctgaaacgttcgaccaaacccatggtgcacctcaggacagttaggaaaacttgtggctctctcggctcacagattacgggaactaccggccaaaatcgaccggtcgatgggcgtcgggtgtgtgacaggtgtgtggctggtgcgcggccggggcgcggcatcgccaaacaggtaagaaccggatgaaagctgtgcgaaggtgaggttactcacagcgaacatccgggctagtcgcgctcgaaaccggtactctggaaagagtaaaaatacgttgtccatagcaatcatgaaaggattcgacatggcagtcattactccggaaatcaaggaattcatcaagaacaacctcggttggatcaccaccgtctccaaggacggcgaactggacctcggcccgaagatgtccctgttcgtgctggacgacacgcacatcgcctaccacgagcgcaccgccggccagcactacgagaacctcaagaacggctctccgctggtcatcgccttcgccaacctcgagaagaagcagggctaccgcttccgcggcaacgtggtgctgcacgttgacgacgacatctacaacgagcaggtcaagatcgccgaggaaaagggcaccaagaagccggccgtgattccggttctcgaagtcaccgagatccagaaccttgcctccggtccgaccgccggcaagaccatcgccaaggactgattagctgacgtattggtggcttcctcgtcagagggagccactttttcgcttttcagtgcgcagtactaggtgatggcctttgaggtcggtggtggcgaagaggtaggtgttgccgccgtccttgagtttgagttttttgcgcagctgggccacggatagggggaaattgcgtacggcgatgttggcgtgcgtgagaccggccaatagctgcttcagttctttcttgttcatggtgacgatggattcgatgacgaatgatctgcctgggaaatcggcaataggttcggccgccacgaacaggtggctattcgggctgatgtgatgcacgacgaagcgctgttcgagaacatcaaagcacccggccttcatgattgaggcgttgggttcgtaaaggtacttccaatgcgaggaatcgaagccgttcgcgctttcctcagccgggaaatcctcggtattacaggtattgcgtgcaaccaaggcagaatcgctgataggggtgtgattgtcgctgttatcgccggccttgtacgacagcacctgcccgtcattgacgcataccacgagcggtgaggcgcaacggccgcgccccaacaccaacaacaattccttgcattcattcccggtggagacgatatgcacctcatgcaccgcgccggcgaaatcggcgacggtcttatgccagtcgagcatgggggagagcttgaccatgaccgtcggtgccttggccagcagcgtatccttcagggtcagcacatccggcgtgcaatcggcaatcgcgtaggtacgcgagccatgatcgtcacggcgggccggatcgaggaagatcatggagactcggccaagcgtatcaagcactgctgttgaatcatcattgatgacttcggcgtggccaaggccgagtatcgggaaattatggcgagcgataccacataaaatggattgttgttccacatatatggcatggtcaaacactcgggacatgtaagaaaagtcgacgccgaaaccgccggtcagatcgactagggatgtcggggaatcgtcggcgtcgtcgactgcttccccgtccaacaatcgctgtgctaaccgggctttgtattgagccgtgaactggctggaacattgttccattgggacttgcggcgggaaaatcagcccatcatgggacgcccagtcaggtagcttgagcgaagcgcgctgccagccggcaatttgctccagcgcgaacggcacatccacgtcgccatcatgtttggcgtgcaaggccacatcacgcacatcttcacggcggtgtttggcgatgaacgcccaggtcgactcagaaatctccatgccgccattctaggggttgtgctgagatgagtatggcaaaccgcaagagaacgaggtggcgaaaaccgatgatcgatgaagtgatgatgctgcgtcatggccgtacgcaatacaatctcgaacatcgcttgcaaggccagatcgatgtgccgctcgacatcgtaggccaatggcaggtcgaccagaccggattcgcgctcgcttcacggtactactgggccaaggtgaaccggcttgccgagcatcccgaagccatcgcccagcccggtcctgacgccgccgaacgcactgatacgcgacagttcgaggaggctcctgccgccggccggcgcatggtggtgatgacctccgacctgttccgtgcccaacagaccgcacacgccttcgccgatattttgggattgccggtcacctgtgaccaacgactgcgtgaacgcagcttcggtgagtgggaaggcatgacccgcgccgaaatcaaagccgtggcagccgacgactacgcctcttggaaacagcacaccgggggcgaaaccaagcatggtgtggaaagccgtgccgccgtgggccagcgaggtgccgatgccgtgcgcgcactggtcaccgactccgcctattcagacagcatgcccaccacgctgatgctcgtcacccatggctcatggattaccgccaccatctccaacctgctcgaactcgacccggacggcatgaacgcactcggcggcatgcgcaacgcctgctggtgccggctcaaagtgcgccacagcgtcaacggcatccccgccgaacagcccctgtgggagttggaggaatacaacaaggctcccgccatcgccgacagcgccgactgggagaacgggccgaccgatctgcgcggaccgcacatgccaagttggcagccaatcgtctggtgacggtcgctatgcgaaaccccgctcgcaaattcgaacggtgggtctaaactaatctcggtttggaaccgtacagcgatagaacagtaggaaagcgcggaaggcgggtgaggcgacatgctgagaatcttcagctcaatcaatggccaagtggagcagatcgagaaaccggaaaacggctcctggttatgtttgagcgaacccactgatgtggagctcgccaccgtcgcatcacagaccggcatcgacctggccgacctgcgcgcccctttggatgacgaggaacgttcacgtgtggacgtcgaagacgattacacgatgatcatcgtcgacatccccaccgtggaggagcgtggcggacgcgactggtacgagaccatcccgctgtcgatcatcgtcaccgaaaacctcatcatcaccgtctgcatgcaggacacgcccgtgctccacccattcatggaaggcacgatccgaggcttcaacaccttcatgcgttcgcgcttcatcctgcagatcctgtaccgcaacgccacgatgtacctgcgttacctgcgcatcatcgaccgcgaaagcgacaagcttgaactgaagctgcgccactccatgcagaaccgcgagatcgtgatgctcatggaactgagcaagaccttggtgtacttcaccacatcgctgaaatcgaacgagatcgtgatggagaaactcaccaccctgcagcgcatcaagcagtatccggacgatgaggatctgctcgacgacgtcatcaccgaaaacaagcaggccatcgagatggccaacatctacagcggcgttcttgcgaacatgaccgacgccttcgcctcgatcgtgtccaacaacctgaacaacgtgatgcgcatcttcaccatcatctccatcaccctgtccatcccgacgctgattttctcgatgtacggcatgaacttcgacggcggcatgatgggcatgccgttcaccgacaagccttggggcttcctgctcatcatcgtgatctccatggtgctttccggtgtggttgcctggttcctcacacgttcgcgcatgttcaagtaaggcgtttgacggttatgcaccactggtcatcgttcgtcagccgtagcatgctccgcgcccgccgcccgatgcggcgcggatttcgctcccggctgatggcaggattcgccgcggcctttggcatgatattgccattgtccggtctggccggttgcggccaaattcaagtcaccaccgtctccggagcgccggaggggcccaccatcgccattggggtcgcagccgacgaaccatcggtgggagcatggcatgacggcacataccagggcttcgacatcaccatcgccaaatacgtggccgccaaactcggctatgcgaacaagcagatcgtcttcaagcaggttcgccccgaaaaccggcgctccatgctggacaatggacaggtcgacatggtcgtcgcctcttggcctatcaccgatgggtccagcgcgatcgttgattttgccggaccatacctcacgaccagcgtcggtttgctggtcaggtcggatgagcgtggccgattcaccaatgacgcaggttcggtgggcgacgtaggcgacggcacggtgtgcgcagtgaaaggtgacgagacagtcggcatcttccgcggcaaccacccgcaggctcggattcaggagcgtagcagttatgcgcagtgcgtcacggccgtgcaagtagggtcggcggatgccatagcctccgatatggcggtgctttccggtcttcaagcggccaacgggccccagtatatggacgtgattgcggacaagggcgaggtcagttatggcatcgccgtgagtcaaggcaccagccaattggcgcagaaaatcgcggaagcattggaagacatggttgaggatggcagctggacggccgccaaggatacgttcacaagccaaacaaagctcacggtttcgctgaacggtgaccccaaagccatcgtctcggatgctgaataacgattgacgacgtgtccagttgcgaggctaccttgctgatttatgagtgacaacgagaagagcacgcaaaccgaagagcccaacttccgctacaacgccgcactggcgcaggacatcgaaaacaagtggcagaagatctgggatgagcaaggcaccttctgggcggccaacgtcaacggcgatttgaaggacggcaagggccgcaacgccgaggggcgcaccgcctacttcgccatggacatgttcccgtacccctccggcaagggtctgcatgtgggccacccgctgggctacctggcctccgacgtgacgagccgctaccaccgcatgaagggcgagaacgtcctgcacgccatgggttacgacgccttcggcctgcctgccgaacagtacgcagtccagaccggccagcatcctcgcgtgaccaccgaggcgaatatcgccaacatgagccgccagctgcaccgcatgggcctgagcttcgacaaccgccgcacgttcgccaccatcgaccccggctacgtgcgttggacccaatggatcttctcgcgcatctacgattcctggtacgacgaggacgccaccaacccgtccggctccaagggctccgcacgcccgatcgccgagctcgtggccaagttcgaatccggcgaaaaggccattccgggccacgagtccgatggcaagcagtggtccgacctcactgacgccgagcagcaggatatcttgaacgacttccgcctggcctacatctccaagtccccggtcaactggtgcccgggtctgggcaccgtgctggccaacgaggaggtcaccgccgaaggcaagtccgagcgtggcaacttcccggtcttccagcgtgagctacgccagtggtccatgcgcatcaccaagtacggccaccgcctcatcgccgacctcgacggcatcaactggcctgagaaggtcaagctcatgcagcgcaactggatcggtgaatcccatggtgcctccgtgcacttcaccgtggccactgccgacggtgacaaggacatggaaatctacaccacccgtcccgtcacgctgttcggcaccacgttcgccgttgtttccccggcacatcacctgctggagaacgtgcccgccgactggccggccgatgtacccgaagactggaagggcggctatgccaacccggtcgaggcggtgaaggcctacaggctcgccgccgaagccaagaccgccaaggaccgcgtggacgagggcggtgagaagacaggtctgttcaccggcctgtacgccaccaacccgatcaccggcgcgaagctcccgctgttcactgccgactacgtgctgatggactacggcaccggtgccattatggccgtgcctggtggcgaccagcgcgattacgactttgccgtgaagttcggtctgccggtcatctacaccgtcaagcctctgccggattccggcgacgacttggccaactacgaaggcaaggcgccgttcgtctcccatgacggcatcgtgatcaactcccacgtcgaatccacgtacgccaagggcgacgcgctgtcgctcgacggcctgcgcgtggacgatgccatcgccaaggtcaacgcctggctcgaatccgccggcgtgggcaagggcaccgtgagctaccgtctgcgcgactggctgttctcccgccagcgctactggggcgagcccttcccgatcgtgtacggcgaagacggcaccccgcacctgctgccggattccgcattgccaatcaacctgcccgacgtgcccgactacgagccgcgcaccttcgatccgatggacgccgagtccaacccggaggcaccgttgagccgcaatgaggactgggtcaaggtcgagcttgacttgggcgacggcaagaagacctactaccgcgacaccaacaccatgccgaactgggccggatcctgctggtactacatgcggtacatcgacccgaccgacgccgaccacatggtggagaaggacgagttcgactactggatgggcccgaaccacaacaagtactcgggtgacgaaggcggcgtggacctgtatatcggcggagtcgaacacgctgtgctccacctgctgtactcccgtttctggcacaaggtgctcttcgacctgggctatgtggattcggccgagccgttccacaagctgttcaaccagggcatgattcaggcttacgcctataccgacgaccgcggccagtacgtgccggccgacgaggtcgtggaagggccggccgacgcctccggcgagccgacgttcacctggaacggcgaacacgccaaccgcgaattcggcaagatgggcaagtccctcaagaacatcgtgaccccggactacatgtacgagaactacggtgccgacaccttccgcctgtacgagatgagcatgggaccgctggacgagtctcgcccgtggaacacccgcaacgtggtcggcggcatgcgcttcctgcagcgtctgtggcgcaacgtggtggacgagaccaccggcgaagcccacgtgaccgaggacgcgcccgatgagaagacactgaaactgctcaacaacacgatcgccgaagtgaccgcggaaatggaaggcatgcgtccgaacaccgccattgccaagctcatcgtgctcaacaaccatctgacaggtctgaaggccgtgccgcgtgccgcagtggagccgttggtcctgatgctcgccccgatcgccccgcacatctgcgaggagatgtggagcaagctgggccaccccgagtccctgtccgccgagccgtggccggtggccgacgagcgttacgtgggccacgacaccgtgaccgc

SEQ ID NO: 3923 - DNA, 10580 bp, Unknown
  R22_24m  MAG No. k141_17055
acagccgcatccccgagatcgtcgaactcgcccgaaagatccgccgtcatgggcccgacatcctcgggacaatcgaattgggctgttcaaacgccaggctcgaggcgtccgacaacaggatcaaggtcaccatccgcatggcctacggcttccaccacgcgaacaatcccatcgccctcgtcatgctccgccgcggcggactcgacatacgcccaccacaaccaagagcccaacccacgaaaacagcagaagcctcttttttgtgctatcccgtaaaactgcgggacggcagctctttttcgccgtttgagccgtgccgtcccacatcaccctttgcggaccgtgacaccataacaccgagaatggcggaatttcaacgattccgtaattcgtactgcgggacgccacgctagtcaatcgattgacactcgtgccatcccgcaacagtgtgggatacgacgtcaaaatccgcgaaaatcgcgtgccgtcccgcgcgtacggcaccgcacgaatacatgctgatgaaccgcatagaaaatggctccccgtgtggggagccatgagctagttactaactagcgatgcgtcacttctcgttctggccgtggcacatcttgtacttgcggccggaaccgcacgggcacggggcgttcttgccagtgccagggaaggtgcggccgtcggcccacggcgtcttgagctcttcgctcttcggacgcttggaaaccgggaccttgccttcggcgtggctgatcggagccggtccggcaacaggcagcgtggactcgccggccccggaggcggctgcggattcggcgatcgcctgcttggcgtccgtatcctcgtcctcttcctcgacttcgccctcggcggcctcgaccacggattcgccgttctcgtcggggccggaggccacggcgatggtgtcggcgctttcggcggtctcctcgacctcgtcaacggcctcgtcggtggtggcgacctgcttgatgtcgatgtggaacagcagctggacggtctcctccttaatggcctcgatcatggagttgtacatctggtagccttcgcgctggtattcgaccagcgggtcgcgctggcccatgccacgcaggccgatgccgtccttgaggtaatccatctcgtaaaggtgctcgcgccacttgcggtcgagcacggcgagcaccacgcggcgttcgagatcgcgcaagccggtctcgccgatggtctcctccatttcgccgtactgctgcctggcgtcctcgacgatcaggtcgcgcacggcctcgacggccttcgcacccttgaggccgccgacgatcttcctgacctcgtcttcgtcgaccttggtggggatcacggtgttgagcgccttgaacaggccctcccaatcccagtccttcggtttctcggatcccttgttggcacccttgatgtaggactcgacggtgtcggaaatgaaacgcaggatgtccttgtggatgtcttcgcccttgagcacggcctgacgctcggagtagatgacggtgcgctgcttgttcatcacgtcatcgtacttcaacacgttcttgcgaatctcatagttacgggattcgacggccttctgcgcggtgcgcacgcccttggtgacggacttggcctcgatcggctggccttcctccatgcccttggccatgacctgggccaccagctgggtgttgaacagacgcatcagatcgtcttccagcgacagatagaagcgggactcgcccggatcgccctggcggccggaacgaccgcgcaactggttgtcgattcgacgggactcgtggcgttcggtgccgagcacatacaggccgcccagctccttgacttcctcgtgctcgtccttgacctgggccttgatctcgttcagggtgcccggccaacgcttctcgtactcttccggggtgtcttccggagagtaaccttcggacttcagtttggcgtcggcaaggaactcgacgttgccgccgagcatgatgtcggtaccacggccggccatgttggtggccacggtgacggcgcccttgcggccggcgacggcgaccacggcggcttccttctcgtgctgcttggcgttcaggacctggtgtgggatcttcgccacgtcgagcagggcggagaccacttcggagctttccacggaggcggtaccgagcagcaccggctgtcccttggcgtgacgcttggccacatccttgacgatggcggccagcttctccttcttagtgcggtagatgaggtcgtcctggtccttgcggatcatcggcttgttggtcttgatcggcagtacgcccagcttgtaggtgttcatgaactcggcggcctcggtttcggctgtaccggtcatgcccgcgagcttgtcgtacatacggaagtagttctgcagggtgatggtggcgaaggtctggttctcggccttgacctccacgccttccttggcttcgatggcctgatgcaggccctcgttgtagcggcgacccggcaggatacgaccggtgtgctcgtcgacgatgagcacctcgccctgggtgacgacgtagtccttgtcacgcaggaacagttccttggccttgatggcgttgttgaggtagccgatcagggcggtgttggccggctcatacaggttgtcgatgccgaggaagtcctcgaccttggtgatgcccgggtccaggatgccgacgaccttcttcttctcgtcgacgtcgtagtcctcgtcgcgggtgagcttcagcaccagcttggcgaactgacggtaccagcgggtcacgtcgccttcggccgggccggagatgataagcggggtacgggcctcatcgatgaggatggagtcgacctcatcgacgatggcgtagtggtggccgcgttgcacgaggtcggccttctcccaggccatgttgtcacgcaggtagtcgaagccgaactcgttgttggtgccgtaggtgatgtcggcgttgtactgcttgcggcgctccggcggcttctgctcggtgatgatgcagccgacgttcatgccgaggaagcggtagatacggcccatcagctcgctctggtagctggcgaggtagtcgttgacggtgaccacgtgcacgcccttgccttcgagagcgttcaggtaggtaggcagggtggcgaccagggtcttgccttcaccggtcttcatttcggcgatgttgccccagtgcagggcggcaccgcccatgagctgcacgtcgaagtgacgctggccgagggtgcgcttggagacctcgcgcacggtggcgaacgcctcgggcatgatctcgtccagactcttgccgttttcgatttcctgcttgaacttcggggtttgggccttcaggtcctcgtcggagagggcggaaatctcgtcctccagggcgttcacggccttagccacgttctccagcttcttgagctggtggccttcacccattcgcagggctttgtcaacaatatcgaccactgggttctcccttgactgataagtggtggtgtccgcgtaccagaatagcgcctcgcaccgtcagcaatcgaatttttcgacctttttacgaaaaaatggaccgcttccatattggaagcgatccatgcggtatcagctgatcatgtcagcagcccttaccctcaggctttcttgacattctccggagtgtcgatttcgaacacgccgtagctccaaccgtgacggtgatagacgacggacgggcgtccggtctccttgttcacgaacaggaagaagtcgtgtccgatcagttccatctcgtacagcgcctcgtcgatgctcataggctcggcgatgtgcagcttgcgacggatgacaatcggcgtatccccaacctggacctccacggattcgccagggccaagatcggaggcgaccgcagcctgcgggctgttgttcggctcttcctccgacacctccggctcgggctccggggcgataacacccagatccaccgggaccgggttcgcgtaaccacgacggtgatccttgcgacggtcacgagtacgacgcagacgcagcgtcaacttatccaacgccatgtccagcgcactgaattcatcggtgctggaagcctccgcacgcaccacggtacgtccggcgataacggtgatttccacgcgcttggcagtatcggcctgacgcgggttgccctcatgggtcagcacgatctgcgcgcgctgagcatccggggcgatagcggtcacacgattcatcttggtctcgaccacatcacggaacctttgcttgacctgcgtgtggcgtccggtaacgacgatttccatgttgacctcctctaactcaagcggtgtaacccgctatatgtgttccgaacggcatcatcaccgaccgggtatgtttcattgtagacgaacaatgggtgaacggccggaaactcgcccagagaatatatgtttattcccgggcttttctctgcaatgaaacgatgtatatactggggttttggcagcagtctcctataagaagatttgataccggtttatcaggctggctcgtttgttcgtcatggtaaatactgcaatggataggcagcgtcttcttgctctttctcgcacataccaagctcttacagatttgattcgtctccatacgacacgccacaacacgcccgacacgccccatccgatattcggcgcgtcgttcacgaatcgcccaactatgcccaactatggagaaaacaggataactgggcaacgtcatggcctcaccgcagggcgggatgccgccttttccgcaccttatgtataattgcaggcttgagacctcttgatggccgcggccgtgatcttcattgggatcggctgaggaacttccgggctccatagagcacgatggcggataacgtccgcccagggtgacctgagagatagcgcaacagagaacagaccgcccgtcctcgacgggtaagggtgaaacggcggtgtaagagaccaccgggcctctggtaacagtaggtcgcatggcaagcctcatcgggagcaaggccaagcagatggcggtaagggctgctcgcccgtgtcatcgggtaggctgctagagcctggcggcaacgtcaggtcgagatggatggccatccgtgccgtgcgttcgcgcacggcacgacagaacccggggtataagaggtctcatttttttcttggctacaccaacaattcggcggcgactcggcggagggtttcggggctgtgtcctttgcggccgcctgcggaccaaaaccgacgctgacggacctgacgatcgaggccatgggttttgcgggctatttggcggcccaattcccatgcggcatcttcaaagatgccatcttgctcagcttcgtcacacacctgttcagccagtttgcggtccacgcctttgcgagcaagttccaggaccgcaccacgacgacccatcatgcgaccggcacaatagcgtacggccgattcggcataagcgcggtcgtcaatcagttgcacgcgaatcagccgttcgatgacctcgtccacaatcgcctcgccatagcctttgctgagcaatcgttcgcgcaacgcgccggatgcacgcggggccgcgtccagcaaacgcaatgcagcctcgcggcaagcgtccaaatcattgggatcttcgacaacggcagcgtctctcccccgtcgagaaaaacgtcccggcggtttcggctgaacacgctgctcggcaatgggcatgtcttgcgacgcaacaggattgcgccgcaagaatgcttcggcactaatcatgttcaggccttagctgcgccggccttggcacgggtcgttttggcagcaggcgccgctgcggccttgctgtccttggccacgtcggcagcggcggcctcgctgacagcggccgctgctgcggcttcgccatcttccgcgaactggtcggcggaaccgatcagaccgaactcggccttgaccttattctcaatctcctcggtgatggccgggttgtccttaaggaactgacgaaccttctcgcgtccctgaccgagctgatcaccctcataggtgaaccacgaaccggacttcttgaccacgccaacctgctgagccatgtcgattaccgagccctcacgggaaatgccttcaccgtagagcatgtcgaattcggcggacttgaaaggcggggccatcttgttcttgaccaccttgacgcgcgtgcggttgcccaccgcttcgtcgccattcttcagggtttgaatacgacgaatgtcgagacgcacggaggcatagaacttcagggccttgccgccggtggtggtttcgggattgccgaagaacacgccgatcttttcacgcagctggttgatgaagatggcggtggtgccggcctgagccaacgcgccggtcatcttgcgcagcgcctggctcatgagtcgggcctgcaaaccaacatggctgtctcccatttcgccttcgatttcggccttcggcactagggcggcgaccgagtcgatgacgatgacgtcaagtgcaccggagcgaatcagcatgtcggcgatttcgagggcctgctcgccgttatccggctgggagacgatgagtgagtcggtgtccacgccgagcttgcgggcgtaggccgggtcgagtgcgtgttcggcatcgatgtaggccgccacgccgcccttcttctgggcattggccaccacatgcaatgcgagcgtggtcttaccggatgattcggggccgtagatctccacgatgcggcccttgggcaggccgccgatgccgagcgccatatcgagggccaacgaaccggtgggaatcacctcgacgttctgctcgggctggtcgcccagtcgcattgcggaacctttgccgaagctcttctcaacctgcgccagcgcggtgtccagcgccgccttgcgcttgggatcgagctcgtgcttgtcctcggctgccgggtccttggccggcttggtctcaagtgccatgatcttctccttgtcgaagtcgtgcgcgaatcggatgcctccaccgtatgacggacatgccatgtgaggcaatccaaaccaaccattgtggttccagcttgcccgagctcggccatctgacctccctaagacctactgcggtaaggcttatggcggatgacaagcaccctgtgcacacgtatgcggcttcttgtcactgtgaataactataaccacacacacgaacatttgttcgaatttggcgtgcaacacgccgaaatcgccaatttcacgattcagcgactccgtaatcccgcagtgtcagacggcgggcatgggcggcgcgttatgatcgtggccccaacgcttggagtccggaacctccatttggtcacagagcacattccagaccacgcgtggctcctcccccgcgtccagcgcctcgaccacggtcatattcgccaatttggacatccgttgatcacgcgacaacgaacgaccgtaggtccgaccgaacacctcttcaagtaattcccagaattcccgttcacgcatacacgccagtgtgccaccacccgcaggacagcaaaaacccgcatcgccacaagcgatacgggttcacagctagacatagattacgggatgcggcttcacaccgccaaccgatcagccctcgactgtgtcgagataatcggccaccatgcgcagcatgcgcgaagtggagactccgagcgcatcggcgatggagctcagcagttcggagctggcttccttctgcccacgttcgacttcggaaagatagcccagcgaaacgcccgccttctcggagacctcacgcaacgtgcggcgatcgcgcgtacgcagttcgcgcagcacgtagccgatagcaccacgcagcgaaacctcgcgaggctcctcctcaaccaccacgggctcggcggcggcagtcggcttgtacgacggcgaatcctcatcccacatacgttcacgaacggcttgacgctgatccttggccttcttggcagcctgcgccttgagcacctgctgctgggcgaacatcaccgcacggcgctgggccggagtcagttcacgcatacgggcgacacccggctgcacagccatcggcttcttggcggccacatccatctgttcgttcactcgggtcatcgtttccatcgccatcgccccttccaaggtcggttcagtgtttccactatgtacaacacgacggtcccgcggttttattccttaaaacttgctgtgaatagactcaagttttgcagaacgtggaatacggtgaggcgacgaacctcttcgcgcatgccatcaagatggagttcgacggctttgagcacttcggcatggtccgcggtgaggcttgcggggatgcgcaggcccacatacaccagtccggccggcttatcaccgtccggaccggggccggccacgccggtggtggaaaggccgatgattcggtcgccgtattccggctggctgtataggcgagcggcaccgatggccatctgccgggcgacttcggggtgtacggcgccttctcgatccaatagggccttgtccacgtgtaggatcgaggccttggcattgatgtcgtaggtgacagcggagcccagcaacacgttggaggcaccgggaatacgcacgaacgcatcggcgagcaggccaccggtcagggattcagcgcaggagattttcgtattgttcgcctcgcagatcttgaggatgccggccgcgagactgtcgcacaattcctgcattggaatatccgtcacttccgcttcggggcgacgaacgtgttgtacaggtacacggcacccgagtagaggcacaggaccaatgccacgtagatgatggcgtaggtcaggaagtagtaagcggtcatccagaacggcgtggcctgtccgttacccaatgaccagaacggcagcagcagcatggacagacccacgcactggaatacggtcttgagcttgccgggccatgcggcggcgatgaccttgccgcccggacgctccatgacgaagaagcgcataacggtgatgccgatttcgcgaatcaggaacaggatggtcacccaccagccgagctcgccaaacgcggagcatacaatcattgcgccgcaagtgagcagcttgtccgcgatcggatccatgagcttgcccatttcggtgacctgattgtatttgcgggccatccaaccgtcgattttatcggtggacgcggcgatgatgaacagtaccgcggcgacccaacgcatgatcaggttgttctcaccccaggaaccggcgagaatgtcgagtgtcaggaaaatcaccacgagtacgatgcgcgagtaggtgaccaggttcggcggcgcgttccatccgtcgaacagcgatgatttgggcgatgactgcttgtccattgtgttctcatccatagtgttcacgttacccccatactcctaccttgagtgagtggtggctggatattgactgctattattcgggaatcaggtttcgtgctgatgctgtccgcgcttctctccctccgccccttagggcacctccctcatcagagggaggtcgatgggtgaattattcgccgagttcgggttgttgcggggcgctggcttcgagcgagctggtttcgcctcggatgaaggcgagcacctgcggcaggtcctgcggctgaacaagcacctcgcgggccttcgagccttcggacggcccgaccacgccgcgcgattcgagcaagtccatgagtcggccggccttggcgaagccgaccctgagcttgcgctgcagcatggaggtggaaccgaactggctagtgaccacgagttcggcggcctgcagcagcacgtccatgtcgtcgccgatctcctcgtcaggctccatactgtctttcttctcagcttccttggccatctgttcgatgtcttcgcggtacttcggcttgcgctgggtgcgtacgaactccacggccttgcgaatctcggattcggacacccacgagccctgcacacgaatcggcttggcggaacccatcggcaggaacaacgcatcgccctggccaatcagggtctcggcaccgaccgtgtcgagaatgactcgcgaatcggtggcggacgaggtggcgaacgccagtcgggatggaatgttggccttgatcagaccggtgaccacgtccacggacggacgctgggtggcgagcaccagatgcacaccggcggctcgtgccagctgggtgatgcgctggatggagctttccacatcgttcttggccaccatcataaggtcggccatctcgtcgaccaccacgaggatgtacggatagggggccaccttgcgctgggagccggcgggcgcatgcaccttgccggcgcgcacggcctcgttgaagtccttgacgtggcggaatccgaagaattcgaggtcggagtagcgtgcatccatctccttgaccacccattcgagggcctgtgcggctttcttcggatcggtgatgatcggggtcagcaggtgcgggatgcctgcgtaggcggacagttccacgcgcttgggatccaccatgatcagacgcacctgttcgggcgtggcacgcatgatgatcgaagtgagcatcgagttg

SEQ ID NO: 3924 - DNA, 18504 bp, Unknown
  R22_24m  MAG No. k141_17690
cgcgactcgcccagcaccgaaccgtccggctcgttcagctcactgctgggagacatcgccgtgcgcgtcgaagacatcctttccgaaacgttcaaacggcagaaactctccaccaaaggcgtgccgtactatgcgcagatgctggtgggcatgaccgtgttcaccggacagtactgggccgaccgaccaaaggtgagcaaggagcagctggccgcatacattgtggatttggcctggcatggcctgagccggcttgactccaagccccagttgttctttgagggggccaaggcgcggaaggaggccgagcgccgagccaagcgcgagtccgattccggcggtccggattcagaccagacaagttccgcccaatcggattccgatcgcgcccccggggaagattcagggttgcagaacacgagttcaggggcacaggttgcgcaacactctgccgagtcgggagacgaagtgctacggtttgaacaggaaactgaacataacgactaaatatgtgaggacgtaagactttcatggccagcacggcaaagatgctcacctttgtgatccccgcatacaatatggagtcctatctcgaccgttgcgtgaactcgctgctttcggcaagcgacaccagcgacctcgaggtactgattgtggacgacggttcgaaagacggcacgctggagtacgcgcgcaaactggaacgcaccaatccaggtgtcgtgcgcgcgattcaccaggagaacaaaggccacggcggcgcggtgaacaccggtatcacggcggcgaccggcatgtatgtcaaggtggtggatgcggatgattgggtcgacccgcaggccatcgacacggttctggccacgttgcgcgcgcaacgtgaggccagcgagccgatcgacatgctggtgaccaactatgtgtatgacaaagtgaccaagcgccacaagatcgtggtgaacttccgtcatgtgatggaggccggccgcgtgctcggctgggatgacctgggcaagttcggtctggcgcagtacatcatcatgcatgcgctcactttccgcacgcaggtggtgcgcgattccgggctgaagctgccggagcatacgttctacgtcgatttctattactcgtaccagccgttcccgtgggtgaagcgcatccaatatctcgacgtgccgttctaccactacttcatcgggcgcgagggtcagagcgtgcagaccgacgtgatgattaagcgtgtggatcagctgcggctcgtcaatcggctgatgaccgaggccacgcccgaacgtggtacggtgccggaggggctgtaccggtacatgattcacttcctgacgatcgaatcatgcgttacctcggcgttcctgattctctcgcgcgatccggccaactacgttaagaaaaccgagctgtgggatgcgattgacgcctattctccggccatcggcaaggatgtgcgctcgaagctgatgtcccgcgcgctcaatctgcctggtaaaaccggccgctggatcgtgcgcaacggctatctcatcgccgaacgcatcgtcggcttcaactgattcggattacggctttgccctgctgacgcgttatcagcagggcatccctattacctccccagccgaggttttgctactcggcccaacggtcggacattgcgaagctgttgtgcatcaggttgctggaggtgtatagcacgtcgttcagcagcttggttgtatgctcgcgcaggtagtcggccatctcgtcgttggccgcttcgagcacatccgccacgccctgcacatccttctcatcgccgtggccgccatcgagcggccatgcattcgtacccgtcgattcggcatcgcttcgagcaagcaactgctcatccgtgcgctcgatgagccggtgcccgaacgcgcgcacgccttccgcatagccctcgatgaaccggttcgtctcataccaatgcgcgtcggccacgacggcgatcaggcggttcgtccaatacaggttgccggtggagacttcgggcgtggtgtcgcgcaggtaggcaggcgtgtcgttgacgttcgcgtagaacggcgcggcggcggtgaacggaccggagccgaacgatacccacatcaccgtgcgattggccgccggcacatacgggcggacctgaatcgccaccatatggccggtgcggttcacgccgatcggacggtaacggtggcgcgattccgccgtgccggtcgtgccgtacgggtcgtacggcgtgccttcgaagtgcgaggacagcaggaaatcaacgtcttcgaggctcaccttgtcttccggcacgcggcaccacgggatgtcgtcggattcgggcgtgtagcgggcggccggcgaatcccagtcctcgctggggttgaggcggcgttgcatgtaccaggcacgcggcgtgttgtagatatggtccttcggcgtcgcggtgccgaaggccttgcgcgggttgaagcgggtgggaagggcaacggttattccgaatccggcgctatgcacgtgacggccgttggaagagaccgacgttcccattgtgcggtcaaggtgatgcgtggccatgaactcgcgcaggtcggcgctgcataggtattcgcgctgctcgccgaacgcatcggcgaggtcgaagtcgtcgatgccgagctggttggggatcgtggcatagcagtcgtcgggcactcggcgggcgatccaatgatggccgccgatggtctcgacgtaccagatctcgtccgcatccgaaataatcacgccgttcgattcgtaggtgccgtaggtttcgagcagttcgcccaaccgcgcgacgccctcgcgcgcggtggtgacgtacggcagcacaagggtgatgatgtcttcctcaccgataccgccgggctgctcggcctgataatcggtgctgtccggcccgccgacagccggccgcaactcgaccatcgggtccgcaccgagcacgcgctcgttgacagcgatggtttcggtggcgctcatcgccacgttgtgttcgttggcaccggcttcggccagaatgccacgattattcagcacgttcggtgcgatggtgtaccggcaaggattgtccggtagttcgatttcgacatggctcagcacgctgcggtagtggcgcggctggtcgtcgggggcgacggcgacgaagcgcttgggatcgtaacggcccgagcccgaatcgtcatcgcgggcgatgatggtggaaccgtcgtaactggcatttttgccgacaagaatcgtggtgcatgacatggggcaccactctaggagccaggctggtcgaaacaaaaaatccttggaaccattgcgattccaaggatttgttgtgccccctgtgggattcgaacccacaacccacgacttaaaaggacgctgctctaaccgttgagctaaaggggcaactcttctaaaatacacaccgttttgggatatttcaactacggcgttgcgtacacgtttgcgtacgcgattggcccaacgcacggcacagcacacgcaatgtggcccaaatcgcagcccaaatcgcatatcgcctctaacgatagatagccgccggcgactacccttgtacattatgagtgaatcccccaattggagcaatcccctgcgcgattcgcgcgacctcagactgccccgtatcgccggcccgtgcagcctcgtcattttcggtgtcacgggcgatctggcacaaaagaaactgctgccggccgtctacgacctggcgaaccgtggcctactgccgccgagcttcggcctgaccggcttcgcccgccgagactggacacaggagcggttcatcgaattcgtcaaggccgccgtccgggcgcattgccgtacgccgttcaaggagtcgacttggcgcaatctggccgccggcatccgcttcgtgcagggtacgttcgacgatccggaggccttcgagcgtctgagcgccaccgtgcaggagcttgaccgcgaccgcggcacgcagggtaaccatgccttctacatgtcggtgccgccgcgcgccttcccgcaggttgccaagcagttggccgcctccggcctgtcgcgctcgtccgagggcgcatggcgccgcgtgatcatcgagaagccgttcggccatgatctggccagcgccaaggaactcgacagcgtggtatccgaagtgttcgacccgagctccgtgttccgcatcgaccactacctcggcaaggaaaccgtgcagaacctgctggccctgcgtttcgccaacgccatgtacgagccgatctggaacgccaactatgtggaccacgtgcagatcacgatggccgaggacatcggcatcggcggccgcgccggctattacgacggcatcggcgccgcacgcgacgtcatccagaaccacctgcttcagctcatggctctgaccgccatggaggagccggtgagcttcaccgccaaggacctgaccgccgaaaagaccaaggtgctttccgccgtgcgcctgcccaaggacctcgccgccaacaccgcgcgcggtcagtacgccaagggctggcagggctcgcacgaagtggtcggctacttggaagaaaaaggcatcgaccccaagagcaccactgaaacgtacgccgccatccgcctcgatatcgacacccgccgctgggctggcgtgccgttctacctgcgttgcggcaagcgcctcggcaagcgtgtaaccgaaatcgccgtggcgttcaagcgcgccccgcatctgccgttcgagcagaccgccgtgcgcgaactcggcaagaacgccatcgtgattcgcgtgcagcccgacgagggcgttaccatgcgcttcggagccaaggtgccgggcggctccaccatggaggtccgtgacgtgaacatggacttcagctacggccgctccttcaccgagaactcgccggaagcctatgagcgactgattctggacgtgctgctcggtgatccgccgttgttcccgaccaccgaagaggtgaacctcagctgggagatcctcgatccgattgaacaattctggtccacgcttggccagccgcaggcctaccgcgccggtacgtggggtccggcacaggccgacgaaatgctggcgcgcgacggccgccactggaggatgccatgatcatcgatatgccgaacacccgcacccgcgagattgcgcacaaaatcgaacagctgcacgaggagcgcggcgaatcggcgaccggccgcgtgctgacgctactcatcgccaccgaggacgcggacctagagcatgcgctggaaatcgcgaactcggccagccgtgagcacccgtgccgcgtgattgccgtagtaccggataccaatcctgccgatcagtccggcgaaggcgaaccgaacgagaccgaagtggccgccgaggtgagcgcgaatcgcgataatccggccgtcgatttgaccgacggcccgaacgatccgaacgattccaacctgaacgcccaagtgcgattcggcgcggacgccggtgccggtgagattatcatcttgcgtccgcgcggtggccttatcaaccacccggatacgctggttatcccgctgcttgtgccggatgcgcctgtagtggcgtggtggccgaccacaccgccgtcgaacccggccaaggatctgatgggtgcgatggcccgcagtcgcatcaccgacgcgctgcactccaataatccggaggccacgatcgagcgtttgcgccgcaattggacaccggaagacatcgacttgtcctggacacgactgaccgtctggcgcgcaatgctcgcctcgatgctcgaccagccgccgcacctgcccatcaccgccgtgaaggtgaccggcaaggccgacttcctgcctctggaaatgctgtgcgcatggctgcgtctgaaactcggcgtaccagtcgaaactgagttcgtgcccgacgcgcaggccgtgaccggcgtgtacctgacccgtgaggacggtgtgatctcactggaacgcccgtatgaggaccaagcgctgatctcgctgcccggccagactccgcaggaagtgtccgtgccgatgcgcaccatcgaggactgtctgaccgaggaactgcgccgcatcgatcccgatgagatctacgccgaggtcatcaacgaaggctgggatctgattcgtcactgaagtcggtagaaccgttgccacagcggcgttggcatgagttcggcaattgtggtcgagccatgccaacgccgttgctcatcgtttcctacctcatgcgatgacgaagctcatgaccgcggagtaataaagtgacatatgcgatgtcgcacaatgtacattgtgttgtcaactgacaacacatttcattgctgcaaatggctggattcccggcatgccacccgtattatgcgttgtcaactgacaacacaatccacattgcaaagtacgacacataccccatataaggaccatacatggcaactcgaaaactcattgtgtatccgaataaagatctgatgattcaggctggcgcgcaacgttttgtcttggcgctactcgatttgctcgccgaacgattgcctgatggcacgcatcgcacacgtgtggatgtggcgctgtctggcggttcggccgcacagccgttgggtttggcgctgaacgatccactggctgatgcggttgattggtcgcgcgtgcatttctggtggagcgacgaacgttttgtgccggcttacgacaccgatcgcaatgctctggaggcccgtcgcctgctgcttgaccagctggtggcggatggcaagctgcctgaatcgaatattcatgagatggcggccgatacccgttcagccgatgacatcgccgatgtgatggatcaggccgatagtgatgacgcttccgttcgcgccgccgccgatgccgcgaatgatgcgctgctggacgatgccgcgagcgactatgagcgcgagttggtgaatgaattggggccggaaccggtcatcgatctgatgattctcggcatgggaccggacggtcactatgcgtcgctgttcccgggtcatgatgaggtcaaggttaccgataggctcaccgtgggtgtgaaccactcccccaagatgccgccgttgcgcgtctcgttgaccgcgccgctgattgcccgctcgcgccgtacatggttcttcgccgccggtgccggcaaagccgaatcgctggcccatgtcttcgagcggcccaacaacccggattacccgtcctcctacgccaacggagtggacgagttcacctggttctccaccgaagaaaccgtcaccgagttgtgatggcgcctcctgtgggccggaccctgaatgaggggcccggcccacagattgtcgcagacgctcaagcctgctgttcctcgggctggccttcctgcgcccagagggtgtggaacacgccgggcttgtcgacgcggccgtaggtgtgggcaccgaagaagtcacgctgggactgggtcagggcggtgggcagacgcttggagcgcagaccatcgtagtacgccagggagctggagaacaccggggtcgggataccggcctccacggcacgcacgactacacgacgccatgcatcctgcgattcgccgatgatcttctcgaagtacggatcgaacaacagggaagccggcaaattatcgcccttgaaggcctcggtgatgcggtcgagcaggaactgggcgcgaataatgcagccgccacgccaaatgcgggccacttcggacaggttgatatcccagccgtattccttagcaccgtcctgaatctcgttcaggccctgagcataggccacgaccttggaagcgaacagggccttgcgcacgtcctcgacgaacgcggccttgtcttctccggccagatcgatggtcttgttcgggccagccagaccttctttctgagcgtcttcacgcagctcaccgtgcgaagacagtgcacgagtgaacacggcttcaccgatagcagccacaggagaaccaaattccagaccagcctgcacggtccaagtaccagtacccttcatgccggcatgatccacgaccacgtccacgaacggcttgccggtctcggcatccttgtggtgcagaatctcagcggtgatctcgatcaggtaggagtcaaggtcgcccttgttccattcagcgaacacgtcgccaatctcctcggtatccatgccgagtccacggcgcagaatgtcatacgcctcaccaatcacctgcatatcggcatactcgatgccgttgtgcaccatcttgacaaagtgaccggcaccatcggtgccgatgtgggtcacgcacggttcgccgttcaccttggcggcgatggactgaagaatcgggcccaaggtcttccaggattccgcagtgccaccaggcatcagagacgggccgttgagcgcgccttcctcaccaccggacacgccgcaacccacgaagtggaagcccttggcacgtacttccttctcacgcttgatggtgtccttgaagaaggagttgccaccgtcgacgatgatgtcgcccggttcgaacacctcttccagctgcgcgatagttgcgtcggtcggagcaccggccttgaccatgatgatggcggtacgcggacgcttcagggacgcggcgaattcctcgagcgtttcggccggcacgaagttgccttcggcgccatgctcgttcatgagcttctcggtacgcgagtagtgacggttgaacaacgccaccgtgttgccatggtgcgccagattacgcgccagattggagcccatcgtggccagtccaatcacaccaatgtttgctgtagcttcggccatgcgccttgcctttcgtttgattgtcccatcgtcatcacgcgcgtcacaaaacagcacatcagcggagggaatcattccttcaacgcttgaaagtgtatcccacttaccaccccacacgcgaaggctgtcttaggttctacgcaccttctgcccgcgaagcgtaattacttgccagccattcacatacgcccggccttggaagggtcgatatgcatggtctggaagcgattggccatgtaagcgtcgctgtagcgttcgctgaaccacatcgcgaccggtgaatcctgcggctggccggccatgcgcccataccagcaatccaaggccatcagcgtgaaggcaatgtcgatcaccatcagcaccgtgcataccgcagtcagcgaataccgtactttccatggaatgcgattaatcagagccagcagtcgcggcaacagccacttgacccacaccacaccaatcagtccccagaagaacatgaattggcccgaagtacgtccgtcgatggacagccaacggccggtgtaatcccacgcggtaataccgaacgccacttccatgaaccagctggtgcagtattcgaacgcgccgccgatcaccgccgaagcgcagaagatcaagaacggattcgccttccacaggcgattcaggcacacggttaccaataccgcaccacagccgtaaatcggtgagaacgggccccacagcaaacccgcgcggtcctgaagttcaccgttatacagcgccatatggtagatcgtctccataatcaggccacccaccgaagcgatggtaaacagccagaagatattgaagaagtccagtgcaatatagcccttgccggattggtcgcggcccagcatgccggccgccaccgccgattcataatcatcgcgatcgtccatgcgtttgagcgcgcgctgcaaacggcgttcctcgctcagggagggatcggcggtcaccgaaatcacgacgagaataatcatctgaatcagcggcagcagcaggttgaagccaaggccggtcagggccagcgacagcatgccgtcggccaacgtcaacggcatcagcacgtaggtccagcgcgcggcataccggcgatgattgcgcagcagcatcacgccgaacacaatcaggcatgcggcactgactaccagcaccaccgcatgaatcgcggacaggatgaaagtcaggctcatcgcatcgacgtgcacatgaccatccagaatctcgcgcacggcatagaggatggaaatcaccataatcggcaatgtggcgagtccgtccagcagcacgaccgcgccatagatgcgcgccagaatcggtaatcgcttggcgttcgggttcaagccggcgtcgtccagttcgacggccaccagatcagccacgactgcggactcggcgtcacggttctcccgcggcttgccaggggtagtggccgtgccatcgtccttgaattcaaccatggtttcctccccacatagcgtccccttacactatcacccgattgcagttttgccgaacttgatggatagccggtacatgtctgtctacattgccggacaccgagcccgctatcgctttcaggaaacatccaaaaaccatccagaaatcttgtcaataagttccagaacgcctttcgctccagccaaggcactgatggccagtccggcaccggcagcagctccggcacaggttctgatacttccggtaactccaactccgaccagtcatccagccagaacgagcagtcggccattgatggtcaatccggcaccatcgaaagctgatacaacggtttacccatggggcggtagctctctcatgaggcggtaattaccccatggggcggttagcccaaaaccgcattccgcggaataaagccattttaagccaccgccccatgggaattttaccgccccatgggccacttaccacccaatgaaggttttaccgccccatggagggcagcctcacaccaacacacacagcacacccggccacacagcaccccagccacaaaaaattaggcacactgcccagagacacacgataagccgctgggcagcggcgttattccgccaaaaccatcatcaatcaccccaataatctccggcagccgtattacgctactataaccgtagcgctacgattaacgtatcgctacggaaaacgtagcaaccaagcaacaccaagctccggaggtatcagtgggcaatatcttcaaggtcctcaaacgcgacttcctgcgcctgttcaaggtgccggccgcatgggtgatcctgttcggcatggtgtttatcccgccactgtattcgtggtacaacatcgtcggcttctgggacccgtacggcaataccaaaggcatcaccgtcgccatcgccaacaatgacgacggcaccgacaacgcgctcatcggcaagcaaaacctcggcgatcaaatcgtcaagcagctgaaaagcaacgaccagctcggctggaccttcgtcaccgaagccgaggccatggaccaggtggaatccggcaaggcatacgcagccatcatcatccccaaagacttttccgacgatctcgccggcgtggtgaccggcggcaagagtcggcccactctggagtattacgtcaacgaaaaagccagcgccatcgcccccaaagtcaccgatgtaggcgcgtccactgtggaccgcacggtcaattccacattcgtctccaccgtatccgaagtacttaccgaagtcatcaatacggttggcggcaaagccatcagcaccgaagacaccaccaaagccaaggccctcacggcccttgccgaggcctccggcgacgtgcagcacacacgcagcaccatcgccaagctcaccaccaaactcaccgataccccggagcagacacgcaccgcacgtcaggcgctggacgacgcgcgcgcacttggcatcgacaccgcggaaggtctggccggcgtctccaccctgatcggcactacccaagccagtctgaacggcttcgtcacctccacgtccgaagcgcttgaccaaggctcaagcctgctgagccaggccgcagcacaggccaaccaaagcgtgggcacggtagccggaaccatcagcgccgccaatcagcaggtaggcggactgatcaatacggcggaagacatcaaccaagcgaacgccgacatcatcgaccaactcaaagggctgccgaacgccgatcgagaaccgctgcaatccgccattgccacactggaaagccgcaatagcgagcttgccggcgcactgggcaacctcgatagcctgaacaccactatcggcaacgcctccacagacaccgccggattggcgcagcatctcaataccgccacccaaaccacggtgcgcgaggccaataccgctcgcggcaccatcacctccggcgccattcctcagctcaacaccggcctcaacaccctcagctcgaccgccaacactctgtcgaccggcatcacgtcgcaaggctcactcatcgatcagtcgaagagcaccctcgatcaactcgacaaagccgcctccaccacggtgaccgccctgcacgacaccgataaggcgctggccggcatgcaaaccaagctcgaaacgctgaccaccgacatcaaagccctgagcatctccagttcactcagttccctgatcggcaccgacggcaaactggatgccgccacaatcgccgacttcatgctctcccccactgttatcagcgaacgggccgtctacccggtcgcctcctatggttccggcatggcaccgctgttcaccaccctgtctttgtgggtgggcgcgttcgtgctcgtggtcattcccaaactcgaaaccgacgacgagggcatcgacgatctcacgccaactcaaggctatctcggccgtttcctgttgctggccacgctggccgccgtccaaggcctggtcacggccatcggcgatcttgtcatcggcattcaatgcgcgagcgccccggtgtttctgctcacctgcgtcatcacctcactggtgtatatgtcggtgattttcgccctctccaccacgttcatgcacgtgggcaaaggcgtgtgcgtggcgctggtcattctgcaggtgccgggcgcctccggcctgtacccgattgaaatgatgcccgcgttcttccgtgccatctatccgctgctgccgttcacctattcgattgacgcaatgcgtgaaaccatcggcggcttctacgacggcctctggttcgcctatatcggcaaattgctgattttcgcggttctggcctttgcgcttggcctcggcgcccggccgaaactggccaatctcaaccgcctgttcgcgcgggaaatcaaggaaagcgacatgattatcggcgagccggtgcacctgcctggcagcgaataccgtgtcactcaggccattgcggcactggccgaccgcgacgaataccgtcatgccatcgaacgtcgggccgccaaattcgcctaccagtatccccggctgctgctgggtgcgcttatcgccggattcatggtgccggccgcgctcattatcgtgtttgtgctgaccaccagcgagaaaatcgtggtcatgggcacatggctggcatgggtgctcatcatcatgggcttcctgatggtcgtggaattcatgcgcgattccatccgccgccaaaccgagctcggcaacctctccgacgagtcgatccgcgccatgctgtacgggcataaggccaagcgtcgcgacacctccgccgaacgccacgaagaagcggacccgagcgccgccgttaccgcaatcatccccactattccgccgaccaaggaaggcaggcacgcacgatgaacaccatgtggaaactatttaccggcgacatcaaacgcctgaccagcaacgtggtctccatcatcatcgtgatcggcttggtgatgattcccggcctgttcacctggttcaacgtggccgcatgctgggacccgttctcgaatatgaagaacctgaaattcgcggtggcgaatgtggatgaggggtatcgttccgacctgatcccggtgaaagtcacggtcggtgatcaggtggtgaacgcgctgcgcgccaacagtcagctcgattggacgatcacgtccaaagccgatgccgtcgagggcgcacgatccggcaaatactacgcggccatcgtaattccgaagtcgttcagcaaagacatgatgaccttcttctccgacgatgtgcagcatgccgaactgacctattaccgcaacgagaagaagaacgcgctggcaccgaatctgctcaacgagggcacggacgaggtggcggcggaaatcaacaccacgttcgccaagaccatcacttcggcagggctggaaatcgcgtcttcgctggccgatcagctgtccaagcccgaagccaaagagcaactgaataccttcaacgccaatatcgccgatttcgccacacggcttgacgatacggcggatttgcttggcacatacagcgcattgaccgatacggccggcgccttgcttgacacctcgaactcgctgatcacgcaggtttcctctgccgccaaacaaggaggcaaggatctcgccagcgccaagcagggagtcaccgacgtggtcggagccctgggcaccaccgctgacgcgatgagcagctcactggacgcgagcgcctccagtttcggcgcggtgtccgattccatagacaagctgtattccgacgcgaatgatggtgccaccacggccgccgacgaattggaccgtcaagccacggccattggcaagcagacggagaaatacactgaaattcgcaacacgttggccggcatactgggcaacgactcatccatcatcacggcgattgaccgttcaatcgcacggcagaacaggctgcggcaagcgctgaataaggcggcgaccgatattcgccaaggtaatcaggacgcgcaggatcagcatgcgcaggtcaaggatctggccgatcaagcgcagaacagtatcgccaatatcaagtcggatttcacggccacggtgaaaccgcagatcgactccctgtcgtccaccgtctctgacgcctccggcatactgagttccggcgccacccagttgggctccacgctcggcgacctgaaaaggacttccgacgacgccagcgatatgctcggcgacgctcgcaccaccttgggcaaggtgtccggcaaactgcgttccgccggtgccgaactggcttcgttcaacagcacactgagcgacgcactaaacagtggcgatatgagcatggtcaaagaggtgctgggcaatgatcccgaaacgctggccagtacgttggccgcgccggtgcagctcaggcgcaaggccgtattcccggtggcgaatttcggttcgtcgatggcgccgttctacacgctgctgccgttgtgggtgggcgcgctgctgatggtggtgacgctgaaaaccaccgtgtctcgccggacgcgcaaagcattgggcgatccacggccgcatcggctcttccttggacattacggggtgttcgcgctgattgcgctgctgcaatccacggtgtcgctcggtggcgatctgctgttcctgcgcgtgcaggccgtgcatccgctgctgtttatgttgtccggatggctggcctcgctggtgttctcgttcttcacctatacgatggtggtgagtttcggcaatgtgggtaaggcaatcggcgtgcttatgctcatcgtgcagatttcgggtgcgaacgctgcctacccggtgcagatgttgcccgacttcatcgccaaagtcagtccgttcttgccgctcacccatgcggtgacgatgatgcgtgcggccatcgccggcatctacgacatggattactggcgggccgccggaatgctgctggcgttcgtgccgccgctgctgttgcttgggctgttgctcaggaagccactggtgcggttcaaccagtggtatgtggccaaagtcgagagcactaaagtgctgagctagtaggtattatccgggggttgcctacaaacggcatggacttaccaccctcagtctggctttgccagccagctcccgccaacgggagcgtacgggagcatatttcggagagaagagatgacggagatgacaggtacgacggcgacaccgcgcggtgagcgcacgcgcgaggcgacggatcgcaagctcatgcgagccacgctgcagattgcggtggaccgcggcatcagcggcgtgaccatcgaggaggtggcccggcgctccggcgtggccaaaaccacgatttaccgtcgataccataatgccgacgagctgctgcgcgagatcagcgcgatgtatctggccatcccggattccggcccagtgcccagccccacgcgtgagcatttcacgcaactattgcagcgattggtcgattgggtgcgcgacaacgacatcgacgtcaagcgcgtgggcattgtattgtccagcgaggccgagttcttccagcacatcgtcgaccaggtggtgaccccgtggctggagcatgtgggggcgttcctcaagcagggagtcgcgcagggcgtgtttcgcgaggacgttgacgagaagttgctgttgtccacgattatcgggtctttggtggcgtatgaggccatcgagggcaaagcgatggacgacgacaccgcctgggcctcgcgcatggccgatctgctgtggccagcattgctgaagtagcggtcttactcctgaatcgaagcctcctgacgggcgacttcgagggctttgttgaaggcgtcggaggtccagctggcaccggcgaccttgtccactttgagtcccttcaggggcttgccgtccactacgccgttgatggctttggcgaagtcgtcctgatggttcttggaaatcgtggtgaacgggtgcccaatgattttgacggtctcgacgttgccgtccttgatggtcagatggacgtcgatggaatcctcgccgaccgggccgtactggccgttgatcgagtagttgccgtccttgtagttgccgatgtccttcttgtcggacgtggtggtggacgggtcgttgtgcgatgagccggaatcggagccatcggagctatcggagccgttcgactgggattgcgactgctcttcctgcgacttctcggtctcgcccgagttgccggcgtacgcatcgtccatcggcgtggccttggattcgccgcacccggccagcagcgcgccagccacgaccagtccggccgccgccaatgtcgcggatttcttcaacgtattcttttcggtcatattcacgctccttaagccccctctgacgaggggggctgtcagcgaagctgactgggggagagaccatcagcttgccatgtattcctcacatactgctcgatgcccctgacggccctactcctcgccgccggttttcgcggccttggtggggtcagcgaaaccaatggcggtctcgccgttctgcgcgccctcgacctgtgcacccgtggaggcgggcttgccgccggccgcctcgtaggccttgcgcgcatcctcgtcattccacttctcaccgacgagcacgccatggttgagcatgatctcgcgctgcgcgcagctggcgacaagcgcatcgtgggtgaccacgataatcgtggtgccctgctcgtgcagcttgcggaacaggtcgagcacgattttctcgttcttctcgtcgaggttgccggtgggctcatcggccagaatcagcttcgggtcgttgatcagcgcgcgggccacgcacacgcgctgctgctcgccgccggagagctggccgggcaggtggtgggcgcggtccttcaggccgaccttttccagcgcctccatggcctgcttctcatcgaccaccgaatggtagtactgggccaccatcacgttttccacggcggtcaggtgcggcaccagatagaacttctggaacaccagtccgatgaggttcttgcgcacgtcggccagctgcgtggcgttcaggtcctccagcttgcggccttccagcttcacggagcccttggagggcgtgtccatgcagccgatcatgttcatcagcgtggtcttgcctgagccggaggagccgacgatggcgagccattcgccttccggcacggtcaggttgaggtcgtccacggcatgcaggtcgccgtagatcttcgagatgtggtcgagttcaagtagcatgacgtttctctttctttattcttcgcgaagcacgacggcggggtcgatgcgggtggcgcggtggacgggcgggatggaggcgacgatggcgaccagcgcgctgaacagcacggagatcagcgccagccaccagttgaatccgatggagcgttcgaacaccgccacgcacagccaactggcgagtccgtagccgattgcggtgccgatgaggccgccgatcaggccgtagagcgatgattcgatgtagaactcggtgccgatggcgcgcgagctggcaccgagggccttgcgcaggccgatctcgttgcgtcgctgcgagacgatcgagctgattgtggtgccgacgccgacgagcgtcagcaccagcaccaccagcgagacgatccagaacagcgtctgcagcatggtgatgatgcgggtgtcggaggcggtgatcttggtgacctgctgcgccttgacgtgcatggaggtcatgtcgttgatgctggacaccaggcc

SEQ ID NO: 3925 - DNA, 15398 bp, Unknown
  R22_24m  MAG No. k141_17793
ccgtgtgcgttccggcccgaacaaaggacgatgggatgggccgagaccgatgaaccgatacggaagggactacgacatggacaatacggcgcgcagggatgcgggattgccataccactacgacgacccggccatcatggatggacagctcgcatggcagaacaaactatgggaatacaaccagaccaaacccaccgaacgggagcggcgcgccgaactgctcaaaaacatgtgcgccgaagtcggcgacggcgtgcacatcgaaacgccattgcatgcgagcaacggatgccgtcgcgtacacctcggcaaagtcatctacatcaacgcgttcatgagcatggtcgacgacgcggagatatggatcggcgactacacgatgttcggaccgtccgtcaccatcgccaccgccggctacccgatcttgcccatcctgcgcgaacaccacactcttgttcctatagcccagaaatcccgcgtctctttcgttgtgacgcgggatttctgccggttgggctatcggttggattgactggtatgtttcagcgaacggctttgaccagtgcctcggtgaggtacttgccggcggccatcaccagcggcgcatagcggcgtccgggggcggcacccatgcggccggtcgggccggaaatcgagatggcggcgatgacctggccggaggcgttgcggatcggggcggaaatcgagcacacgccctcttcgcgttcgttcacggactcggaccagccgcgcttgcgtacggcggccagcttggtggcggtgaacttggcgtggcgcaatccctggtgcagacggtcggaatcctcccaagccagaagaatctgggcggcggaaccggcttccatcgacagcatggcacccaccggaatggaatcacgtaggccggaggtgcgttccacagcggcgatgcacacgcgctgatcgccttggcggcggtaaatctgcgcagactcgccagtgcgatcgagcagggtctgcaggatcgggccggcggcggtcagcagacgatcctcgcctgctgcggcggcaagttcggcgaaacgggagccgagtacgaatcggccatgctggtcgcgcagtacgaaacggtggcgttccagtgcaatagccaaacgatgtgcggtcggtcgagcgagaccggtggcggccacaagctggcccagcgtggacgggccggattccagtgcgtcaagaatctttacggttttatcaaggacgccaacgccggaatggatttccccatcgtccttggcggtggtgtcttcaaccggctcggactcggtcaagctgttgttcaatggttcttcccgggaatcagtcataataagggcgattatgccatctcacatagtgaaatggcaaattggggaagtgtctcacagggtggccatgaagttgaaagggcgttcgtggatgccgaagagacatgtctggagcggaaccgagtcatgactaggtcatgttcgagtcgggtccgagtcatattgaggccatcatttgaccgtatctcaatatccggcatgctcatggccgggcccatcgcaagcacataggctaataccacgaacaaggcgcgaacacaatacctcgcgcggaattttttggaggaatcactatgggaacgacactggccgagaaggtctgggccgatcatctggtgcgcaagggcagcgacggagctcctgatttgctgtacatcgatctgatgctcatgcatgaggtcaccagcccgcaggcgtttgagggcctgcgcttggccggccgcaagccgcgtcacgtggatcagctcattgccaccgaggatcacaacacgccgaccgttgatatcgatcgcccgaacccggatgagacgagcgcgttgcagttgacgactttggagaagaactgcaaggagttcggcgtgcgcctgcacccgctgggcgacgccgatcagggcatcgtccacgcgttcgccccgattctgggcctgacccagccgggcatgaccatcgtgtgcggtgattcgcatacgtcgacgcacggcgcgttcggcgcgctggcgttcggcatcggcacttccgaagtcgaacacgtgatggccacacagacgctgtccctcaagccgttcaagaccatggccgtcaacgtcaacggcaagctgcccgcggacgcgacggccaaggacatcattctggcgatcatcgccaagatcggcaccggcggcggccagggttacgtgatcgaataccgtggtgaggcgattcgcaacctcaccatggacgaacgtatgaccgtgtgcaacatgtccatcgaggccggtgcgcgtgccggcatgatcgcgccggacgagaccacgttcgagtacctgaagggccgtccgcacgcgccggaaggcgagctgtgggatcaagccgtggcgtactggaagacgctgaagaccgatgacgatgccgtattcgacaaggtggtggatattgacgccaccaagctcggtccatatgtgacgtggggcaccaaccccggccaaggtctgccgatcaccgcctccgtgccggagccgggcaagatcgccgacgccaccaagcgcgccgccgccgaacgtgcgattacatacatgggtttgaagccaggcatgccgatcaaggacatcgccgtggacaccgtgttcattggttcgtgcaccaacggtcgtatcgacgatttgcgccaggccgccgcgattatgaagggccaccgcaaggccgagaacatccaccgcgtgctggtggtgccggcctcctcccgcgtgcgtttgcaggcggagaaggaaggcctcgataaggtgttcaaggactttggcgccgaatggcgtaacgccggctgctcgatgtgcctgggcatgaacccggacaagctggtgccgaacgagcgctcgatttccacttcgaaccgtaacttcgagggccgccaaggcaagggctcgcgcacgcatctggcgtcgccggccgtagccgccgccaccgccatccgcggcacaatctcgtctcccgccgatctctgagtcaatacacgtgagccccctctgacgaggggctgtcagtcgaagactgactgggggagagatccccgaaaggaaaattgttatggaaaaactcaccacactgaccggcgtgggcgtgccgctgcgccgctccaacgtcgataccgaccagatcattcccgctgtgttcttgaagcgcgtgaccaagtccggcttcgatgacgccctgttctacgcatggcgccgagacccgaacttcgtgctcaacaagccggaatacgccggtaagggccagattctggtcgccggccccgaattcggcatcggctcctcccgcgagcacgccgtgtgggcgctgcacgattacggtttccgcgtggtcatcgcgccgagcttcgccgacatcttctacggcaacaccgccaagaacggcgtgctggccgcgattatgccgcaggagtccgtcgaactcctgtggaagctactggaggaagagcctggtcgtgagatgactgtctcgctggagacccgcactgtcacttgcggcgacgtgaccctgccgttcgaggtcaacgattacgtgcgttggcgtctgatgaacggctacgacgatatcgatctgacgctgcagcacgaggacgacatcgccgcctacgaaaagatgcgcgccgaaaagttccccttcaagcccaagaccatccccgccaaacactgggccgaagaaagaatcgagtccgcccgcgagtctgaggacgcagactggacagggccgttggccgatcgcggcattatttagccgcgatcggcctgctgaaagcccggtgggctttcagcaggccctgtgccgagccgcgacagcagcgaggccagcattgagcctcgccgaaaggcgagtccataattgcaggcccagggccgttggctctgtgtctgattgagattattgggtcgctcgcatcgcatcaaacaaaggtctcactggtgcccgcgccccacatccattgcgcggcgggcaggagttgcggcaatattcccttcagtgccaacaacgccatacggtcgttatccaccgcagccaccaacaccggcgtggcggcgctttcctcaacactcatgaactccgtcctagcgttcgaaatactgtgcctgaattcgtacacatttgtggacataatcacgattcatccagtaatgacggttaggttgagcatcatgaccatgaatgacatgaatccgtcgaacgattccgatacggctccggcgcaatcgctgtcagcgcaaccgttgccacctcgaccggcaccgcagtctgcggcacagtcacagacgccgatgccacagacgccacagtatgttcagcctgggccgagcatgcagccgcaatatgcgggtcagccggaggcatgggcacaaccgctacctccacaagatgtttcacggggtgttccacggattgtttcacaaggtgtttcacaacctgtgccgcaagccgcaatacctgctgtgcagcctgcacaatacgccgcgcagctcgtatacccgacatatcccgtccaacctacgtatcctgcccagccgatgtatcccacgcagccgacgtatccggcgcaatccgcctattccccatacccggcgcaacagtcggctccacagcccctcgctcatccgtactacgctcaaccagtgggctacgcgccacaaccctattccgctgcgccgcaaccattcgtgcaaacggctccggcaatgccagtcacaatgcccaacgcaatgcctgccacgatgcccgcagcaatgcccgtggtcatgccgatcgatcctcgccgtgtatggcgcacgtggcgtcgcaaggtggtcaatcgtgtaatgggactgactctcgcctatgaaggcatgatgctcttgggcgcaatggtcgccaccattatcgtcggcgtaataaccgcgagcgatttgtccggcgtgcagtgggatggcatcatcagcctgatatcggtgttcgtcgcgttcggatttctgctgctcatgcgccaccgtgacatcttcacctgcgaattctggcttggtggccagcatcgcgactcgtacggggagcccaatcagcttggccacatcagccaatatggcggcgggcgcatgcagcctctctgggcgttgatgttcatcgtgctgggcatgggcgtgcaaggcatcgttatgttggtgcaggtcgctttttccatgctgggcaccgatcttgcctctcccacgtcagacagcatcgccgaatccagcgtcaccgtaagcatgtggctgtacgttgggctggtcgctccgatttgcgaggaagtactgttccgcggcgtactgatgaaggagctcaagccgttgggcaagaacttcgccatcgtcacctcggcaatggtgttcggcctgttccatgacgacgtagtgcaaggcacattcgcgttcctctttggcctgattctgggattcgtggccatggaatactcgttggtttggtcgattgcactgcacatcttcaacaatgcgattctttccggcgccatcgatacccttgccggcaactatcttgatgacaacgcatatttgatattctcattgtcgctatctgtgatcggcgtgatcggatcgattatcatattcgtgatatacggcaaagagatgcgccaatatcaccgtacgaatcgtagtattccagacacgtactttggctgggcagctccgacgttcatcatctttgtggtagccaatgccgctttcgccattatttcgtttgtcggcgcgatgatgggttgagtgtgcgtgtgcgcatgcaggttggcttatcgttgaagcatgagtgattttgagccgttttacgatgtcagccgcagttacgaagacaactatgagcaagggccgttcggcgcgttcgccgaggcgctgaaggatggcaacggtgccgatgccgccggaaccaccagcgagggtgcctccgagggtgccttggccacctttttgggccagccggtcaacctgcctttcggcattcccgcaggcccgctgctcaacagccgtttcaccacggccgctttccacatgggtttcgatctggcgacctacaaaaccgtgcgttcgcgcgcctggggctgcaacccgttcccgaacgtgctcgccgtacaccccaagtcggcggacggttcactgacgccgggcagcgccgaactggacgaaggcgtgctggccgacaccaactatgaacagccgatttccatctccaacagcttcggtgtgccctcgcagagccctgacgtctggcagccggacatgcgcgccgccatcgaggccgccggtcccggtcaagtgctggtcccgagcttccaaggctcgcgtgtggagggcatgagcgaggaggaatacatcgccgaccatgccactaccgcccgcctggtcaaggagaccggtgccaagctcatggtgatgaacaccagctgccccaacgagggccacaaccgcctgctatgccacaatccgctgctcgtgggccgcatcaccgaggccgtgaagcaggagatcggcgacatcccgctgatggtcaagctcgcctacatccccagcgacgacgctctggagcttatggtgcgttccaccgtgggccacggcaccgtgcagggcttcagcaccatcaatacgatttccgccaaactggtcgatgccaatggcaatcaggccctgcccggcgcgggccgcgatcgctcaggcgtgtgcggcaatgcgattcgtggcgccggcctcgacatggtcgcccgtctggccgcgattcgtgaaaagctcgggctcgatttcgcgatcaacggcgtcggcggcgtggtctcgcccgccgactaccaggcgtaccgtgacgccggcgcggactcggtgatgtccgccaccggcgcgatgtgggacgccgaactggcccacaagatcaaggccagccggtaaatcggctccaaaaacaagcaacagcctgtacgggccgtgattcccagacgattcccagacagtgcccatgttgcattgaaactgttgctgttatatgtaatcacggccgaacaagctgcataacttaacctctttcttcttctctcctttctctccccggcgcccatcacgccggggtttcttttttgcggtgggtacagccgtcttactcggccgccgccttcatggccacggcgccgacgtagtagaccggcttgtcgaagttcggctggaacaggaagtccacgttggcgagctggtcgatggtgaagccggcctgaatcgccatggaaatcacgtttgccgcgccggagatatcggccttggaacagaactggccgcccttgaccttgcgggtttccgggtcccaggtcagaatcgacgtgactggggtggtggtgagcatgaagtccgggcgataatcctcggtgagcgaggtctcgcggaccgtgagcccgcggcgttcggcaccggcacgggtcagaccggaggcggcgagcgagagatcgtacagctgcacggcggacgtggcctgcgtgcccatgtacttcacggtcggcgtctcaatgttgcggcccaccagcaggccctggcgcaccgcgttggtggccagcggaatgtaatcgtgctggccggtggggttgtagaacacggtggcggagtcgccggcggcgtacacgcccggcgcggacgcctgcatgtagtcgtcgaccacgatcgcgccgttcggcagcatgtccaccttgcccttgagcaggtcggtgttcggcaggaagccgacggccagaatcgccatttcggccgtgtactcgcccttttcggtgaccacagtgacggtgtcgtcgtcattgtcgcggaactcgaccaccttctggccgagcgcgagcgtgacgccgtgctcctcgaacgcggccgccacctgatcggtgatggtcttatcgaaattattggccagcgggcgatcaaggccgtcgaccagcgtggtcttgacgccggtgacgctgaactgctcggcgatttccgcgccgatatagcccgacccgatcaccactgccgacttggcggttttcgccttttccttgatggcgatggcgtgatcccagttcttgcacagcagcacatgcgggctgtcgatgccggggatcggcgggatgaccgggcgtgagccggtggtcacgaccagtttgtcgaaagcgagggtctgttcggcggggtctccggcctcgtccagcgcgcggtaggtgagggttctggcgtcgaggtccacggacgtcacgtcggtgcgcatatacatggtcgcgccggcttcggccagagcggcaggggaggagtagaacattttcttcgggtcggatacgtggtcgcccacccacagggcgatgccgcaggagaggaaggacagcgtaccgttgcgctcgaaaacatggacggtccaatcggggtgctcggcgagaatcgaggtggtggcgaacgtgccggcgtgcgtgcagccgatgacggcgactgtggtcatgaatgctcctttgcttgtggccatggcgtctgatgccattgccctgaatcgtagcgtagaagtatggagaacaccgtggcggcaaatgtgaggaagatcacgttatcggtttgattcgacggggggtatgggatccgttgtgcacggtgatcaaagtttggctggggtgcatttcacggagtcggcacatggcttatggcaaactggacggtagcattttttgaatcttgattgattgaggagagtggcgtggctgagaatccggatgacgtgttgcatgtcgagggcggcaagcctttgaatggcacgatcaaggtgcgtggcgcgaagaacttcgtgagcaaggcgatggtcgccgcgttgctggcaccgggcaagtcggtgctgaagaacgtgccggagattcgtgacgtgcatgtggtgtccgatttgctacgtctgcacggcgtggacgtggatgtggacggtgcgaacggcattgtgaccatcgacgcctcgcgtgtgcagctggccgatgtggccgacgtggatacactgtccggttcgtcgcgcatcccgatcctgttctccggcccgctcgtgcaccgtttgggcgaggcgttcattcccgcgttgggcggctgcgcgattggcggacgtccgattgacttccatctggagacgctgcgcaagctgggcgccacggtggacaaggaacacaaggacggcatccacatcaccgcgcccaacggcctgcacggcgcgaagatccacctgccctacccgtcggtgggcgccaccgagcagactttactggcggccgtgctggccgagggcaagaccgaactgtcgggcgcggccactgagccggagatcatggatctggtgtgcgtgctgcagaagatgggcgcaatcatttctgtggacgttgatcgcaccttccgcatcgagggtgtcaaggaactgcaggggtacacgcacacgtcgctgacggatcgcatcgaggcggcgtcctgggcgtccgccgcgcttgccacgcacggtgacattttcgtcaagggtgccacccagccggagatgatcacgttcctcaacgtgttccgcaaggtgggcggcaaattcgaggtgacggacaagggcattcgtttctggcatccgggcggggacttgaagcccgtggcgatcgagacggacgtgcatcccgggttcatgaccgactggcagcagccgctcgtggtggccctgacccaggccaacggcctgtcgatcgtgcacgagaccgtgtacgagaaccgtttcggcttcaccaagccgctggtcgagatgggtgccaccatccagttgtaccgcgagtgcctgggctcgctgccgtgccgtttccggcagcgcaactacaagcattccgccgtgatcttcggaccgaccccgctgaccggacgcgacatcgacgtgccggacctgcgtggtgggttcagccatctgatcgcggccttggccgcgtcaggcccctcggacgtgcacggcatcagcctgatcgaccgaggctacgccgacttccgcggcaaactcgaagcgttgggtgccgacttcgattaattcggccgttcctcggctcccctctctgaggggagccacaattttttacaacagcccgtccgcctcgagtgcggcggccatgcggtcgaagcattcctccagtagcgggtagggcatggcgaagttcatacgcacgcaaccgcgcccgacctcgccgcattcgcggccgtccgtcaacgccacattggctttcttgaagaaatagtcggccgggtcatcgatgcccagtggcgagaaatccagccacgcgatatacgtgccctgcggctccacatagcgcaccttggcgaatctcgtgcgcatctgctcgttgaccagcgcgatattgcgctcgatgtacgccatcacgccctcgaaccatgccgcgccgccgtcataggccgcagtggtggctatggcaccgatggtggccgtctggtgctcggaccattccgcgttcctcatccatagttccagatcgtccggattggtgagaatcacctgcgcgcacttggtgccgggaatgttgaacgacttcgaggctgaagtggaggtgaaagcctgcatggccgtctgccggttgattgaggcgaatggcacatgcgtgtggccttggtagacgaacggcgcgtgaatctcatcggagaatatacgcacgtcgtacttggcggccaggtcggacaatcgcagcatttcttcgcgcgtcaataccttgccgatcgggttgtgcgggttgcacagcacgaaggcatggcagccgttcgcgaacgcctgctcaatggcgtcgaaatcgaacagccattcatcattgcgcccgctgctctcgccggcgccctcgcacagcatcggaatctcaagaacctccacgccatacaggcgcggcacgctcaggaacggcatataggccggagtcggcaccacgatggagttgccggcgcgcacgatctcgcgcaggaacacttcgaacgcctccagcacgtccggcaccggacggatgcacgtcggatccacatcccagccgtatcgacgctgccatgcggcgcacgagcgggcgacctccttcttccacgggtcgggaatgtagccgagcgcgccacgttcggtggcctcttcgatggcttcggccacgcacggcgccagaccgtaatccatctcggcgatgaatgcgccgatgcagccggggtagcgggtccatttgtccgaaccgacctgcttcagatcttcgatggtcgtcacgtcgatgtgattggcatcaaagcaagaggcaccggcggttgcgctgctcaaagtcgttgactgggaaacgttgttcatgctcataacatgtcattgttcctggtacagaagggccgctcaacggtctggctccccgaaatcgtgatggcgttcgcaagcttgcttatcgctgtccgactacttggcactcaaatatttgagtgacgtgcgctcgagctcttcgagcaatgaaccgagcgcgggacgatggtcgccggcacgagtcacgatgccgacctcgcgcgccgcaaaatcgtcggcgatgggacaggccaccagatcgccttgcagattgatatgtgtatcgagcgccggcaccagcgagacgcccatgccaacctcgaccaggttctgcgtggcccagtaatcatccgtgcagtggcggatatccggcttgaatccggcacgggtggccagtttcaccaaatttgcgcggcaggtggggcagccggcgatccaatgctcgtctttggcggcggacagcggcacgggttcgccggtctcctcgaatcgtttggcgatgtcgctggagcggcggaccaacaatcgcatcggatcgtaacccagcgactggaaggtcagatcgtcgccgatgtgcaggaagttcgggatgctgctgtaccggaacacggcggcggcatcggccttgccttgggaaatcagaccgatcgcctccggcggctccatctgaatcaggctcagctcgatgtccgtgaacatactgagcttgaccacggtacgggccgcgatagtagagcagattgacggtggggccaccaaatgcaggtgagcaaaccgatgatgccgataatcctcgacctcacgggccgcccgctccagccgatcggcgatggcctcgccgtggcgggcgagcatcgaaccggtggcggtgagttccacaccatgcgaggtgcgttgcaccagagtcgaaccgcactgtgcctccagctttttgatctgctggctgatggccggctgcgaccaacccgtggccttggccgtggcggagaacgaaccatactgttcgatctgccacaacgtgaccaatgattgggggttgagcccggccatatgcacctctttcgcgcgtcgttccattatggccgccgacaatgaccggacgcggcacggtgtcgccatcgccggtatccttagaagaatgagccctgaagccttaagtgaactgatttccagcattgcccacaacctcgtcgccgccggccaggccggcgcgttgaccgacgagctgattccgcccgtcgacaagctcgccgtgatgcgcccgaaggaccgcgcgcatggcgactgggcctccaacatcgccatgcagctggccaagaaggccggcatgaagccgcgcgatctggccgagccgttcgccgccgcgctcgccgaagccgacggcatcgccaaggtcgaggtggcaggccccggcttcatcaacatcacgctcgactccgcctcggccgccgccgtggtggacaccgtactcgccgccggtgccgtgaccgacaccgacaagcacctcaacaaggtcaacgaatacggccgtaatgcccatctgggcggccagaccctgaacctcgagttcgtttccgccaaccccactggtccgattcacatcggcggcacccgttgggccgcggtgggcgacgccatggcccgcgtgcttgaggccaacggcgccaaggtggtgcgcgaatactacttcaacgaccacggcgagcagatcaaccgcttcgccaagtcgctggtcgccgcttgggctgaggccaacaacctcggtgaggccggctaccagaccgaaaccccgtgcgacggctacaagggtgcctacatcaacgagatcgccgcccgtgttcaggccgaagccgagtccgacggcgtggacctgaccgcactggcccaccaggatcaaggcctcaacgacgacggtgaaccgctcggcgaggccgacaccgaagtgcgcgaggaattccgcaagcgcgctgtgccgatgatgttcgatgagattcagaagtccatgaaggacttccgcgtgaacttcgacgtctggttccatgagaacagcctgtacgccgacggcaaggtcgacgccgccatcgaagagctcaagtcccgcggcgacatcttcgacaaggacggcgccacttggtttgaatccaccaagcacggcgacgacaaggaccgtgtgatcatcaagtccaatggtgagttcgcctacttcgccgccgacatcgcctactactgggacaagcgccatcgcgccgaaaacccggctgacgtggccatctacatgcttggcgccgaccaccacggctacatcggccgcatgatggccatgtgcgcggccttcggcgacgagcccggcaagaacatgcagattctcatcggccagctggtcaacgtgatgaaggacggcaagcccgtgcgcatgtccaagcgcgccggcaacgtcgtgaccatcgacgatctggtctccgtggtcggcgtggacgccgcccgctactcgctggcccgctccgactacaaccagaacttcgacatcgacctggccctgctcgcctcgcacaccaacgacaacccggtgtactacgtgcagtacgcgcacgcccgctccaagaacgtggaccgcaatgcagccgccgccggcatcagctacgagggtgccgacctggccctgctcgacaccgaggccgacggcgaggtacttgccgccctcgcccagttcccgagcgtgctcgccactgcggccgacgaccgccagccgcacaaggtggcccgttatctcgaagagctggccgccacctatcacaagtggtacaacgtagagcgcgtggtgccgatggccctgaccgatccggaaacccgtggcgacgatgaggctcgcaaggccttggagatcgccaagaatccggagccggcccgtgccgccgcccgcctgaagctcaatgacgccgtccagcaggtcatcgccaacggcctcgacctcctcggcgtcaccgcccccgaaaagatgtgattatgcccatttctccaatttggccggccgctacggctgtgaatgccgacggtgccattacattccacggtcgtaccgccgaatcgctgcttgacgagttcggctcgccgctctatctcatcgacactgatgaagtagtcgcacgtgccaggcacttcgtgcgcgctgccgccgaagcattcaacacatccactacgcacgtgagctttgccggcaaggcgttcctgtccaaagaaatcgtgcgattggtcaccgaggccggcatgttcgtggacacctgcacgatgggcgagatgaaaatcgccctcgccgctggcgttcccggacgtcgtctggtactgcacggcaacaacaagtccgatgaggaaatcgcgctggccatcgaacagggcttcgccaaaatcgtgattgacgagcccgacgagccggagcgcgttgccgccatcgcccgcaagctcggcaaacgcgcccgtgtgatgctgcgcgtcaccgtcggtgtccacgccggcggccacgagtacatctccactgctcacgaggaccagaagttcggcgtcccgctgttggcggccggagccgacgccgcagtgctcgacgtgctgaacaacctgacggacgtgacacctgccgcgaccaacgcgcgtattgcggagtcggacgttaatgctggcaatgaccaccctcagtcgactgcgccgatagctcccgccagcgggagcggcaaaccggcacgcgaactgcgttatgacgtcaagtatccgtacgacctgagccatgaggaagtctccgatacggataaggtacttgccgccgcgatggaagccattgcggacggtccgtccatcgccgtgctcaagatcatcctcgccaaccaggacgtactcgaactggtcggagcccactcgcacatcggctccaacatccacgatgcggacgccttcattcacgcggccaagcgcatgatgctgctgcgcaagaccctgtgggccaccgacgcctacatcctgccc

SEQ ID NO: 3926 - DNA, 24386 bp, Unknown
  R22_24m  MAG No. k141_17818
ctggccgcaagcacccaaggatgggacgacaacgccaatgattatgcgccattcacgaactacctgcttggcatcatactgtccgcgtgcaaggaattcgacgaacgcatcaatctcacggcaggcggcagagcgcagggagcaccgcgagtagccaccaagggaatgcggattgaagcactgcttgatcgatccctagttccactctccaaggccgatattctcgctcgcatgcccgataccagcaccaccaccattgagcgcacgctgaaatcactgttggactccggtacgatcatcaaaatcggtgccggtcgcagcacccgctatgtgaaacgccgctaaacgcatccttgtgcgcaacatctcgtcactcttccggcgctccgctggccacgcgaatcatcgcgtactgggactcgtagaggcggtagtacgcgcccttggcggcgagcagctgcgcgtgcgagccgtgctcgacgatctggccgtgatcgatgtagaagatctcgtccgcgttctcgatcgtcgacaggcggtgcgcgatgatgaagctcgtgcgccccttgagcagatgctgcaggccggcctgcatcgcctcctcggtgcgcgtgtcgatgttgctcgtcgcctcgtccaggatcaggatacgcgggtcggcgagcagcacgcgcgcgaaggcgatgagctggcgctggccggccgacagggtcgatccgcgctcctccaccaccgtgtcgtacccgtcgggcagttccatgatgaactcgtgcgcgtgcacggccttcgccgccgcctcgatttcctcgtcggtagcgtcgagcttgccgtagcggatgttctcgcgcacgttgccggagaagatgaaggtgtcctgtagcatcacgcccatctgccggcgcagcgatgcgagcgtcacgtcacgcacgtcgtagccgtcgatcgtcaccgagccctcggacacgtcgtagaagcgcgacagcaggttgatgatcgtcgtcttgccggcgcccgtcgggccgaccagcgcgatcgtgcgccccggttcgacgtggaagtccacgaggttgaggatgttacggccgtccttctcgtagcggaacaccacgtcgttgaagtcgacgcgcccgcgaatctgcggcaggtccgccgcgtcgggcttgttgcggatctccggcgtgacgtcgagcgtctcgaagatgcgctcgaggtacgccgagcaggtgatgagctggttgtagaagttgccgatgttgatcaccggattccagaagttgttcgcgtagccgacaaacgcgatgagcacgccggtggtcacgttcacgcccccgaagcccatcacgccgacgaagtagatgaacgagatggtcatcacggagatggtctgcacgcccggccacatgaggaactggatgtgcacggcgtgcatccacgcggaacgcacctcgccctgctgctcctggaaggtcctgaactgggcctgctcctgcgcgaaggtctgcgtggtcttcacgccggcgatcgactcgtggatgtaggcgttcaggttgctctgcttgttggagagcttctggaaggcgcgccgctggaagatctgcagcacgcgcacccagatgatgagcaccgggaacaggatcaagctccacagggccagctgccagtcgatcacgaacatcacgatcagcgtgatcacgaaggtgaacacgtcggagatcacgttgatcagaccggagctcagcgtgtccgaaagcgtgttcacatagttgaccacgcggatcaggatcttgccgtgcgggcgcgaatcgaagtagctgaagggcagcgtctggatatgcgtgaagatatcgcggcgcatgtccttgagcatgagctggccgacgcgcgtgatcgccaccgtgcggtagcgcagcccgaactcgtacagcacgatcagcgcggcgaggattacggcgaggatgccgagcttgccgaggtccttgttcgggatcgcctcgtcgatcatgatcttggtcaggtacggcacggcgacgacgatgcagctcatcgagatgacgacgacgagaatgcgcgccacctgtgccatatacggtttgagatatttgccgacgcgagcgatgtcgtggaggttgatggactcctccagctcctcatcctcgcggaatgtattgcgttgtgccataagtcctcttctaaaacccctgtgcggcgccggactggagtccgagctgcttgtggtagatgtcccagtagcggccgtgtgcggccacgagttcggcgtgggtgccgcgttcgacgatacgtccgtgctcgagcaccagaatcaggtcggaatccttgaccgacgagatgcggtgggcgatggcgacgatggtcttgccgccgtccatctccttgaggtgcttctggatctccgcctcggtctccatatcgacggccgaggtcgtatcgtccataatcaggatcgacggattgtccgcgagcgcgcgggccagcgacaggcgctgcttctgcccgccggacaggcccacgccgcgttcgcccacgacggtgtcataaccctgcggcatcgacctgatgaaattgtccgcgccggcgatctgggccattttctggatatatcggtcgtcgctatcatcgctggcaccaaaaccgatgttgccgccgatggtgtcggagaacaggaacgtatcctgcgccacgatgcacacctgcgagcgcaaggtggtcagcggccagtcgcgtgcgtcgatgccgtcgatgagcacatggcccacggtcgggtcgtagaagcgggagataaggctgacgagcgtggacttgcccgcgccggtttcgccgaggatgccgagcttggagccggcgggcacggtgaagtcgaggtccttgaggatcggggtctccgggtcgtccgggaaggcgaagctgacgtggtcgaagcggatgtcgcccttgatgtgcagcgggcaggacttgcgttcggcggactgctgggcaccggatgttccggaagccccgggcgctccggtagcctcatcatcgtgcttgacctgctcgacgatcgtgaccgcctgcttgacggcttcggccgcgtcgggcttctccacgatgcgcggctgttcggtgagcagcttacgaatcttgatgcagctggcgttgaatcgctgccagtcgttgatgagccagccggactggcgcaccgggccgtcgatcatccacaggaaggagttgaaactcaccagattgccgagggtcatgtagcccttgatgacaagaaagccgccgaggccgagcgtgatgagctgcagcgagaagccgaggccgtccagccagggcatgtacctgcgcgagttgtaggccagggccatgttgcgctgcatgtagtcgtcgttgtgctcgtcgaacttttcggtctcgtacggttcgcgcacgaatgccttgaccacacggttgccctcgatgttctcttcgaccatggagttgagggaggccagcgagttgcggatggcgaagaacagcgggtgagcgtgcgtggacaggccgcgcgtgagcacaaaaatgaacggcgtgacgcaggccaggacgagcgcgagtcgccaatcgatagcgaacatcacgcacagggcgcccacgaacatgaccacgcagtcggcgatctgatagctcacccaactcaggcagtggcggatcgcgtcggtgtcggaggtcaggcggctcatgatgtcgccggtgcgtgtgtggttgaagtacgtgaagtcgagctcgtgcagcttctcgtattcgtcggagacgaggcggtagaccgagttctggccgaaacgctccatccacatctggtagccgtatcgcgcgcccacgcggatgatggtcatgaggatcatcagtccacacagacgtggcagttcgtcggcatgtccgccgacgatgacgcggtccacgatgataccggacagaatcggaatggtcagggccatcgtgttgttggcgatgaacagtaggagcgcgcctaccacgcggggcaggtctggtttgcagtatggcagcacccatttgagattgcttgcgctggtatcgattcccggatcgacgtacatgtgaggagatcaccgtttcttggggattgtttgcttgtggtatggtgcggcatgctcctgcgccgcacgcggcaatcgctgccgccgcgattcacgatcagccgtgcttcgcactgcgcctgtcattggccgcacgaccggagctctccttcaccggtcgaagcacgttcgactttcgcaaacgcgtactagtctagacggcctgcgtccaatcgcaacagcctacaaccctgcgtgttccccgcattagcaacgcggcacgacccgctaagcgcaacattccccggaatgtgtcgcgcgaaacgttgcgcatgcggcaatgcacgctcgagacctgttgcataccagtcgaccaaattatagaatcataattaagtaaattacgattctataatttgcgcgtgtgcgccagggcagacagcaaagcaaggagacaagggccatgttcgtcgggcgagataaggagctttcggcactggaacgccgctggagctcacagcagttcgagtgcgtcgtggtctacggccgtcgccgcgtgggcaagaccacactcatcaaccgcttcctcgaagatcgccccacgattttcttttcggcaatcgaatccagcgctcccaagaatctcgaatcgttaagccgcagcattgctctgtatgaaaagggctcagaggcgttcgagacaacgcccgtataccgcagctttgaatccgcactggaagcggtgttcgcgctggccgcaaagcaacgcatcgccttcgtcatcgacgagtacccatatctggctaaagcagaccggaccatcaattcggtcctgcagcatgccatcgaccgccataaggatgacagtcagctcatgatggtgttatgcggctcttccatgtcgttcatggagcgccaggtgcttgggtatgagagccccctgtacggcagacgcaccgctcaaatcaaagtggagccattcggctacgccgatgtccgcaagttcttgccaagatacagcaacgaggacgccgccactgcttacggacttaccgacggtatcccgcagtatcttcggcaactggacgacggcatcagcatccgagacaacatccgttggaacatcctcgacccaagctgctatctgtttgaggagccagacaacttgctgaagcaggagctgcgcagtccggccgagtacaacgccgtaatccaggccattgcctccggggcatctcggtcgaacaccatcgccaccgcatgccatatggaatcgtcctcatgcgccacctatttgcgcaatctcatcgatctgggaatcgttcgcaaggagacacctttcggcgaggacgctcctcgcaagacgatctaccgtatcgaggactcgttcttccgattctggtaccgatatgtgccgaacaacatgtccctcattcaatccggtcatgccgatctcgccgccgaccgtgttatgcgcactatctccgactttatggggcaggtgttcgaagacatctgcgttcagtggatatggtcccataacggtaccgaggcattgcctttcctcatgcttgatgccggacgttggtggggcgccaatccgaccacccgcagtcaggaggaaattgacatcgtggcttcaggagaaaaaccgaaaactctcctattctgcgaatgcaaatggcgcagcgtgccatccggtctgcagcagttggaagtgctgcgcaatcgcgccagactgctgcaccccgaaaccagccattacatgctgttctccaaatcaggcttcgacgagcatgtcgccgcccgcgcggcgcaagacggtacagtgacgcttgtcgattttgcggatatggattagtcggttcactccattgcggacggtaagggtgaagtaacaggctgggtcaatggaccgaaccgctagaccgggcaacagacccaatccgtgacacattcccgggaaagtggcgcatgtcatatcacgctcaaacaacccagcatgtatatgggcaggtattcggctcgtccaacagtctccgcgttgccatcatggaacacgtaggcatgtcctcacacgcttgtatctcgtcaagaaacagcagagtcttgcccggcgtaatttccgcgccggaaagtaccgataaccgcagtatcaggtcttcggtgtccttggccttgcttaccgtttcgaccgcctgaggcatttcgatgaaattcacctcagccacatgctcataatggtctgcaccgaactgctcaatcagcgtggtcttgcccacctgccgggcacccgtgaccaataagccctacttggttttacggttcttccaagtcagcaaccggccgaaccatatctcgcggcttcagtcatccttcatcatcagtattcggtagcggccctaaatcagctccgccatccggctcataatcactcgccaaccacgggcggaagtagctcccgactatccacagtgggacattggtcagccaatcctgctccttgtaattccgcatcgacgtacggtaaccgcaaatcccgtatttgtcgcacagccacttcaagctacgcttatgacgctcggtaccagctttggcctccagcggaatgattgcgccattacctgcaaagacaaaatcaacttctcccgtactgttcgcattcgaccagtacatcggtgtgatgccggcggccactaattgctggcaaacatactgttccgttaacgcaccacggaattcggtcagcccgtcatcaccaaggaccacgcttgcgggagtcagatccagggccgctgccagcagcccaacatcatggagatacagtttgaacgcggaatcatcacggtatgacggcaatggtgccgcaggtttttcgacgcgatacacccgcaacgcaagaccagaatcgacaatctgctgaatcgcggattcatattgcgccacccgagcgccacgagcgatgtggccaaaaataaatttataccgcaatacacacttttcctagggttgcaattcgcgtattctacattttttctagggttgcgattgtccaaaattacatttttcctagggttaataatgcagaatactgcacttttcccagggttagtaccctgaccttccctaatcacacggtgttgtaaaggcgggcggggaaggcgtcgcggtattggccgggggtgagtccggtgcggcgcttgaagacgcgcataatagaatatctcaagcatcgatgaatacggagatgatcacaatggctgattacatcggaacagtcaacaaccaatcttcaacacagcccaacggtcacagttcacatagcaacaccaccgagtcgctatggcgcggcacggattatggcaaatggttcgtagcggattcatgcacgtcgctgtcatcaagtatccaaggtttcgcaatgccactcatcgcgcagaccgtcacgggctcaccggcacaggcgacgctgctggattcaatcatgaccatgatatcgtcggtattgcggttgccaggtggcgtggtacaagataagtacgaccgcaaaaaacttatgattgcgttcggcctgattggtttcgcactgttcggcatatgcgcggccctaggatgggcgggattactcatatacccggtgctgatggtacttgcgatatgcctcggcatacgctcaggcctcctaggaaccacgagcaacacgatgctacgaggcatcgttcccgatcaattgctgcccaaggcgtcaagcctcaatgatggccgcgatgccgccctcgaactcgccggcgcaccagtaggtggcgtattgatcggcggcggtctatggctgccattcgcagtcagcgcgctgctgaatctattggaaaccgcggcggcgatgcggatcacaaaatactggcatcgtggcgggcggaccaatgcggagggccgcgcccttgccgacgatgaggccgatgagaatggcgatgcggccaacatcactcaggccgctgacgagcaggcaacgaccacgacatcatccgcgtcacagtattggcgtgagatgttttccggattccgctggcttcttagcgagcgattcgaacgtcgcctgattttgtcgagcgcgctggcgttcgcgtgcttcaactcgttcctgctgattacggtgctctcgatcggctccgacccatcacatgtggtgtcagccagtttcatgaacgtttctgtgtctgtgggcgtcatcgttggctcgctcatctcttccgtgctggttcagcatgtgcgcggcggcatagtcgccgtatcgttctacgtgctgatgagcatcggcgcgctcggcgcagcgctggctccgtggattcttgcgcgtatggcgtttctggcaatttcgctgctggccctaccggccggcaatgcggtaatcaacggattccaatcattgctcatcaacaaggagcatatgggccgcgtattcgccggcatgggcatgattgagacgattgctgccccggtgatcacatttctgtccggcatcgccatgcaacactggggttactcagtcacgtccgtggctttgggcttgtgcatcgtggcggccgcgatccctgcagtgacaatgagggaactggtcacactgcctaagccggatggctgggaggaccatatccgcaaatccgggctcaccaagttctgacaacaagtaagggcgactatctcccggatttgtgacgctcggcaaccgtcagcgtcacaaatccgggaagaggaaggtggatacggtttcagccgcgcgggcagcaaggtggacaaatcgttgccgggatggaatcgcggcaagtatgcaaaagcctcccgttcgcgcgcgacgcataagcgcgcaaacgggaggcttcccaaccgcagcatcatatgcagaaataaggagagtaaggcatatgctgccgcggtcacaccccgccgggaacctgccgcaggccgcgtccggcatcgaaagccatgcagtcgatgcgtgcggccggccgttcccggcgcggtggccatgtcagacgtcagtcagacgtcatcacttctgccagccgatgtcctgcggcaggttgccggcgaagccggacgggccgtagttggccaggcccttcttcgcaccgaggtacgaagccgggttggagaccgggatagtgccatacagcttgagggcttccttctcggcggcgttcacagccttggtctgctcgtcatagtcggagaggctgccagccttcttgacgagctcgtcgatcttcttgctgcccacgtaggagaagttggacgggccgtcggaggtgtacagctgcggggcggacaccacgaaggtcatggcgctcggagcctgccaagccatcggcagcacctggtagttgccggaagacacggtgtcggagaacttggactcggccacgttcacgaccttgaccttgatgccggccttcttcatcatcgcctggtaggcgttggcgagggcctgctgggtggcgttgtcaccgaagaaagtgaaggagatctcaagggtcttgccgcccttggcgtagtagccgtccttgcccatcttgtagccgtcggcctcaagggttttcttggcgttgtccacgttgtacttggcctcggcgggcaggttgttctcgtagcccttctggaacggcagcagcagctcggagcccggctgctcggccttccagttcaggccctggaactgcacgttgttgtaggtgttcacgtcgaaggcctgagtgatggccttacgcacctgcaggtcgtcaagcggcttggacttgctgttgtactccagcacgcgggtcttggtgctgtagccgatgcgcagctgggcgtccttgacggaacggatggccttgatgtcgtccttggtgttggcctccacggcgtcgatctcgccgttctggaaggcgttgagggaggcggtgtcggccatctgcttgtagacgatcttgtccagcttcggcttgttgccccaccacttctcgttcggcacgaaggtgacctgggagtcggagaaggagtcgaccttgtacggaccggcggcccactcgttgtgcgggttcttcacccagccctgggtgaaggtcttcgggtcggcggccttcgggttcaccagagcgccgaagacttcctgccacgggtagtacggggtcttgtaggtcaccttgacctgcttcgggctgtcgccctgctcaacgctagcgatacggtcgaagccgtcggtgctcggcgggttgtagtccgggttggagccgttgttggcttcccacgtggccttgaaggcggtccagtcgatgtcggagccgtcgttccacttggccttcgggttgatgtcgtactgcacgaccatcgggtccttgctcacgagcttcatgtcggtcaggaagtccgggttcaccttaatcggggagccattgacctggtcggtcatgagcaggctgggctggtaccagctccacagctcggacatgtagccggtgttgccgtcggaagacaggtagttccagttcgggccgatttcgacgatggacagggtcagcgtgccgccgtccttgacgttgtcacggctctggtggttgtcgtaacgctcggtgaccttcggcatgggcaggtcgccggtgtacgacgaatcgatgccggccggcggttcggtggcgctcgaggcattgctggaaccgttgccattgcccgcgccgcagccggcaagcagcatggcaagcgccgcagtggccgcggcgagcgcggtcagcttacgtgtcttgttcattgttatttcctcctctatatggttccgaccgtcatgcgaaatggcatgcaacctgatggccgctcggtcgggaagtgtcatacggccgcagcgccgggcgttcgccgcggcagcgggcctgttgttcggcgctcagcttgggcatgagcgggcagcggcccatgaacgggcagccttcgaacgtctcggtggggctgggcacctcgccctgcagcacgatgcgctggcgggtgcgttccgccttcgggtccggcaccggcacggcgctgatgagcgcctgggtgtacgggtgcaacgggtgctcgaacacgtcttcggtgtcgccggattccacgatgcggcccaggtacatcaccgccacgcggctggagatatggcgcaccaccgacaggttatgggccacgaacaggtaggccacgcccagcttgttctgcaggtcctcaagcaggttgatcacgccggcctggatggacacgtccagtgcggagaccggctcgtcgagcagcacgagcttcgggttgaccgacagcgcacgcgcgatggcgatgcgctggcgctgaccgccggagaactgcgtggggaagcggtccacctggtcggggttcagctccaccagacgcatgagttcaccgatgcgttcgcggatctgctctttggagtagtgctggaccttcatcggctcggccaggatgtcgtagatcggcaggcgcgggtcgagcgaactcatcgggtcctggaagacatactgcacggccgaacgcagctcgcggcgcttctcgcacggaatcttgtgttcgagcttggtgccgaacatctcgatctcgccgtcctgcggctgcttgaactccatgatctccatgagcgtggtggacttgcccgagccggactcgcccacgagcgccacggtctcgccttcgcgcacgtccagcgtcacgtcgtccacggccttgacctcgccgatcttacggcgcaggaatccgccggcggtcagcgggaaggtcttgcgcatgtgcttgacgtcgagcaccatcttgcgttcgtcgcgcgggatgccggcgaacttcgacttggcggcctcggccaccgtgtacacgtcgtggaaggtcaggcccttgtccacgatctcctgggtgcggtggcaggccacgaactggcccgggcggcccggcaccggctccatggccggctcggtggtgtggcatatgtcggtggccagcgggcagcgcggcgcgaacgggcagcccttgggcatgttgaccaggttcatcggggagccaggaatcggcaccaggcggctgttgcgttcgcggtcggaacgcggcacggcacccagcaggcccatggtgtacggcatggccgggtggtcgaagatggagtcgacgtccgccttctcgaccgggcggccggcgtacatgacgacgatgtcgtcggccacgccggcgatcacgcccagatcgtgggtgatgaagatgacggccgcgccggtttcacgctgggccttgcgcagcacttcgagcacctgggcctggatcgtcacgtccagtgcggtggtcggttcgtcggcgatgatcacgtccgggtcgttggcaatggccatggcgatcatcacgcgctggcgcatgccgccggagaactcgtgcgggaaggacttcaggcggtcctccgggtccgggatgccgaccaggttcatgagctcgatggagcggtcgtgaatctgctgttcggtcatcttcggattgtgggtgaccagcgcttccttgatctggtcgccgatggagaacaccggggtcagagcggagagcgggtcctggaagaccatggcgatgcccttgccacggatctcgctcatctcaagatcggacttgctgagcaattcctcgccgtggtaggtgatggagcccttgacgctggcgttcttgtccagcaggcccatgatggccatggaggtcacggacttgccggagccggactcgcccacgatgccgagggtcttgccggggtacaggtcgaagttcatgccgcgcaccgcgtgcacggtgccggcttcggaggcgaagctgacggtgaggtcgcgtactgaaatcaccggttcggatgccatgccttgcgctcctgtggtgttggggttggtgttggttgttacgttgcttgcgttgcgttcgtcgctcatgatgcccgtctcccctctcactcggccttgccgccggaacgggagtacgggtcgatggcgtcacgcagtccgtcgccgatcagctgcacggagaaggtcaggacgaccagcaccacggacgggaagatcagcacccatggcgaggtctgcaccacggactggccggcgttgagcagcgtaccgagcgaggtgtcgggcgccttgatgcccaggcccaggaagctcagcgaggtttcgctgttgaccgcaccgatcacgccgagcacggtgttgatgaccagcaccgaacccaggttcggcaccagatgacgcacgatgatggtgaaggacggcacacccatgaacttcgccgcgcggatgtattcgcgatcgcgcaggctcagggtcagcgtgcgcagcgtacgggcgtagccgatccaaccgaatgcggtcaggccgatggccagccacagccagtcgctgccgccggccgccatgccgacgatcagggcgatgagcaggaaggacggcacgacgagcagcatatccagcagccacatgcccacgcgctcgaaccagccttcgaagaacgccacggccgtgcccaccagggcggcgatgatcgtggtgccgaacgagctgaagataccgatggtcaacgaacggccgaggccgcggatgatcatcgcgtacatatccgagccaccgaccgtggtgcccagccagtgctgggcggacggcggcgaggcgagggcggcgaaatcgggctcatcgtagctccactgggagaatttcgagccgaaaatcgccaaaagaatcagcagaatcagcaccaccagacccaccacggccgaggggcggcgcatgaatcggcgcacatacagctgcatgcggccggtgcggtggaagtcgtcggcgctggaagcctcctgggcgttcctggcgtcggcagactgcggctcgctgccctgcggatcggtgagttccatatcctgggcggcggcgtcggagaccatgttttcgttgtcgttcatcatgttagatcgtcctttgcgcggggctcagctcagtcggatacgcgggtcaagccaggcggagaagatatccgccagcagcgcgccggacagcgtgcacacgccaccgaacgcggccacggccacggcaccgttgatgtcgttgttggcgatggtctgggtgaagtacatgcccaggccgttgatggcgaacacgttttcggtgatcaccgcgccggtgaacacgccggcgatggagaaggccacatccacggcggtcggaatcagcgaggtgcgcagtgcgtggcggcgaatggccgcgttgagcgtcaggcccttggcgcgggcggtgcgtacgtagtcggcgttcatggtgtcgagcaggtacgtgcgctgggtgaggtggtagcccaccatgcccggaatcgtcatcacgatggtgggcaggatcaggtgctgcagatagtcaaacacccaaagcaccgggttggagccttggtaggagtgcaggccggtcacgtagaacgcgcggctgcccacgatgttgttgaagttgatggccagcagcaccaccatcaggcccatgacggcggccgggaccaccaggaagaacgttgcggtggtgttgagcacgcggtcctgccacttgtactggcggatggccgtgtacacgccgatgctcacgccgaagaggatggagagcacggtggcgagcgtcaccagctgcagcgaagcggagatacgggaggcgatggccggcgccaccggcgactggtccgggctcaggccccagttccactgggtgaggatgcccttgagccagcggaaatagcggatgacgaccggcgtctggtcgttgatgttggccagatcgagcgaccggttaatcgacgcgatcggcggatgcggattgcgcgacatgtagttcgaacgcggatccatgaatgcgctggccaggaaatacgtcatcgatactgccacgaacagcatgatcacgtagttcacaatgcgcttgatgatgtacttgaacacccaaccacctcccaaataactagggaagtgatacccccccccgctcaaaaccacaaattgagttcaatatatggaatatgggtattgacttttccgactttttcctgtacggaaaaccgcgaaaacacttactgtatattgggcaaacatccgtttgttaattttgtatttcctgagcctttgctggacttgccttatactttcgtgtcagcagtccgccggcccggatggtgacagtccccgccgccggcaacggattatccatcagcatcatcagcatcagacaggggcatcatgacgacagacgccagcgcacgggccatcaaacccgaacttctgcgtacgtacaccgaggatttcaacaaggaccgcgccaacctgatcgcggcggacgcggcggtttcggccggcgtactcaaggcggccaccgactatcgcggcgtgcgtgcgctgccgcgcgacttctccatcgaactcaagcagggttcgatcaccaatcaggagcgttccggccgctgctggatgttcgcctccctgaacacgctgcgctacgagcttatgcatcgctggaaccttgaggacttcgagttctccgagacctacctcttcttctgggatgcgatggagaagtcgaacacttatctggagaacgtgctgcgcacgctcgacgaggcgaccgattcgcgtctgttcgaagccatcaactggggcccgtccgacgacggcggctggtggcagatgttcgccgcgctggtgaacaagtacggtctggtgcccaagagcgcctacccggagtctgagaactcccgtaattccgatgatttcaagcagtacctcaactccaagctgcgcgagttcgcggccgagctgcgccgccgttcggctgcgggcgctggcgaggacgagctgcgcgcgctgaaggacgagtacatgggcaccgtgtaccgcatctgcgccgtgtcgcttggcgagccgccggagaagttcgacttcttcgcgcgcaccaaggatgatgatgaggataagaagggcgaggcttgcaagtgcaaggccgaggccgacgcagacggcaaggccgaatcctgcaagtgcggcgactcctgcaaatgcgagggcaaatccgacgccaaggcctgcaagtgcgataagaacaagtccgacaagccgaaaaccggtaaggacgagcgcccgcagattcgcgagatcggcatcaccccgcttgagttctacaagaagtacgtgccggtggacgtcaacgatttcgcgacgctggccaacgccccactcaagagccgcccgttcaaccggcgctaccgcatccgcttcagcgcgaacgtggccgaggcgggcgatatggagttcgtcaacgtgccgctggacgtgttcaagaaggccgcgcttgaccagctcaccgccggccacccgatctggttcgcctgcgactgcacgcagttcgcgctgcgcaaggacggcttcttcgaccagtccgtggtgcgcgtcgaccagctgttcggcaccgagttcaccggcgacaaggcccacggccttgaatacggcgacagcccgagcaaccacgccatgactttcaccggcgtgaacctcggcgaggacggcaagccgaaccgctggaaggtggagaacagctggggcaaggacgccggcaaggacggctactacgtcatgtccgacgcctggttcgaccgctacgtcaccgagctcatcatccgcaaggaatacctcgacgacgccacccgcgccctgctcaccgccgaaccggtcgagctcgacccttggcagcccctcacccgccgctgccgctgacgttccgctggcgggagcatatattcgaatgccccttctctctgttcagagagaaggggcattacgttatgcgagtacgcccggccgcacctattcgagactatcgcggctgagctgagcaaaagtgccgtcatcatcggccaattgccggtaggttccagcctcgctaattgttccgaactagttatccacagagttatccacatctcccgcaagctagagccacataccccggttttcatagcgagcatgtgaccgctgcgctacggtggcgtcatgaacgacatattgcccactccaccgcccggcgtattcgacgacgaaccgtccggctggacccagccccacacaccgggcgttgcgtctgcgcgcaccatcaatcctgagctacgttcatcaccacgtatggcgagttccgcgccaactgtgattacaggccctgtgtcgccagcaatgagcaaaaccctcacccaacgtaagcgggaaatgcttaaacgatgcacggacgccgcgcaacagctcgggcaaccggtgctcttcggcatggccacatcgctgatactgcaatccgtgccgcttcccaaggattgcgatatcgaccccgccgagctccataccgtctccgactcacaccgcacacgaatacgtgccatcgtgccgccaacgacaccacacatctggaagccgctgagcgatgcgcacaatgtgcgtatcaacaaacatgtgtacgcactggatctgatacacacttgggcacaactcgccgctcatatatcgctcgaatcgctggtcatacttggcgacgcaatccttacggcaatcgcccgcaagccgggtctggcgaacggccgcactgctgacggcatttatcaggacttcgtgcggcaagtcactggactcccgaaattcaacgcaaaatccaagtgcatgatcgctcttgcattcattacgccccgcgtggactctccgatggaatcaaagacccgcatcgcgacgacgaaatacgggcttccgccagccgtgacaaattacacggtgcccggcgcgacattcagcaacggcgcgccgataacgctcgatctcgcttggcccgaatttcgcgtcgccatcgaatatgacggcgatcatcatcgcaccgacaaaaaccagtggcggcgggacaacgacaagcgcgaactgctgcgacatcatcattggatcgtcatcatcgccactgccgcgaacatggccgatgagccatcccaagccgaactcgcctaccgggtcgggcggcagttggcattgcgaggtgccgtattcgatttcactttgacggcaacgccactcgatgagatcgcccggcggaggcgacgaagaatataacgtttatcgcgaaagtcgtacagtatccatgttgcgccgacgctgcgcgactcggtgtccgtgtccgatgtcccggtagcgatgtcaatcgatttatgtgtggaccgggccagatttcgctgtcccggttctccatttcgcccctttttgagcaaccaagacaaaatttcattcacctatcaccccaccgtgcaatattcgccatcgtacatcggcggaattccggggttttgggattacggataatgggcgtttacaggggggctgtcccggttcccaaaaagaagccgaaatcacgaaccgggacagcgaaatctgtcccggtaatcgcgtcaatcggttgccgtcatcaccggaacatcaactgcgcataggtcgaacgcttcaatgcgcaacaggcatgcgaccatatcgcgatagcgatattccgacggaagtatgggactcaccacgcgaccaatattatttgccgagctttggagcctcgtgcttggcgtggcggatcacggcatcggggaaaccggcgtggatgtagtcggacagcatccgcaatagcctctcgtcaaaggtgtgccgctcatcgctgctggcatcgaccaggatgaaatcccatgagtattcggtgtcaccgtcgttgatgatgagtccgcggccagtgatttttgcggccagcaacgcggcgatctgtatggcgcctcgcttgaccaaggccgattccgcttgagtcaggttgcccgaaaatgtgacggtatacatcatcagcccccccttctttgttattttctagaacagcaatgccttattgtaaacagacagcactctgccataatccttttttcaatatgcggcccatggcattcccagcattaaaaaaaaaagaaacccggcggagggggccgccgggtgagagagaagagagaagaagggttcagttatggggttcgaagaacctcgccaccggtatgaacttcattccgttgacatcttctatataaccgctccatgcttggcgaattgatgtgcttgtctgggaaaagtcttggcggagtgtgacgaatttgtgacgcccgccgacaaccggcctcgcattgtcggggcttgaccgcacatacggcaacgggccacctcgcaacacttcatgtgcgaggtggcccgtcagctacgagctagcaatgccgaatcactcggcggcgagcttggccttctcggcggccagacgctcggcttcggcggcacggcgagcagccagcgcttcatcgaagcgagccagctcctcttccacggcctcggtcggaatcttggcgaagatcggcgcgggcttaggcaccacggcgccgacctcgattgcctcgctcttccacgggtgcacgttcacaccgagctcgtaatcgccggtgataatcggatacgtgaagccgggcttgtcgagatcctcgacttccttgagctcaggcagcggcgagaaggtaccggtgccgccgagcgcctcccacaccttctgtgcggagtgcggcaggaacggcgcgagcaggtggttcgcgtcagacacggcctgggcggccacgtgcagcacggtgccgagacgagcctggtcgtccttaatcttccacggttcggtggcggaaatgtacttgttgatgtcgccgaccacacgcatcgcctcggacagggcgtgcttctggtggtgggtttcgatggaggagccgaccacgtcgaacgcggcggaagcctcttccagaaggccacggtcttcgttggtcatcgaatcctcgtccagcggcggaatctcgccgaagttcttgttgatgaggttggccacgcggttcaccaggttgccccacgaggaggcgagctcctcgttgttgtggcgcacgaactcggcccacgtgaagtcggaatccgaggattcggggccggccacggaaatgtagtagcgcacggcgtccacggggtagcgggcgaggatgtccttgacgtagatcacgatgccgcgggaggagctgaacttcttgccttccatggtcatgaactcgctggccaccacctgctcaggcaggttgagcggacccatcgggccggtttcgccgcccttggagcccttgccgttgtacgccagcatttcggacggccagatctgggagtggaaggtgatgttgtccttgcccatgaagtagtaggccgggcactttgggtcgttccaccattcgcgccacttctccgggtcgccctggcggcgggcccattcgatggaggccgacaggtagccgatcacggcgtcgaaccacacgtacagcttcttgttcgggttgtcgatccagcccttcaccggcaccgggataccccagtcgatgtcacgggtgatggcgcgcggcttgacctccttgaacaggcccagcgagaagttgatgacgttggtgcgccagcccttgcgggtctccagccatgccttgttggcttcggcgagcgccggcaggtcgaggaagtagtgctcggtctgctcgaagcgcggggtttcgccgttaatcttggagacggggttgatgagctcgtccgggtcgagctcgttgccgcaggcgtcgcactggtcgccacgcgcaccttcggcgtggcaaatcgggcactcgccctcgatgtagcggtcgggcagggtacggccggtggacgggctaatcgccacctgctgggtgcccttgtagatgtagccgttctccaagcactgcttgaacatctcctgcaccacgtgctcgtggttaccggtggtggtgcgggtgaacaggtcgtagctcaggccgaggtcgcacagatccttggcgatcacgcggttgtaacggttggccagttcctgggcagcgaggccttccttctccgcctcgacgagaatcggggtgccgtgctcgtcggtgccggacaccatgagcacgtcattgcccttcatgcgctcgtagcgcgcgtagacgtcggagggcacaccaaatcctgcaacgtgaccgatatgacgggggccgtttgcatacggccaagcaacattcaccaaaacatgactcataaggcttgattatccggcgcggcggggacacgcccggatagctgccgcgccgccatcctcatcccactcacctatccgcccgtaacttcccccacatacttatccgtacaccgcttgcgcgcttatccgcatacgcattcgcacacgtatccgtacgtgcatccgtacacacgtccacgcacccatccgtacgcacgtccacgcacatccgcacacacttccgcctgtcgatatccaccgagttatccacatcattcgcgcacctagtgaagttatgcacttatccaccgttttcgcttatccggtggcgcgcaagccgtacttctgcatattgttcggtcatggatatcacagcaggtccgatgacggacatcacaacagtcacctcgccggcaaccgcgcagcccgcggtgccgccgatactgtttaccaaggatctgccgggaccgctcagccttaaccgtctggccgccttcggcgcgttacgtaagctcgacgattccgccggctactggatcgagcattcgggcacactgtatggtcgcgcaaaaatcgtcgcggaggtcgccccgtttggcactgtggtgtgttcgatgaccgccgcttgggtatggctgggaggccccgactttccgagcaccatagacgtgatctccacatcgcacttccgctcggcatccgtcagccgccgtatccgcgtattcaaaagattgacgttgccggagcaaatcatcaagctcggcgggctgcctgtcaccacgccagcccgtacggcttgcgacctggtgatgagtcctgaagacatccccgatccttccaccgtcaacgcactggtgtgtcagctgatgtccgcgtaccagtttcggccaaacgactgtctgcaaatcgtcaaggagcatcggcatcacaagtatgccggacgtgcacgcatgttttttgaatcggtgcagaaggagattgacgaaccggctttggagcaatgcgcatgacgaggggattcattgccagaggccatcgcagaggccgccatgccgctcaccgtttacggcatttgcggcaggcgcaacggttgcctcgccacgcggcggcggcacactcatccgaatccgcatcgcgcgcaatctcggatatgaccgcgccgcctgaaccacccatcagacttacgcccgcggtggcatgttcgcccgatacggatgttgccgtgctctggcacatcgcatatcacgtgcccgaactgcgtaaatggctggttgccaatcccaaagccgacgcgcctttgctggaattggtctcgcagcgtggtgggcccggggtccggcaggcgttggaaatattgttcgagtcgatggaagcgtaacggggagataatcgccggctgctgcgctatcccttgattttcagcacagccgcatacacctgcttgcgattggccaacgatccgtcagccagtggatgctcctgcaccacttgcgcgatggcgtccttgatacgcaggccgtcctccaaagcacggtcgatggccagcacggccatgtcatccacgctcaacgtactgggcgcggccgcttcggcctcctcgttggacgcgccgccgacgaccagcaccatctcgccacggggcggatcatcaatcacactttggcgaatctcgccaatcgggccgcgacgaatctgctcataatccttggtgagttcgcggcacagggccatcgggcgattcgggccgaacgcgtccagcagatcgtccatcgaatcggcaatgcgatgaggcgtctcgtagaacacgatggtgcggcgttcgggcaacagcgtgcgcagatactgcacgcgctcggaatgctttcgcggtaggaagccctcgtagcagaaacggtcggtgggcaggccggagagggcgagcgcgtcgagcacagcggaggggccgggcgcgcaggtgacgggcaggccgcgttcgatggcacggcgcacgatggccaagccggggtcgttgatggtgggcatgccggcatcggacacgacgagcacggtggcgccggtttcgacctggtcgagcaggccgtcggccttgtcgcgctcgttgtggtcgtgataggcgatgacgcgaccgttcacatagacgccgaggcgacgggcgagatcgtagaggcggcgcgtgtcttcggcggccacgatatcggcccgctccaagagggccaccagacgggcggaggcgtcgccaacgttgccgatcggggttgcggcgagcaccacggtgccggcggggacggtcacggccgattcgcgggattgggtggcggcggattcgccggcatgaacttcatcattgcgttcaggcacttgcgtcacgctaccgtcagcgtcatactgctcattcaactcatctgcgcttgtcatactcccagtattgcccataccacagagcaatccacgacaatccatggcggaatcgaggcattctccctttgcaggggctgatttcacatgttccggaagtctacttccgtttcaaggggctcctcatccggtgaagcaccagtacaaacggctttgacgcaacgctattccgccattttggcggcatatctacttgaccatcagcccctcgaaacgcaagtagacctccggcaaaccccaaatcagccccttgaaacgcgagatggcagaatttcaacgaagacaaataaaaagaccctctgcggtggaatgaatgcagagggtctcgtggagctgacggtagtcgaaaccgcgacctcttcgatgcgaacgaagcgctctaccaactgagctacagccccttggatgttactttgctccgcaaagcaactcgcaacaatatagtacggagtgcggtcaaacgcaatttgacgccgaagtgtcgcagacggggtaaatcacccacaccgctccgcatggataccgcggtggcacccggcaacgtcatcatgcttccagcacatgcagcactttcttttcgttgtagaacgcgaatacgatgccgcccaagccgcacagcacggccgcgcacacggcggcgatgcgatagcccgcgccggacgccatgccgatggtggagacgccggtgaacagcagcatggccacggactgccccatc

SEQ ID NO: 3927 - DNA, 49226 bp, Unknown
  R22_24m  MAG No. k141_18138
atcaacggttcggccggacatgttgaccacgaccagcagcttctcatcgccgagggtgcgggtgaaggcgtagacatgcgcgtcatccgcatcgagcagatgccagtcgccggccgccacgacaggcatgtcgtggcgcagcgcgatgagctgcttgtagaaggcatacaccgaatccggatcgtcgaattcgccggccgcgttgatcgccgcatggttgggattgacggagatccatggctccttagcggcatccggcgcagtgaaaccggcatagacagagccgtcccattgcatcggggtacgcgaattatcacgaccgcgcgcggcgatacccgccaacatcgattcgggcgactgcactttggcttcctcaaccctttgacggtaagcgttcagggactcgaggtcacggtactggtctaggcgcgtgaagtgggcgtcggtcatgcctagctcttcgccctgatatatgtacggggtgccgcgatgcatgtgcagcatcaggccaagtgccttggccgaacgcacacgagattcctccgaggagtcatcaccccaacgagaaacgacgcgaggctggtcgtggttaccagtaaacaggcttgcccagcctgcattcttcacggccgcttgataaccggccataatgctcttgagcttcggcaggtcaagtggcagtggcttccatttgacgccttcgcagtcaaaatcaacgtgctcgaataggaagagcatgtccagctcgccgttggcggggtcggtgatgtattcgttgcgctgtgcggtaacgccgggagcctcgcccacggtgaggaagccctcacggccttcgaacacttcacggcgcatttcggccaggaattcgtcttggcgagggccgtccgcgcagaacggattcgggttggaatagccttcctcacccacgggcagatcgtccagctcggaaccgtactcgccgggcagcttgccagacaggtccgtgcgcttggaaatcagcgtaatcacatccatgcggaagccgtcaacgccgcggtcaagccaccagttcatcatgtcgtataccgcgcggcgcacagccggattttcccagttgaggtccggctgcttcttcgagaactgatgcaggtagtattcgccacgctcagggcaatactcccatgcagaaccgccaaagtaggagccccactggttgggctcggcaccgggctcgccggcagtggtgccgggacgggcgggacgccaccaataccagtcggcgtgctcatcatccttgtttttggacgcttcaaaccaggcgtgttcatcggaagtgtgattgacaacaagatccatcacgatcttgagcccgcgcttgtgggcctcggccagcagctcatccatgtcgtcgagtgtgccgaacagaggatcaatgtcctgatagtcggaaatatcgtagccattgtcgtcttgcggagacttgtataccggggatagccacagcacatccacgccgaggtcggccagatagtcgagccgtgacgtaatgcccttgagatcgccgaggccgtcgccgttggtgtcttggaaggaacgcgggtaaatctggtaaacgaccgcattggaccaccacggatttggggtggcaccgttggtgcggatggaatctggaattactgtgcgttgtgaagtggtcatcgttggctcctccattatttatggtctacattgcctgttgctcatagtctaaaaagcgctgaattacatttccattggggaactgcgttggtgtgccggaaacaaaaactgcaaagagccggaaggcactgctacggctcaattctcataagctgcacatgctatttagcaacatatgggccctttcgctgtttgtggtgggtgactgtgccgtggggtgatgttggtcgggtaggttggaggcatggatgcctctcacctgttcaccgccgcgcttcggctgcggtcgccttggagggtcgggtctgcggacttccgtgacgccgacggcgacgggcgggagccgcacatcacgatcggcttcgagcccggcagagggttcatgctcctgttcgaggcgtgggtgtggctatatcgcctgtgctcgtggatgatgcactcgaggctcgaacctatgaaggagctcgcccgcttgttccgccgccataatctacctgacctgcggcagctcacatattaacggttcttctgattgcgacgcgcaagagcaacttcgggcgcgcttggattgcctgcttgaacccactggtgcggggatagatgatttagttgacacgcctgcgggaatctggtggggatttcgctggcacaccggatttcaagcaaaccccgcctcgggaaccgctccggacttcggcgttggcccggttcgtatgtcaatcgattgccgtctgaaccgggacagaatccgctgtcccggttcgcgatttttgtccttttttacaaacagggacaagccaatctccgcagttcatatgctccgtaatacaaaatcggcggaatagagccgatcccggaatcaacatgttgtcccggttttcacataaaacgattgacattcataccgggacaatgaaaattgtcccggttcgtgaaaatcgcccgaaaccgcgaaccgggacagcggattctgtcccggttcgcgcgtcaaacggttgatatgtggaccgggacaagccagtggcacggcgacacagcagatgcgctcaattgcaccgtaagccgtacggtttcgtcactttttcattcgcacaacgagcaaaaccacatgacctttgtgcgccaccgccacatcaaccgaccgtcgcctttattgtggcggtttccagtatggcaacaggacagaagagcctcctccggtgagagccggaggaggcttgggtggaagcggacctttacttcacagagtcctgcaattcaggactggcctacggccagacccaacatgacctcgcgagtacgcgacctatccggccgcccgggccgggaaacagcccacggggctgtttccttaatcggctcgtctcgctcgacgcggtgaagtaaagcagcgcctgcgctgttttacttgaccgctcccctcatcacaccaccgacgacccacttttgggcgaagatgtagacgatgaggatcggggccatggccatcaggtagctggagaaggccatcgggtagttggtggcgaactgcgagctgaagacgtactgggcgagcgggatggtctggttcgactggtcggtcaggatgatcaacggcaggaggaagtcgttccaggcccacagtgcggtcaggatggcgatggtggcgttaatcgggctcatcagcgggaagatgatggtccagaaaatgcgccacgtggatgcgccatcgattcgggccgcctcttccagcgaaactggaatcgaacggatgaagccagtggcgatgaacaggttcgtgcccaggccgagcaccgtgtacaggatgatcaggccgacctggttgtccaggtgcagggagcccatctgcttcgcaatcggcagcatgacgaccgggaacggcacgaacatggcggcgatgaagaagtagtacaggaagcggaagaagcgcttatccatgttgcgggccacagcgtaggccacgaaggtgttggtcagcaaggtgagcaccacggcggccaccgtgatgatcgcggagttgagcgcggccttcgggtagttgaccttggcggaggcgtcggcgaagttgtgccactgccacgaggtgggcagggcgaaggtgccggcttcggccggggtcttcagcgcggtgacgatggtgaagtagagcgggatcagaatggtcaggctcagcacggccacggcggcggtcagccaccagttgatcttgtggtccctgcggaacttggcgggcttgccggacttggacggggtaactgttgcagtagtcatttcttatcctcccctaaatcagatctgttcctggctgcgggagatgcgcagctgtacgaaggcgatgatcgccagcacgatgaagaagagcacggcgtttgcggtctggtaggcgtactcgccaccggtcaggccacccttccagatgaggtaggtgacggtttcggtggaggagttcggaccgccctcggtcaaggcgacgacctgatcgaaggtgccgagcgcgttcttcatggacagcacgaggttgatggtgaagaacggtccgatcagcgggaatgtgatcttccagaacttctgccaggcgttgacgccgtcgatggcggcggcctcgtagatttcgtcgtcgatggtctgcaggccggcgaggtagatgagtaccgagtaggcgatgccctgccagacggcgaggaagacgattgggatccagctgagttgctcattggtcaacagcgaggtggacagccacttgatgcccagcgccttgccgagctcgggcagcgggttcatgaagatgtacttgaacacgtagccgatgaccagcacggagagggtgtaggggatgaagaagacggctcggaagccattcttgaaggcgatcttcgagttcagcagcaccgacaggaacagggcgatcacattaatcagcaccgtgatgagaatggcgatgaggaacgtgaacaggtaggcgtggcccacgcggttgtcttggaagagggcgatgtagttcttcaggccgatgaacttgtaatcgccgtagccctgcgagttggtgaaggaatactttacgccgtcaagaaatggcaggtacaggaagaaggcgaaaatgatagccgccggaaccaccatccagtagtaggcggggtccaccttgcgggtggagaaggcggagaccttcttcttggccggtttcttggcagcggtcttggttgcggttgcgtgtgacatgatgttctcctctcctaccgatcactcgaaggtcctggcttggaccttgtcccattcggtctgcatctggttcaggaagcggtcggtgttgccggaggtcaccatggtctgcaggtagccgccgatgttgatggacgaaggaatgtagtggtcgcagaagtcggccagtcggttttcctcgaagaacgggcgcacggtttccagcgcatcgttgccgaagtaggtgtccttcagcggcgtgatggcggactgggcgtcggcgtaggcgtcaagctgatccttctgcatgaggaactcgacgagcttcatcgcttccttggggtgcttggtgttcgcaccgatggtgagcatcacgtcgtcgccggcggtgaggatctgctcgctggcgtcatcggtggccggcatctgggcgaaaccaagttcgatatcggggttgatcagcaggatctgcgggatggcgtaggtgccgagcgggatgatcgcggccttgccttgggcgaagttctgtgtgccctgctggtaggtgacgccggtgtccgcagtggagtaggtgaagagctcggattccttctcgactgcggtcttccacagttcctggaacgtggtcttgccttgcttgagctcggtgtacttcgattcgggaaccagcgtgccggccagggaggcgagcggtgcctgggtggtccaggcgtcggccacggaaccctgcagcgggttgatgccggcgtccttgaaggtgttgagcatatcggtgaactcgctccaggtggtcggcggattctccgggtcaaggccaaccttgcggaacagagccttgttgtagatgtagccggaggcgttacccgcgaagggcaggccatacaggcgcttcttggaggaatcggtggtctgcaccagattcttggcgatctgcaccatgccggggttgagggtgtccacaatgggttcatcggtgaagtcgtagaacacaccggaggcggcgaagttgccgaagctgatgtcgccgttgaaggtgatcacgtccggcacacgattcttgacgaaacgggtgcgcagatcggtctgggcgttggcggagttgttgatgttgaccttgatggtcgggttctgcttctcaaagtcggcgaccatggacttgaactggtcggcggcctcggacttgaactggaagaaatccagcgtgacggtgcctgcggtgctggagccgcagcctgccaggccgaacccgacggcgatcgcgcacatcacggcggcggtgcgcacggccagacgcttcagtctaggcgttgcatgtggggaatcggacagcataattgttgactcctttatctttcttttcctccggcttcggtgccggcggttcttccactttccaaggtaacggttcggccatttcattcccagcgccagcgagcccacttgcgcaagcaacaaaaagcgcggtattttgtgattaacgcaataaatacagcgaaggggcttgcatgtctgatgtcaacgcgattccacagtggttttccggatccgagcatacgcatcgcgtggcggcggcaattgcccaatacgggccgatagcccgcactacgttggcacagatgctgggactgagccaaggggccttgtcccgcatcaccagcgatctgatctacgccggggtgatcgaggagcttccggccggggccggcccgtcaggcaagctgcccgagcgattcacgccaagggaaagttcggatcgtcgcggacgcccgcagacttcgctggtgttgtgttcgaacgcacgcaccttcattggtgtcaaggttcatgggatgtcgattgtggccgctgcggtgaacgcgcatggcgaggtggtgtccggccggcacgaggtgccgatcggggcggatcagtcggctgagtatgtggtgtcggccatcacgcggctggtgcgcgaatgttccgccgatatcgcctcttccggactgccctcccccactgcggtgggcgttgcggtaggtgggcatgtggtcgacgattcgattgtgacgttcgcgccgttcctgcattgggacggggccacggacttggggacgatggtcacagaggcgaccggcctgccgtgcggggtgttcaatgatatcgattctctgctggtggatgcctcctggttcgggccgggtgtcggcgtggatatgttcgccgtggtgaccatcggcgtgggtgttggttattcgctggccgtgaacggcaagccagtgcagtacccggataagagctatggtctggtgggccacgtgcttatcgatccggaggggccgcgctgcaccagcggacatatcggctgttcacaatgcttgactgacgattcgatcgccgaacagtactctgcgattgtgggtcgcgcggtcagttttgaggactttgcgcgcgatgccaagggacgtgtgccgcaggccacgcagttggtgaaccggacgtgtttccggttgggttcgctggtggctacggtggcgaacatcgcgatgcccggacatgtgatgattgccggggagtccgcgtttttggccaagctcggcaccgattcgctgcgcgatggcattcgtttctaccgtcacagccagacccagccggtcaagttcacgattatggaccacgactggcagctctgggccaaagccgccgccagtcgcgtaatcgtgaagcatattgggtaggccgttcttggctcccctcagagagggaagccaagaacgttgcttcgccacagttactccgccacgaccagcaattacggacttgcctatcggcaaggctcaatcccaccttcgctcagctgtcgcttcgctcaggccgtggctgctgacagcctactaggctgtcagcttaacgccacagccttgagcaatactgcctgctgggggtggagggacgggggacggatgccgtaacgctgcagggcttcgccggtcaggactacgccttcctcgttccaccagccgagagtgctctggccgttggccagaccggtcaaatccaagctcgggtcgagcgggctgacgcggtaggtgcgctcggggtcaagtccgggcaggtgcacgggcgcggccggataggtctggctggtggtcagctgggtgaagcggtagatggcggcgtcgcggttcggcatcaccatgccatccaagcgcacggccggatcgttggagtcggcgtgcacgcaggtgtcgatggcgaaccagtcgcggtgcttcttgaattcggccacccacacggccagcttggcgagcgcctcgtccggctccttcaacaggttccattcgatgcccatgtggccgaagaacgccatggccatgcgcagttcctggctggtggcacgctgggtggagtgcgcgggactggcacccacgtgctcgcccatcatcgccggcggcaccagcagcgaggtgtagcgctggatgtccgcgcgctcgaccgggtccacgcagtcggagacccagatacggtcagcgtgctctaggatgccgaggtccacgcggccaccgccggaggagcagctttcgatctcaaggcccggatgtgcggtcttgaggcccttgaagatgttgtagacggcgagggtctgcgcgtgcacggccgggcggccggagcggcgggaaccgggctcggtgacgaacttgttgtggtcccacttgatgtagtcgataccaagctcgccgacaagctggtccatgcagccgtagatgtagtcgaacgcatccggattggtcagatcgagcacctgctgagtgcggccctgcagcggcagtcggccggtggtgggcgaaagaatccaatcggggtggttgcgggccacgtcggaatcggggttgaccatttccggctcgaaccacaagccgaattccatacccttggcgtgcacgtagtcggcgagcgccttcagggacttcggaccatcgggccagacgtcctgcgcaatctgccagtcaccgaggccggaggtgtcgtcgcggcgggagccgaaccagccgtcgtccaccacgaatcgttccacgccggagtcggcggccttgtcggcgagcgccttcagcgtatcgaagttgtggtcgaagtacacggcttcccatgtgttgaggatcaccggacggccgtgcgagaacaggcgcgggtgcagggagcgcacgtaggagtggaagcgggcggcgatctcgttgagaccatcgccataggagccgaacagccacggggtgtcgtaggagttctggccttcgccagggccagcgagcgtcacttcgccgccgaacaggagttcgccgccgccgatcacgccggttgtgtagggcagacgttcggcggacagcacggagttgccgctccagcccacgtgcaccgaataggcgtcgccatgctcgaagccgaaaccgggcacgccggcggtcaggagcagggatgcgtcgaagtcagggcggccggcgagctgcggcttttcgaaacggccgacggtcagcggctggcgctgcggactgcgttcacgtagatggtgaccggtggtggtgaggatttcgccggcggattcgggcagcgggaagccgagctcgatcttgccgatctcgagcggggctccggcgtctgcaccgaacaggttggttacggtggccttctgacggaccaggccgccggggagcagttcgaggtgccactcgacttccacgccctgctcctcatcgcgcgcggtgactatgacgccgggcacgcggaccggaccggtggcacgggcatggccggccacatcggtgtagctttcgccggacacggcatcgagggtggcttccagcacgccgccggcctcgatattggtcacagtgaacttggggaagagctcgacgccggcgcggcgcagcaccacgcgctgctcgccgatccagctttcggcctgggtgggcaggatagacggccaggcggtgtcgtcgagcgcgccggacacgcgctgcggcttcagggcgtcataggcggccagcagggtgtcgggcttggccagcgggcggccccagtggacgatgtgcggcaggtcgctgccggcaaacaccagaccgatcgccacattggcggcgggctgggtcaggtagacggcggtgagtgcggtgccgtcagcggcggcgccggtgaaagtggaggtgttctcggccatattgtctccttcgacgtgtgtggatttgcattgcactactggcttcgatggtagaagaaatggaatatgttgccttggtgccgcgtgttggttgcgtgaggtaagtaatgcgtccgtgtctatcgccgctgggcgaagaaatcagtcaggatggactgacactcgccttccagcacgccgccgtgcacttcaggactatggccgatatgcggatcgcgcggaatatcccaaatcgaaccgcatgcaccgagcttgggatcccaggcaccgaacgcgatggtgccgatatgggtctggatgcaggcacccgcgcacatcgggcacggctcaagtgtgacggccagcgtgcaatcggcgagattccaagcgcccaaggcttgggccgcctgacgcatggcgatgatttcggcgtgggcaagcgggtcgccatcagcctcacgcgtgttgtatccgcgcccgacaatctggccggccgcatccagcaccaccgcaccaaccggtacgtcaccagcggctgcggcctgaccggccagttccagtgcgcagcgcatcgcctcgtcatattccataccaacgagtgtatgcctttttctcatatcgtctcatgatgtgcataatcggccgcaatcttaacgttttcttcatggttcccatatacttttggtggagaaaaaatacgagaaggcggcaacatggcggtatttgagctcatcctatgcatcattgcggcggtggtggtgagctcgtttgccagtcgcttcgtaccgaaggtttccacaccgctggtccagattgtgctgggcgtgctggttacgtatctgccgtttttcccggatgcaaagctcgacccggaactgttcatggtgctgtttatcgcgccgctgctgtatctggaagcgcacgaaatcgataagtcggcgttgctgaaaacgctggatctgagcctatcgctggctatcggactggctatcgtcacgatggcggcggtcggattcactttgcatgccgtctggccgtccatcaccttagcctcagccttagcactcggcgcggcactcggcccgaccgatgcggtggccgtcagctccctaggtaaagaagcctcgctgacgcagcgtcagcgcagcgtgctgaaaggcgaatcactcttcaatgacgcttccggcatcgtcggcttccagttcgctctggccgccgccttcactggcgaattcgccgtggggcaggccgccggcgaattcgtgatctccttctttggcggcaccttatttggcctggtgatagcagcagcggccaactggctattcgagaccgtgcgatccctcggttgggaaaccaccaccacacgtattctgatggaactgttcctgcccttcctgctgtatttgggcgcggaggaattcaatgtgtccggcattctgtcggtggtggccgctggcctgttcatccgattcgaccgtaccggcgtggggccgaatgtggcacgtacgaatatcgtttccacttcagtatggggtgtgctgagtttctcgctcaacggtgcggtgttcattcttctgggcatgcagctgccgcgcgccatgagggccagctggtctgacccgtatatcagcaatatcgcgctgatcggcattattctgctggtcactctggtggtaatcgcgcttcgattcttctggattgcggccatgctgcgcgttgcgcgagatacaatcaccggccagcgccgcaaaatgacacccgaacgctggcgctcggccgcagtgatgacctttggcggccccaagggaaccatcacgctgtcattgatgtttaccatcccgtattacattgccggcggtgcgccgttcccgatgcgtgacgagctgattttcattgcgtcaggcgtgattatcgtgaccttgctgctggccaacttcctgttaccgctattggccccgaaccgtggcaaggatcccagcgcggaaatgattccggtgaccatcgatgtgttacgcgccacggtggaggaattgaccggacgcatcacgccagagaatcgccgtgcgattctgatggtaatcgaccaatacaccaagcgcatcggacgattgcagcagcgcatcggcgataccgatcctcagggattcgagcaattgcagatcgaagcgctgcattgggaaaaggaattcgtgcgcgaccgacttgccgacaccaaggcgcatccggcggcggatacggccacgcaagagctgaacgtcgaagcctgcgagcgcatgcttgaccagattatgaatacgctgcgtcacacttccactgatccgacttcggggcatgcggtatcgcagattcgcggtcgcttacgcatgttccagcggcagatgagcaattacgccaaacgcacggtgtccaagattcgccataccacaccattggtgagcgaggatcagattttcgcgcgcacccgcgaactgcaggtcgaggcgattcatcatgttatcggccggcttattgacgagatgggccaggatacgtacaacaccgagcattgttcggcgctgttgctggattatcgtcgcgctgaggcttcattgcaggcacgtccgaatatgagcggcactacggaaaccatcacgcaggtcgaggacgtaaagcgcgagagctacggtatcgaactcggtgtgattcaggacatgtacgaagccggcgacatcaaccgagcccaagcccgctccctgaggcgcaacatctacgttatgcaggtcgatgccgattccggcatctagtttccttggctcccttctctgaggggagccaagttggggattgctatttccgcatgattctcttcagtatgtgcagtagtgcttgcagtgctcacttcgctcatgggagaacagtctatgaccgcgccggccacaagcgccctcgatgtccgattgctgtggcggccgcgccaattccagtgatggcggctgactacagcacgccagaggtaatgtcgttgtcgagcagccactggcgcaaatcggcgaactcctcaagactcacattgtgatccagaccgtggtagctcttggttttcagccacgtatgctcttccaaccaagcggcggtggcgaacagttcgtatttcgggattacgccatcgttcttgccgtacgtatagaacacggggatatcataatcggccaggcgagagtcggcgggggccgtgccgggcacctgaccgggtgtgttgaagccggacagggagacgacggcccggtaccgctcggggttgatgcgcaacaaatgcacggcgaccagtccaccttgcgaaaacccaagcggcaccacgtcacggtcggcgggaatgttgccggccacccatcggtcgactgctgtggcggcggcatacgcgtcgtagtcacgatcatcgccgataggcagggcatcgtggaaccacgcgtagttgccggggtcgggactgccttcacgggccggcgcgagtgtcagcggcccgcgcaatgccacgaagtcgttatatggagcgatgaggcgcatgatgtccgccatgtcttcttcgctggatccccatccatgcaggcacaggaacagcggatgcgtggcatgctggtcgaagccgccgcgcgaggtgacgctgtgttccacggtgagtggctcgccaaaacgtccaggcacagtggtggattcgcggccgatcagaggctggctggcattcgcttctttgctcataccaatccaatatagaggtcttgcgcgctgtgcggaaaacgatggaccatgatttcagtcacattgggtaatccgcgccgaatcgccttgggactttccaggggataccggcaatctgtcaggcattaccgctgtttgcggctgcggtgtctgcggctgcggtgattgtctcaagttcgccgccccactgctgctgcagtgcggtcatcttgctgccctcgccgaacaccatccagcgtttgccgttcagcaatcgccaatcacctttcgtttgctcattatcagcgtattggctcagcagttcggaaatcttgctttcgataggtgcccggctgatggctgcggacgattccgattcaaaggacacgaaggccactctcggatcagtgcacatctgtacggtggtgatgcctggcaaaccgcccgcatcaagcccctgccatccttctttgcacgcgccggcagcttgttctatgccttgctccatctgtgcggtatcttcgacgggtgccttgtcgttcgactgctgaatcagtccttccgggaacaatacgcccatggccacgccgataaccaagcaaactatggcgcacaccagtgcgatgatgccgcccgcgcccactcccccgtgagtggcgtaccgaggcatggtgactcgcgcagcgatgaccagaatcagggtgatgctgataagcaccgccgccgtcaacgcaatgtatcgtcctggcactgccgtcataaaggaaatggcgtaaggcgcgatttcatgaaccgccgaggtggccgataccacgacggctagcagtccgctgacaacggcaagtctgcggcacaatatcgacgttgggctgctggcttttgtagcggcgaatcgccggccggcattccgcctggatgggcgtcgattctgtgcacgacgtgagctgcgcgaatcgtcatactgaccatcgccgaagaaatcgtagtcctcatcgttgcgggccatcggtgcccccttcctgccgattacacagccagtgtaccgctatggcttgggaatggcggtcattcgggggaatgattcagggcaaaaaagaaccccggcggttgcccgccggggagagaaaggagagagaagaagaaagggggttcaattgtcgggaactgctgcggctcctgatcagctttccgctgacatcatttatataaccactgctttctgggtctacctctaagtttctctgagaaaaacctgagaatacttgcgattgatggaccgcggaagcgtgaggagcctctcacgtttccgcccaaggcgctagacttgaaggcagtatttatttgcccaaggagtttttcacatgctgctgtccgatcgcgatattctcgccgcacagtccgcaggtcatatctcacttgatccgtggacccccgaaatggtgcagcccgcttccatcgacgtgcgattggatcggtacttccgtttgttcaataaccacgcctacacctatgtcgatccggcggaaaaccagggcgcgctcaccgaacagttcgaggtggatcccgacgaaccgtggattttgcaccccggcgagttcgcactgggttccacgtgggaatacgtcaagttggacccgtccattgccgcccgtctggaaggcaagagctcactgggtcgattgggtattctgacccattcgactgcgggcttcattgaccccggtttcgaggggcatattacgcttgagttgtctaatgtgtcgacgctgccggtcaaactatggcctggcatgaagatcggccagatgtgtttcttccagctgagctcgcccgctgagcacccttatggctccaagggcaccggctcgcattatcagggccagcggggtccgacgccgagccgttcctacgagaatttctaccgcgcgcacatcgacgactgagcgttgcgacgtaccattcggccggcggatgccggccatttgcttaatcccaaggagatgtcatgaccaacagcgatggtgggttccagttcgacttccagcagcacgaaaagccggtcaggccaacggttcctccgattcccgggcaagagacggcagcatatggcgcgcagccagcgacacaagccacaccggctctgcagttcccgcaatctgtgcaggcagcacagccgacgcagtttgcacagcccacacagcccatcgatccggccatgacgcaaccgttctcgccgcaattcccggctgcggttgccgcacaagcaccacagccggcggcagccacgcagccagtagtatccgaaacaccaatcgccgctgcgcccggccagcagcaatacgtttgggatcaggcgacgcaaagcttccgcccggtggaaccgacagcgccggtgacgccagccgcaccagcggcaccggcgacatcgcctgtttcggcagcttcaaacgccgcgacacaggcgttccaacccaatcaggccgagcagcctgcggtagatgccgaggcaacacaagcattccggcctgatcaggtcatggcaacacagcttttcgaagctcaggccatgccgaatgccgaaaccgcggccacacaggcattccagcctaattcagctgcggccacacaggcatacggcgcatcatccaccgtatccggtgagaccgttgccatgccggcaacgcaagtagcgtctgccgatgatgctgcagccacacaggtgttccaaccggccgccctggctgcttcggcacaggctcagcctgctgtgatgcctccctccattccgttgaatcaggtctccgatgaggacgattccgatggcgccgagcctcatcacggcggtagcggcaaaaagaacacccgcaaaatcgtcggcattgccgtagcagtagtcgccgtgatagcgctggttgtcgccggcctgctctggtggcattccaacagcagcaaggcgagccaagccgtggcactggccgagtgcaaggtagcggccaagcagtacacgaatgctcagaagaagctcaccaccgccatatccaatggccaaaccagcgcgcaaacatccaccagcgatgtggccgatgccaatacgctcaccacgctgaatcaggcgttgcaagacgccgacaatccgaccgacaccgccaagtgcgattccagcctcaacgccactgagctgaagtctcacactaaagagctgcagaatgatgccagcgacatggctgacaagacggatgccatcaacaatgcgatcaaggccgttaatacttcaaaggcgacggccgataccgacacactgaaatcgaacctgagctcggctatttcgcaggcgcagggcacactggataattccgcgggcagtgtggccgatgagaacacccgcaccgcgctgcaaaacgccatcaccgaggccaatacggtgatgaacgggaccagtccgtccgaatccgacgtcaacaatgcgatttctagactgcagaaggccgagtccgacgtcactgcctcgatgcaggccaagcagcaggcagatgccgccaagcaagctcaggaagaggctcagcggaaggccgaccaagaggcacagcagaaggccaagcagcaggcacagcagaagtctcaagacgggtccacctctactgacggccccgacggcagccacaactgaggtctgcagcgttctcccgtttcccatggggcggtaacttccccatggggcggttagcacattttcctttttcgcggaataacgccgttttcagcgaccgccccatgaggaactcaccgccccatgggatagttaccgccccatgaggagccgtttggatatagcagtgggccgggccctgaataccagagcccggcccactgctatatgcccacaatcagggctattgcgatggcttaacgcttggctatcgcgcgtagcacaatcttgcgtagctcggaggcaatcagcacgattgcggccaggcagatgcattccacccaagccatcgggctcaatgccacggtgccgaacggaccgttaaggaacggcacgtaaatcaccacgagctgcagcgccacggacaaaccaatcgcaccccatagccacttgttggagaacagacccacgaatgcggactgcagatgcgaacgggaggccagcgcgttgaacagctgggcaaacaccagaatcgtgaagcccatcgtacgggcctcggtcatctgcgcttcatggccgatggcatccaccgagcggtcggtgaacaagccgccggataggtgcatgtccataccaatcagcgtgacgatggccataatgacgccgacgaagatgatgtcgccccacatggaggcgtcaatcacgcggtccgtcaccttacgcggtttacgacccatcacatcgtcggtctgcgggtccacgcccatagccaacgccggcgcggcatcggtcagcaggttgatccacagcaactgtgtggcgagcagcggcacggtgacgcccacggtttccggctggcggatgccgaggaagccagcaaacaccacaccgaggaacacggtgaacacctcacccacattggaactcagcaggtagcgcaggaacttgcggatgttgtcgaagatcacgcgaccctcgcgtacggcggccacaatggtggagaagttgtcgtccgccagaatcatcttggcgctctgcttggtcacttcggtgccggtgatgcccatggccacgccgatgtccgcggacttgactgccggggcgtcgttcacaccgtcgccggtcatggccacgatgttgccttgacgctgcaaggattcgacgatcttgagcttgtgctcgggggccacgcgcgcgtacacggacacttcggacgtggccttgtcgagtgcggcctcatcgggcagctggtcgagctggtcgccggtcagggccttgccgtccttggcgatgatgccaaggtcggaggcgatgcgggcggcggtcagcgggtggtcgccggtgatcatcaccgtgcggatgccggcacgatgggcctcggtcacggagtcgcgcacctcggtacgcggcggatcgatgatgccgaccatgccattccagatgagatcgatttcgatggcttcggcctgatcggcgatgtcggacacctggcctgcggcgttgacgcttacaccgggcacatcagccaaagaactggtttccagcggacggcaggcctcgccaagcgtacggtaggcctcggaggaaagacgttcgacggtggcgagaatcgactggcgatcgccttcggtgagcttacggacctgaccacccacgcggatgcgcgtgcagtagctcaacagcacgtcgggcgcgcccttggcgaacacggtgagcttgtctgaatcggcgctgtccttggcgatgatggacatgcgcttgcgttcggaggtgaacggaatctcgccaacgcgcgtgtagcgcttgatcttgcgatcggccttgaccttgcgtgcggccacgatcagcgagacttcggtggggtcgcccacgatctcccagcggccgttctcctcgcgtagttcgccgtcgttcgcgagcgtgccggccacaagcgtggcgacgacttcatcggccacaatctgggcctgctcggattcaggactgacgccaccggtcataaccatgcggccttccggcgcgtaaccggtgccggtgatctgcactgcgccggacggggtgaccacgcgctccacggtcatctcgttgcgggtcagcgtaccggtcttatccgagcagatcacggaagcggagcccaaggtctccaccgaatgcagtttcttgacgatggcgttgtgcgcggccatacgctgcacaccaagcgccagcaccacggtcaggatggcggccaagccttccggcacggcggccacagccagcgagacggccaacagcaaggaatcaatcacgtcatggacgtcgtcgaagccttccagcacggcgagcgccaccagcaccacgacagcgatgacgcacaccgcaatgccgaggatcttggagacgtaatccatctccttttgcagcggggttttctcatcttcggtggcggagagcatgtcggcgatcttgccgacctgcgtgttcataccggtgccggtcacgattgcgcggccggtgccttgcgtcacggaagtgccgttgaagatcatgttggcacggtcgcccagcgccttggcttcggtgagtgtgtccggcttcttaccgaccggcacggattcgccggtcagggaggcctcggcgatgcgcaggctggccgcgttgaccagtcggccatcggcggagactgagtcgccttccgcaaggacgatgatgtcgccggggaccacgtcggcggtgttgatgcgcatgactttgccgccgcgcagcaccgaggtctgcggggccgtcatttgggcgagcgcctcgaccgcggcctccgccttggcctcctgcatatagccgagcacggcattgacgatcagaatcaaaatgatcacgatggcgtcgaacggcagcacttcaccgccttccgcaccgggctgcgcattggccttttcgatgaaccatgcgatcaccgagatgatggtggccgcgatcagcaggtagaccagcgggtcctggaactgggccaggaatttcttccatttcggtacgggcggggcggtggcgagctcattcgggccgaatttggccagtcgacgcttggcttcttcctcgctcaggccctgggatgggtcgacattcagggctttggccacgtcgtcggcactggtcagacttggatcagcttcccccaatagcgcttcctgcgcgcgcacttcttccgattccacgacctcgttcgttgcggtcgcggacactgcggattgatctttgagatcatccataatgttctccttggtattgccgcggagtagtcagccttgcggccgctgccgggttttctctcccggctggacgcacaggactgcgcggttatggacaccggcgcaactgctgccgatgcatacgattgctattattccataactgcgtggcgcacttggcgcacagcgtaatagcgttttgcctagaacaggcgacgcaaccaggcttcagccaaatcaggccaacactgcacgcattcgacgatgtgcgcatagaagccgttgccagcggtttccgcattggccagggacaggccgtggctgccttcggggaacaggtgtgcttcgatgctcacgccggcggcccggcaggcctggatgagcattagcgtattctccacgggctcggcttcgcggtcggaggtcatggcgtagccgccaccaggcaaaatcaggatggccgggcgtatgcggtccggttccatctcctcgctgttgtcggccacatagccaaagaatcgcgcctcgttatataacttaagaatcgtgagaatcaaagcaattcataacctaggaatagtgagttttacggcattatataacttaggaatcgtgatataatagctcataaatccttgaaaatactaggaatatgagcttaacatgtataagagaaaagtatacgaccatctacggcgatggaaagcagtgagcaagggtactactgcgttaatgattgaaggagcccgccgcgtcggcaaaagcaccgtcgccgaggaattcgcgaagaacgaataccgctcatacatccttatcgactggcagaaggctccgcaggcggtacgagactcgttccgcaacaatctggatcatttggacacgctgttcatggacctttccgtctattacggcgtacgcctgcatgagcgtgacaccctctttattttcgacgaagtacagctcttcccctttgcccgcagcgcggttaaacaactcgttgcggatggtcgatatgacttcatggagactggctccctgatctccattaagaagaatgtcgaaaacatcttgattccctccgaggaagaatcggtgagcatgtttcccatggattttgaggaatttctatgggccagaggagaagaactactcgccgatgcgatacggcaatcttttgcggacaggcgagcaatgtctccgctgctggacaacaaggcggaacgcctgttccgtgaatacatgctggtgggaggtatgccgcaggccgtagagcgttatctgggaacatccgatatgggcaatgtcgatcgagtgaaacgccaaattttgcacctgtacgctcaggacataaagaaatacggcggagattcgaaagaacgggtcaaacgtatcttcgatgaaattccagggcaactttccaagcatgaaaagaagttcacactgtcgtctttaggcgaaaacgcacgcgaacgtgaatatggcgatgctttcttctggttggatgaatcgttcctgatcaaccgctgcatgaatgccacggatccgcatgtgggcctgcgcctacaccaagaggactccacgatgaaatgctatatgggagacaccggcttgttagtaacgcaagtgtttgccgaccgcgcatacacgtcgaatgagttgtaccgcgatatcctgttcggcaagctggaagtgaatgaaggcatgctggtggagaatgtcgttgcgcagcagctccgggcctcaggccatcgcctattcttctattcccgatattcccgtcaggcgaaggaccgcatggaaattgattttctccttatcggggagtattcaaatgccgccatgaaggccagggtctgccccgtggaggtcaaatcgacaaagagatacaaaacctcatcgctcgataagttcaagaataaattcgacagccgggtcggcatgcaatatgtgctgcatcctagaccaatgcgcgttgaaggagaccgcctatatctgccgttgtatatggcgcattgcttgtgatgattctagaacgtatcgcagagaatgattctcaataagaaaagcgtgaggattacgatgcctcaatcgcacatgcagagcgtcatatcagtgagatcccgccgttgcggaccatgtttgattgtgcggaaaagttcggatgcctcacacttttcttgacgggaattatttactgtgaggcattgcgcaggttggcggccatggcgcggtcgcgcaagcctttggtgagcttgagaccgagggttacggcgatcaggactatcgtgcaggcgatccacagcgttcgaccgccgaagttgctgatggtccagccaccaatcagcggcgccagcgcaatcgataccgaccacactacgttgtagacgccctggtacgtgccgcgtgccgacgcgggtgccatggcggcaaccgtagtggtggcgatagggaatgtgcccagctcacccagcgtccacagcactacggcaagcgcgaatccgccccaggaatgggccgcggcctgcaccgcatagccgatgacggttacggcgaggcccatcaccagcacgcgtgaattgcccatgcgcgagaacagtttcatcgcgggaatctgcagcaggcacaacataccgccattgatggtgagcagcaccgaatactcgcccagccctagaccaaggtccgtcatggcaatgggcaggccggaggtgctttggaagtacacaaggaagtagccgaacatcagcagggagaagccgaggaatggcgtatcagtgagcacgcgccgccaattacgagacatggagcccttggcactggcagccggtgcggcatccgagtgattcggcccctcgacgccggcgaattccgcatgcgtaacactgcgttcgtcttcatggcgcaccgcacttggcaccgatacagtaatccccaaatgccgcacctcgcggaagaacgcaatcagcaatatcgtgacggctatcatcaccgccgcttcaacgtagaacatcagcgaatacgagatcttgaccagctggttggccacaatcggcccaatcgcgtacccaaaattaatcgcccacgattgcagtacgtacgcacgttgctgacgttcggcgggcaccacatccgcgatatacgcggcgatgaccgggctgggcagtgaggcgaacgcaccatagacaaacagggccgcgcctaaagccacggggtcagtgagcacggaaacgaccagcagggcagccgctgcgccgatttcgccgatgataatcatggattggcggccgaatctgtcggacaaggtaccgccgaacaggcagccgatgattgcgccgaagccgtacatggccacgactgtgcccaccacaccctcatcgaggcgcagcgcggaaaccaaatatatcgacaagaatgaggtcacgaagcgacccatccacagaatcagaatcgccaaccataatccccaatacagcagggacagtccgaatatcatgcgctgcttcttcactctcaataccttaccggctaccgacggcggaatagccgcgttttggcgcggggtgctgggacaatagcacctatggctatcaaaaaaggaccgaccaaggggtcgggtggcaagcatcgcaacaaactgaagggttacggccccactcccaaagccgaggaccgcgtctatcacaaggcgtataaggccaagaaagcggccgaacgtcggcagatggccgacccgcgtctggcagcccgccgtcgagtggacaagttcgcttcggcggatacttcggatctggtgtacggccgtaattccgtgctggaagcactgcgcgtaggcgtaccttcttccacgctgtacatcatgtctcgtattgaacatgacgatcgtactcgcgaaatcgtgaaaatcgctggtatgaacggcctgcacatgctggaggccgatcgtctggagatggatcgtatcgcccgctccggcaatcatcagggcgtgattctgaaggtcgatccgttccagtactcctcgctgaacgagctggccgatcgtgctgagaagaaggccaaggcaatggaggccgcgaattcggcggccgcccgtattgctgcgcgaccgctgtttatcgcattggacggcgtgaccgatccgcagaacctgggtgccgtgattcgttcggcggccgcattcggtgccaatggtgtgattctgccggaacgccgttccgcttcagtgaacgccgccgcttggaaggtgtctgccggtgcggccgcgcatatgccggtggcgcgcgtggtgaacctgactaaggcacttgagggcttgaaggagcgtggatactacgttgtcggccttgacggtggcggcgataagctcgtcggcgagactggctttgaatccgatccgctcgttgtagtgctcggttcggaaggcagcggtttgggccgactggtgcgcgaaacctgcgacgcgattgccggcatcccgatcagctcgtctgttgagtcgctgaacgcttcagtggcggcgggtatcagcctgtacgcggtgtccaacgcacggcgcaaggctgcggcggagtgattgtcgtttgaggccgtaataggttgtacatacacggaagcccctctatttgaggggcttctttgtgtgatgggctcacctacagacagtccaccggattgtccgcttaatgactccacactgccgcatccggatcgtcatcggggttgtagccgtcgtcgtccgggtcgctgtaggtggattcgtcgtcaatgacgccggaatcggcctcttcgttaagttcggcgagtgccttggaatcaaggttgtagctcggcagaacgttgtcgatgtagctggtcacggcctcgcccatcggcacgtcgtggccggccttctccgccaggaaccagcgatggtcaagcacctcatggaagaactgagcaggctcgatctgggagcgatattcgcgcggaatcatacgcacggtcggctcgaacacctcgcgcatccaatcggtggccacgatttccagatcctcgccctcacgccacgtggaggcacggtaggcgtcaaggtcgttgagcagacgacgggcctggttctcctgcacgtcaaggccggtgaggcgcagcagcttgcggttggcgtagccggcgtccaccacgcgcgggcggaccagcacacgcttgccgtcctcggcggtcttcatttccagctcgtccacgtcgaagcccagctcgttgagcttgttgacgcgctgctcaatcttccacatttcgtccgggttgaacttgtcggtgtcggtcagagcgctccacagcgagtggtagcggtcgaccaggcggttgcccacctcgatctcatccacgtcgccgggcagtagcttgccggacgccaaatccataagttcgccgatgatgttggtgcgggccaagtcgatatcgtattcgcgctggccgtcggtgagctggacttgcaggtcaccggtctcggcgtccaccaggaaggcggagaaagcgtcggcgtcgcgcaggaacaggacgttcgacagggacacatcgccccagtagaagccggccaggtgcaggcgcaccagcagcacggcgagggcgtcgatcagtcgttcggcggtgtccgggcgcaggttgcgggcgaacagcgcacggtacggcagtgagaacttcaagtgccgggtgaccagaatcgcctccagcggctccccttcacgggtgtgacggccggtgaccacggcgatcggggtcacagttggcagttcgagcttctgcagtcgacgcaggatctcgtactctcgctcggccacctggcgcgtgatctccttcatggcgtacacctcgtcgcccacgtgcacgaatcgcacgacgtggcgggagatgcctcgcggcaggttggccagcaggtcctcaggccaggtggccaagggcttgtgccagggcagcgtgaacatctttgggttcgagctggcggcggtgattttcagtgcttgcggttccgctgaatcggcgtgttcgtcttcggctttgacagacgtggccttcagcgcacgcggatccatctggggcaattcgttcaactccatgtgttcgattttacgtggtgcttgggaagtgcgctccttggccacgacttcggcgcgttatgtttacgggaaaacaccgtttggtctctccctcagaccgtctagaaggcaaaaagaaaagccccgcagctatgcagggcttttccaacgaggtcataagagaggaagagaataacctcgtttaatggttgacgaagcgattagacctcgccaagtatctattagttcagacgcagctcagtcgacggagcgaacaggtgcatcttggccgggtcgatcttgatcttgacggtcgcgccgaccttcggcagcgcacgcggattcacacgaatcgtggtgagcttgttctggtcggacatgacctgggaagcctcagcggcggagccatcggtgacgatgttgccgtagatgtagccatcggagcccagatcctcgacgttcacaaccttcagggagaaggcgttcgggtcgtcagccggggccaggccagcgtcctcaggacggaagccgaccacgatctggccgttgtcttcggcggtgagcttgttgacggcctcagccggcaggtccacggtgtcctcaccgatcttcgccttgccgttgaccaccgggtgggtgttcaggttcatcgacggggagccgatgaagccggcgacgaagacgttggccggacgatcatacagctcggtcggagcaccgacctgctgcaggataccgagcttgatgacggcgatgcgatcgcccatcgtcagggcctcggtctgatcgtgggtcacgtacagggtggtgacacccagctggcgctgcagggcagcgatctgggtacgggtctggacacggagcttggcgtcgaggttggacagcggctcatccatgaggaagaccttcggctcacggacgattgcacgacccatggccacacgctgacgctgaccaccggacagagccttcggcttacggtcgaggtactcggtcaggtcgaggatctcagcggccttctcgacgcgcttgcggatctcttccttcggagtgccggcgatcttcagagcgaagcccatattgtcggccacggtcatgtgcgggtacagggcgtagttctggaacaccattgcgatgtcgcggtccttcggctgcatcgtggtgacatccttgccaccaatgaggatgcggcccttgttgacctcctccaggccggcgagcatacgaagggtcgtagacttaccacagccagaagggccaacgaggacgaggaactcgccatccttgatatcaagattcagatcatccacggagggcttatcgttgcccgggtagatacgagtgacgtggtcgaaaacgacttctgccataattactaatcctttcagaggcaggtacgtgcctcacgatccgttgtaaagggatttgttctttactgcgcttccgccctcgccaccgacgtacaactttgctttcggaaactgcaagcttcagcgtttactttttttccggttcagtgaaggttctcttcgttgagccgagaactactatacacggaccgtggaccaaggcaagtggcgtgtctgaaaatgtagttaactttatgggcgtttctgggggtgttgtgtggttcggcccatgacacgcctgtttctcgaacgtgcgaaccggcacgcccggcgtagagcaggcctgctcttcccgaactgacggattccatcagtcgccgactaatgcgacacagactcgaaggtgacgccgttgcgggcggctttgcgctcggccttgcgctcctcggcgttttcgatgcgctggatgcgcagctggcgccagtcctcgcgcatgtcgcggaaacggtcggccagcgttacgtcatcgttctcggcatcatcatcagtactgctgccatcggccttaccgaacgtgccatcggccaccttggtgatgcccagcttgagcagtccgagcaactcacgcaacgtttccggtactggctcatcgccctcatcggcggacttggtcaggccctcgatgcggcgacgaagcgcatcggcgtcctcgggatcgatcttgagcccggcgatcaacgactggcgcatggtctcgtaatcgaggttggcaaagaaattcagctgttgcagcgtcatgaagcccttgagctcggggaatcggtggacgatgtattcctcgcggtcgtcggcggcgcgggtccagtcgcgggtgagctgcggatcccagctggcggtaatcgacccctcgcgcatgcggtagtggtacagcgccttgggcagacggaccacgcgcgtggcctcgccgatcacgttgcagatacgggagagatcctcgattttgcgacccaccgggaaggagaatccggtgccctgataggtggaggcgggtgccaggaaggcccagaaatagccgtcaatctcagccttgacttgctttttgatggcctcgaccggggtcaggacctgcacctcggtgaagtcgttgtggcgatagttggacagcagcggcttgttgttctcggagatggtgtcgaactggaacatcaccagatcggcatcgtattcacgcatggcattcaggcagtcttccaccagcgtgggggccacggtgtcgtcggaatcggcgaagtacaggtaggcgccggtcgcctgggcgatgccggcattgcgtgcgtcggacagtccgccgttgggcttgtgaatcacccgcacgcgcgggtcgcgggtggcccaagcgtcgcacatggccgggcagtcgtcaggcgagccatcatccaccagcagaatctcgaggttgcgataggtctgcgcaaccacagacttcacgcattcatcaaggaatttctcgaccttatataccgggatgatgatgctgaccaacggctcctgttccatatctccagcgtagcgccgccgtgcgaacgcggcggcgctgcgggttcgcggaccgcgaaacccttagaagtcccagtcgtcgtcatcggtttcttcggctttgcccatcacgtaggaggagccggagccggagaagaagtcgtggttttcgtcggcgttcgggctcagggaggccaggatcgcggggttcacatcgcaaatctcagccgggaacaaagccgggtagccgaggttcatcagcgccttgttaccgttgtaccgcaggaacttctcgacgtcatcggtcaggcccacgcggtcgtacagcgactgggtgtactccacctcgttgtcgtacagctcgttgagcaggtcgtacgtgtagtcctgcagatccagacgctcggcatcgctcagctgggcgatgcccttctggtacttgtagccgatgtagtagccgtggacagcctcatcgcggatgatcagacgaatcacgtcggcggtgttcgtcagcttggcgtgcgcggagaagtacatcggcagatagaagccggagtagaagaggaaggactcgagcagagtggaggccaccttgcgcttgtacgggttgtcgccctcgtagtagtcgagcacgatctccgccttcttctgcaggaactcattgttctcgctccagtcgaatgcggcatcgatctgctcggtggagcacagggtggagaagatggacgagtagcttttggcgtgcacggattccatgaaggcgatgttggtgtacacggcctcctcgtgcggggtgagcgcgtccggaatcaggctcacggcaccgaccgtgccctggatggtgtcaagcagggtcaggccggtgaagacgcgcatggtgagcgtgtgctcgtcctcggtcatcttctgccagctggggatgtcgttggagacggggactttttcgggcagccagaagttgccggtcaggcggtcccagacctcaaggtctttctcgtcttcgaggcggttccagttgattgcggagacgcggtcgatgagtttcagcggtttgcgcggaatggagataggtgccatgagtgttccttattactcgttgtcgttgtcgttatcgtcgttggatttgttttcgaactcctccggcgcggtcagccggagcagtgctctatagatggttcgtgacattgttggttccttagatggtggagcccccctcagtccgcttcgcggccagctcccctctctgaggggagctgtcggcgttagccgagtgaggggagtaacaacggctctctggttgttcaatgcgtgcggagaccgccgtctgaggccgaaggcgtacgaaggtacgtcgagtgccgaagaaaggcggtatacgctccctcgaacgatcagagcatgcaggagacgcagccttggacttcagtgccttccagggcttgctggcggatgcggatgtagtagagggttttgatgcccttgcgccaggcgtagatctgggccttattgaggtcgcgggtggtggcggtgtccgggaagaacagcgtcagcgacagtccctgatccacgtgctgggtggcctcggcgtacgtgtcgacgatggccttccagccgatctcgtaggcgtccttgtagtacccgaggttgtcgttggtcatgtaggcggccgggtagtacacgcgcccgatcttgccttccttgcgaatctcgatcttggaggcgatcgggtgaatcgagctcgtggaatggttgatgtacgagatcgagccggtgggcggcacggcctgcaggttctggttgtagatgccgtccttcagaatcgcgtcgcgcagggcctcccagtcggccgcagtcgggatcgcgatgccgtactgttcgaacagcgcacggacccgttcggtgcgcggagtgagcgaacgacgaccatcggtgtacttgtcgaagtagttgccctggccggccggcttggcgtagtcgctcgtagcgaagctggcgaacgtgcggccatgctccacggcgagcgcgtgcgaggcacggtaggcgtggtaggccacggtcatgaagtacatgtcggtgaagtcgaggccctcttcagaaccgtactggatgccttcgcgggccaggaagccgtgcaggttcatctggccgagaccgatggcgtggccctcctcattggcgcggcgaatcgaaggcaccgcgttgatgctggtgtgctcggccaccgaggtgagtgcgcggatcgccgtctccaccgtgtggcccaagccgccatccatcgccttagcgatgttgagcgaacccagattgcaggagatgtcgcggccgacatgcgcatacgtgaggtcctcgttgtatgcgctcggctcctgaacctgcaggatttccgagcacaggttggacatggtcacgcgaccttcgatcgggttcgcgcggttgaccgtgtcctcgaacacgatgtacgggtagccggattcgaactgcagttcggcgatggtggtgaagaacttacgggcgtcgatgtaggtcttcttgatgcggtcgtcggccaccatctcgtcataatgctcggtaacggagatgtcggcgaacggcttgccgtacacgcgctccacgtcgtacgggctgaacagggccatctgggccttctgtttggccagttcgaacgtgatgtccggaatcaccacgccaagagccagcgacttgatgcggatcttctcgtccgcgttctctcgcttggtatccaggaagcgcaggatatcagggtggtgggcgttgaggtacaccgcgcccgcgccctgacgtgcgccgagctggttggcataggagaaggagtcctccagcagcttcatgaccggaatcacgccgctggactggttctcgatgtgcttgatcggggcgccgagctcgcgcaggttgctcagcagcagggccacgccaccgccgcgcttggagagctggagggccgcgttgatgccgcgcgaaatcgactccatgttgtcttcgatgcgcaccaggaagcagctgaccggttcgccacgctgggccttgccgaggttcaggaaggtcggggtggcgggctggaagcggccggcaagcatttcgtcggcgtattcgatggcctgctgctcattgccggcggcgagctccagggccacagcggcgcaacgctgcgggaagtcctcaagatagaggcgaccatcgaacgtcttgagcgcgtaggacgtgtagaacttgaacgcaccaaggaaagtgccgaactcaaagccggcggattccacgtgctcgtagatgcggtcgaggaattcagcggagtactggttgaagaccgcagggttgtagtactggttgctgatcaggtattcgagacgctcggcggtggaggcgaaccgcttgctgttggtggccacgtgccctgtcacgtattcgcgttcggcggccttgtctttgtcgaactggatcttgccgtcggcgtcatagaggttgagcatcgcgttgagcgcgtggtaatcgtgcgccgggtcgtactgttccgctgcggtgtcggcagtattgtcgagcggcaggccggtggcggtgaggtcagtcattggaaatccttggaatatggcagaagtgtgtttactcagacagttgctcccctcggtcaacttcgttgacagctcccctcggagaggggagccaatacctcgagggggtcaagatttactgttcggtgaagaagcggacgaggccgtttcgcacggcggcagtgtcttccggggtgcccatgagttcgtaacggtagaggtagggcaccttgcatttggcggcgatgatgtctccggcggcacagtaggcctcaccgaaattggtgttgcctgaggcgatgacgccgcgaatccactcgcggttggctggatcgttgaggaagcgtttgacctgaatcggcactgctttcttgaccacgccgccgccataggtgggcaccatgatgacgtacggttcgcggacgtttagcgccggatcggcggcccgcaacgggatgcggtagacgttgatgccttcgtcctgcaaacggcatccggccacgaaccgtgcggtgttttcggaggccgacgagaagtagaccaatgcgccgatcgtcttgccttcggccgcgaattcgggctggctcagactcacgcggacaccgtggcggcggcgcggttgtcggcggccacctgctgggcgacttcgcgaatcaggtcggggcggtagccggtccaggagttgtccggcgtgatgaccaccggagcctgctggaaaccggcggcctgcagctgctcaagggtggaggggttctgcgtcaggtccacggtttcaaacggcacacccagcttggtgagctggcgcttggtggcatcgcactgcgggcaatgcggcttggtgaacacggtgacggtcatggcgactccccttgatgtggttctgatgaacagtgaagcgaaggccatattacagcggtgtgatttgaaatcaaggcactatatgtagtggcgcgtgtcacataacaaacctagatatagggtttttcgttgatattccgccattcccatgcaccccccgaaaatcggcgtgcagcgacccgcccaatcacatgtggcattgttcacatttgcgtttgaaccgctcttcgactgatcctcaaccgccctgcaaccgccatcttgagtttcgaggggctgttttgaccctttccggagatctatctccgtttcgaggggctggtactcaagtaagcgcatccccaaaatggcggaatgacggtggggcgaagccgtttatacccgtgttctagcgggccaccagcccctcgaaacgggagtaaacctctacggaaggccaaatcagcccctcgaagcggagaacggatacctcggcaccccgtgtggagccagaagacccggccggatgtccaaacgagcatccggccaggccttaaaagtagttgttcagttatcagaatcgatgcggcgcgatactactccgcgtctttacggctccaacagatcttcgatgcggcagccaagcgtgcgggccaaagcgagcacggtggagacggcagctttgccaaggtctttgcggcgctgctcgtacatttggatggagcgcagggtaacgccggagcggcgggccagcccggattggctgagtccggcgcgcacgcggatcgtgtgcagccgggagtcgccctcggtgcgattatgggcggcccgctcgtcgtacacgtcgacgaatcggctttcgtcggcttcgtgcagagtcgggtacagtcgcacgatatcgtcgagcgacagcacatcgagaatgtccgagaaccgcactcccctggtccattggcagtatgcgagtacccatccggcccagtattcgggtgttgagccggcgcgcagtgcggctggcggcatatcgagaatgcgcgcccaaccggtttgccgcatgatttcggccaccagctcctcgccggacatgccacacacgtatttgggcgtgcctcgcccgaaaagcgcggccgcctcggaggtggcgaagaagtccatgaataggccgaccggcaacccgcaatcgttcagcgcataatcgaaggcgccggccaagttggccatggcgtccggcaagtatgtctcatcataggcggggatcatcgttggtcactttctcgcggatgatgtcgcgcatgaacaggccgtcgagatcggcttctgcacttttgcggcggtaggcttcgcgagctgtgcggtcgcgctcgttacgcaatccgtggtaggtcgaagcgcgggcgatttcgcagccttggaaccgcagtgccgcgaatgcctgaggactggcgagtacgatctgcttgccgagctcgcccaaccgcatcgcctcagcgagttggtcgatggaaatcgcgttattgacaaaagcgcgggcgaacgagaaatacgaatcgtcggcacgacatccgacgatgacgtcagcctgactggcatccggcagaaacacttgtttcagatattcgatgccttgcgcggcgacggcggtggtcggctggaaacgacggttttcgaccagcatggccagccagttcaggatggtgtagggcggctgggacaggtccaggaagaggagcccgtccgtggtcaacgtgtaccgattcgcgaaaccgtcatccattcccgcgcacgcccattccttggccagctcgacgctgcgcgtgcaatagaatccgcggccataatcgttgttcggcttgaccagcccgtattcaggatgcttgatgacatgcgaagagccatgccacagttcgatcgatgcggtctccattggccggctccttctctctccttacatattcttgattatatcactgtggtgatagtcataagggaaatacgagatgaaaaataccgctgtatacgttcgtacacaacgtgaaatgtatacgaacgtatacaacactgatgtccggagtcatgctccgcagtggcgcagcggacgcgccactacaatcggaatatgggactgaagacgtggaagaagtggacggactggccgctgatggtgctgtccgtggtgtttctggtggtgtattcgtgggaaattctctcccgcacgcatatcgcgctgtgtgaaaccgtcatcaacgtgatctgggtggcgttcgtcgtcgattatgtggtctcgctgtggttggccgacgatcgctggcagtggttcaagcacaacctgttcacgctgctgaccatcgcgctgccgatgctccggcccttgcgactgttgcgtttgctgaccgtgctgcacgtgctgaaccgcacctccggcatggcggtgcgcgggcgcatcaccgtatacgcggtcggcgcggtgggaatgctcatgtacgtgggcgcgctggccgtgtattccgtggagcgcggggcgtccggatccacgatcaccgacttcggcacggcgttgtggtgggcgttcgtgaccgtgaccaccgtgggatatggcgacttctcgccggtcaccttccaaggcaagatcattgcggtggtgctgatgttcaccggcatcgcgttgatcggtattgtgacggccacgctggcctcgtggatcgtggatcaggtcaatctggagacggatcggcgcgaggacgctcgggagaaggaagtggccaaggaagccgcgcaagaggctattgcaacatcagccaatcccgaaatcgacctattgcgcgaggaagtgcgtgagctgaccgctacggtagccggtctgcgcaccgaacttgagcgacgttgattggcgaagcgggacaaacaacgattctgccaagaaggtccgcgtcagttgttgtcaccgcggattgcggcagaatcattgtcgccacggctgttttcttcagtcggctcaacccaacttttgataatttttatttttttgatatttttgataatttttattttaggttgattcagcgaggaggcggtccacatgaaggcaaaggaaaacccattcaagccaacggcaggaggggaaccgcccctgctcatcggccgaggcaaagttatccgcgatttcgagaaaggtctcgataacggagtcggtgccccagggcgcattatgctcgtcaccggcgctcgtggaaccggaaaaaccgtgatgctcactgtgttcggagaccgggccaaagcgcgcagatgggatgtcatcgaagaaacggcctctgccggactatgcgaacgccttgttgatgccttacgaaccgggcgaggggcccttgaccacctcactatccgaccatcgttgacttttgctggagcgggcatcggcctcggagaagccgaactatccccgaagcgtatgcccgaaacgttgagaagtgccattgccggacggttggatgcgcttgagaagcgccatgctgggttgcttatcaccattgatgagactcaagcggctgagcgatccgacatgattgccatcgccactgccatacagcatcaaatcagggaacgacgcaatatcgccatcgtgttcgccggtctcccacagatgatttctgatttgttcaatgacgaagtcatcacgttcctacgtcgcgcgaaaacgaacatgctcacagatattcctcttgatgaagtgcgcgatgctttcgccacaacattccgcgcctccggcatgtccatcaccgacgctcaattaagcactgcagccaatgtgacagccggatacccctatatgattcaactggttggctaccatatctgggatgccgcagacatgcgggactcggataccatcatcgacgctgatgttacggcaggtatcgaggaagcacgtattgaccttgataacgccgtgtgcatcccggagttgcaaggcttatccaaaaacgaccgtgagtatctcgaagccatggcagcgtcagatggtccctctcccaccgtgaatgttgcacagcgcatgggcaaaacgcctaactatgccgccacctaccgcaaacgcctccttgacgccttcgttatccgcgaaacagaacgaggcgaagtcgattttgccgtgcccttcctgcgcgaatacttgcgtcggaatcagtaatcggcacaatgcacagtatcgatatattccgttccatataatgacttttcgcattcagatacacaatggacggcctgttgagtagcactcagcaggccgtccattctatttagctattcagttatcggagacacacctcaggccttgaccggagcgccagcgacctgctgggaggccatcacgccgaacaggtagccgtcttcggagaagtattcgaaggtacgaccggcgaagtcgcggcattcgaatctgatatcgttatcgattcgatcagcggctcacgatactgcccttgcatcgctgtgccactgttgaatgtgcccggctggctcacctctgggtcaccgccgacacatccttgatgccgatggttatagagtcgcaaattcacgactggcgcacctgcccacgcacctatcctgtcatttcgagcgcataatttgctaccacatccggtcagggcaatcgaccttaatggcgtaaacggcacttctcaatacgtaaacggcactattcttggctcccctctcagagaggggagccaagaaatatcaagctcggcctcccaggagagagccagaataatgcaccggcaaggcattaggatggagggcatgagcgatttgaacgcgttgaatcttgagcccggcgaagtggttggtgggtatacgctgatctcccggctcggctcaggagctatggggtcggtgtggcgggtgcgcgacgacggcggcaccacctatgccatgaagattctgcgcgactccctgaccgacgagtcagtggcaggctccggctctgcgtccacggccctgcacgaccccaacctcaagcccgatgtcacgccgcgcgagcgcctgcggcgcgaggccatggccttgaagaaggtcaatcatccgggtgtgtgcggcatcgtggatatggaactcgacgatacgttggcgttcatcgtcactgaactcatcgagggcaagaatcttaaggatgatgtggccgccaatggccggtatgtgggcgacgatctggaacgcttggcccgcaagctcatcgaagccaccaaagccgtacatgcggccggcatcgtccatcgcgacatcaaacccaccaatgtgatggtgtcggccgccggaccggtattggtcgatttcggtatcgcgatgggcgagggcgaaagtcacgtgacccgcaccggcctagtgatgggtacacccggattcatcgcacccgagattattgacggtgccgaatccgacgacgccaccgattggtggtcggtggcgtccgtgctcgcttttgccgcaaccggcgcgcctgtgttcggcaccaagccgatgatggcggtacttgagcgcgaggcctcgggcaacgcgaatctttccggactaccggccggcacattggctgccttccgttctgcactggacccggatcgcagggatcgttgcacgccggatcaattgctgaatgccatcgccttggatgcgttgaatcccaacgcttggcagggcgagcaggcgggaccgttcgccgcgggagccgtggctggacaaccggctgcgatcgttgccgaagccgcggaggcgatgcccccttttggcgcggccggcggcgttgaccgcaataatccccgaaccatctggcgcgcggccgaggaagccgctgaggctcccaccatggccgtgttctccggcaataagggcgataacggcgatggcgaaaccgccgtattctcgccggctggcgccgctaccgccacgctgcccttagccgatatgccgccacgtccgccggccggtgcggagcaggccacgcaactgttgcccgacgctgctgccgatttcaccgacgacgccggcacacaggtactcaccggcgcgaccacaccgatgccggaccaaaccacaccaatggccggcgccaccacaccaatgaccaacaccgattcgactccggccccgaccacgccgctggccgagcgcaccaccgtactccccacgccgcagccgtcatcattccccccgtccggcaccgcccagagcagctggaatcccgcaagcaaccagcccacagcggtggaccccgccattcgcccggcattgcagcgcatcatcgaccaaaccgcccaagcggcccccaccgaaaccatggtccaaaatcctcccatgcccaatccggtggacgtgaagcgaggggaatatctgcggcgcggcaccctgccattgatcctgctggcggcgccgctggcggcactggcggcaaatgctccgctcgtggccatcatcgcggccactgcgttgttgtggctactgctcaccctggcctatagcaccgaaccccagcttgagcgcgagggcaaacgcggcggcgagcgcaaaaactccgattcgtggattcgcgtggcgacttttccctggcatctggtcaaagccctgctgctggccattccccgcatactgctgctagtcatcatctatatggcgggaaccgccgtggccaccgcggctctggcactgcccgttcacaccatctcctggtatttcaccgcggattggggtattccggtgccgttgctcaatgatgtgccgttctccgcttccgggctggcgctgggcggtttcatggccatcggctggctggtcactgtgttcgctccacagtcgatgatgattcggctggggggcggcgtactgcgcgggctcaaacacagtcgcccggcgggcgcgccatccaccgaagtgggtggggctccacctgctccagtggcgccggcgcccaagggcggcgggcgcggcaccgtgctgttcaccatatgggccatcatcaccgtggccttgtgcgcgatgccgattctgggcatgccgatcaactggatgccgttcgcctagagcggggcggaatctcacacatcagccatccgcacacatggccgttgtgtatccgatacgttcgttccgtcacacttttacagggaattcacctcagatcagctctgggcgcagtcctcctcaggcccggtcattatgatggggcccaaacattgaagcgattgcaaggggatagctatgtcagatccgaagcgtcaggccaagcgtgccacacgcgctgagcgccgagcggccgaggaggccgcccagcaggcacgggccgagcaggcggctaaggaacgtaagcagcagaccatcatcggctgcattgtggtggccattattgtggtgctggtggccatcgctggattcgccgtatacaaggctatgcggccgtccaacaccagcagcagtagccagcaaagcaacatgaccgtggacgaggcctatagcaagctcaagaaagtcagtacccagccggccaacgccgatgacaaggccggcttcgtgatctcgagcaaggggtacggtcagaaggccgaaggggcgcccaccgtttccatctacatggagccgctgtgccccggctgcgcctcggtgaaccgccagcttgacccgacgctcgtcaagctgatgaacgccggccagctcaacatcgatttgcacttcctcaatttccaggacaacaagagctccgacaactactccaaccgcgcgttcaacggtgccatctacattgccgagcatgatgacaatcccgatcacctcatgagctacctctccaacatctacgctgaggatttccagccgggcgaattgtccaattacgagccggtaagcaacgccaagctggagaagcaggccgtcaatgccggcgtgagcgagaatgtggccaccgcggcattcagtggtaagaacgaatacgtcaagtggctcaccgcctccaacaactacacgatcctacgccccgaactgttcaacagctccggcgcgttctcctcccccacgctcaccatcaatggcgaatactgggatctgaagcagctcacgctggcggacaccagcatggtggacggattcctcaagtccatcggcttggactccgatcaggtgggcgtggaaggccagatgccatcgatcggcgccaacaagaagccgatttcgctggccgattaattaccggcgcggctcggcctgaattgaccactcgagaactaccggtatactagagatttgttcaaaacgatttacgcgttaagaacaatcgcctctttagctcagatggccagagcggccgccttgtaagcggcaggtcgtcggttcgatcccgacaagaggctcgacgcgtagaaaagtggcgtattatatgatacgtagatttttctacgcatataattcttaccttgggtaagtactccaggagccttcccccaactatgggcttcctggaatgagggcggagcgtcccccaaccagctccgcgccttcaggggggcgggaacatccccttctctcccgccccctttttcttttctttttttgagctcagaacaatctgacgagcaggaatggtgacggtggccggtgaaaccgcagtacgggccggaacaaccgttacgatgggtggcgtaatcgttcatccagcaggaagagtatggcaatggcacggcgttggaccccgcagcggtttgttacactgcgtcgcatccgcgtaatcgcctgtatcgcggcgaccagtatcgcgctggctggatcattcgcgttcaccgcgcgtaaatccgtagccctgaacatcaacgggcaaaccacccaagtcaccacatatgcgatgacggccacccgtcttctggaggaacaaggggtggatatcaagacccacgatatcgtcactacctcgtccggcgaccaactcgccaatcatgccgtggtcaccgtacagtccgcctaccagaccactatcaacatcgacggcacgtccgttcccttctggaccgtggccaccagtgccgaccagttgctgggatttttcgaggaaaaccagaacaacgccacaaaaatcaccgtcgacatcgacaatgtgtacaaccagctcaccggcggactggtcatcaatcaggatggcccggtcaccgtcattgcggacggcaagacttccgtggcccccaacggcaaactgcccgcggcctccattcttgactccaaaggcatcgtgctgaacaaagaggaccgtgtgagcgtcgaaaaggacggcgataccactatcctgcgcgtacggcgcgtgacgcatggcgaggaaacgcgcacagccgtagtgccatactccacacaaaccatcatcgactccaatcttcctgaaggccagtcggagatccgccagcaaggcgtcaatggcgagaaaacccaggtgtataacgtcacgtatgtcgatggcgtggccgaatcggagacgctgaaatccgaaaccgtcaccacgatggccatcgaccagatcatcgccgtaggcgccgccaagtctgataccgataaaggttccgacaaaaatccgactccgccgataacggcaaggccgattccggttccaacaatcagcacgagtcgtccggtaacaatgccaacaacacaggcgacaagaacaacagcagctctggcaacaacacgaacaccgataccaacaacaatgccggcaacaccggcggcaacaacaccggcaattccggtaacactggtaattccggtaacaccggcggcggtacgaacaacaattccggctcttccggctccgattcaggaacaaccaccacgccctccggccgactctggcacgccaccgtagcccaggctcaggcctatgccgccggtgccgccgcgcagcgcgggtggacaggcaacgactgggattgcctggtcaaactatggaaccgcgagtccagatggctgtggtatgccgaaaacgcgagctccggtgcctacggcattcctcagtcgcgaccagcagacaaaatggctgcgttcggcgccaattaccgtgacgatgccgccgtacagatcgattggggtctgtggtacatcgcacaaacctacggcagtccgtccaaggcatggcaacattccgaacaaatcggttggtactgatcggttacgaagcccacaaggaacacacgcttatgaacgacaccattcccgccaccggtcacctgttaggtgccgccgatatccgtcgtatcgcggccgatgccggcatcagccccaccaagaaattcgggcagaacttcgtcatcgaccccggcacggtccgtcgtatcgtacgagaggcgggagtgaccgctgccgatcatgtcatggaagtcggccccggcctgggatcgttgacattggcgattctggaaaccggcgccaccatgaccgcagtcgaaatcgatccgccgttggccgaacgactgccgggcacagtcgccgaattcatgcccgaagccacgtcacgactcaccgtcgtcaatcgggatgccttaaccgtcaccccggagaacgtgcctgatttcagcgatgacgcatcgtttacgctggtcgccaatctgccgtacaacgtggccacgccgattctgctcacgctgttggagcgtttcgacaacctcggctcgttcttggtgatggtgcaaaaagaggtggccgacagactcgccgccaagcccggttccaagatctacggcacgccgagcgtgaagctcgcctggtatggcaccgccgaacgggtgggcaccatcggccgcaatgtgttctggccggctcccaatgtggattccgcgctcgtcagattcacccggtatcaggccgatgacccggccgccccgggagcctcgaacagcacggccgacggcggcgcacaacgggaactcgtatttcgtctgattgatgcggcgttcggtcagcgtcgcaagaccctgcacgcggcattgaagaccattgcgccttccgaggcattctccatcgccggcatcgatccgacccgtcgaggagagacgctcaccatcgccgaattcaccgctctggccaaggccatcgaatcgtgtggagatggagatgaggcacaatgagtccggtaatctcacatccacgcccagccgctgcccgacatcagttcgatgagctctcccccatcaccattacggtggattgcccggcgaaaaccaatctcaccttggaagtgggacctgctcacgacgaatggggcggacgccacgaactggacaccacctactgtgcaatcggcgtatacgacaccgtcaccgcaaccgccaagcaacccggagcgggattctctctggagctcgaaggcgcttatttgggcgacttggcctcctcacgcagcgacatgcgccgcaaccatgcggtactggccctcttcgccatggcccaggcggccgagcgcgagccggatgtggcgttgaccatcaccaagcgcattcccgtgggtgccggactaggcggcggttcagccgacgccgcggcgaccatgctggcggtcaatcgtctctgggatctgaactggcctatagagcgcctgcgcaccattgccgccacgttgggcgcggatatgccgttctgcctgaccggtggccttgcatacggcaccggtttcggcgaacgcatcacggatatcgcccccggcagccgcgatgagctggcgctgatagaacagggattcagcggcgaagtattggtcggcgcgtaccagtcgcaactcagcactcctgaggtctaccacacctttgacctcgtgggagccgcagaaggcgaccgcaatcatctgcaggctgcggcaatcagcctgcatccccgcagcgggcaggccatcgacgccgccacgcaggcgggtgccagccatgcattcgtctccggatccggcccctcagtggtcgctttcgccgccgacgaggcagcggcacaacgcattatcgatgtgtggcgcgatacggctgtggtcgatcgcattattcgagccaaatctcccgcacaccccaatatcggcgtcagacagtgacgctaaggtagcaaccagccacccgacccatgaaagaagtccaccgatgacgtatcaggttgatgaacgtgaagcccgcaaggcgtacgtgcgccaccgccagaccatcgtcttttccatcagcggcgcggtattggcagtagtgctggtcatagccctactgttcaatttccacgttttcggcctcggcgaagtggagactccggcccgccagccgaattacggcaacgcggcaccgtgcgcggtcaaggacagcagcggcaaagcgcaatacgtgtccaacgcttcggtcggcatccgcgtgatgaacggcacctctcacggccaattcgccaaggccgtgggcgaggctttggccaatcgtggattcagcgtgcagaaaatcgataactattccagcaccggcgttgaacgcaccaccatctacttcggcaagaacgccattaatcaggcgtatacgctgatcggcaatttcaccgacgccaccatgatcatgacggctcgcgaggatcaactcatcgatgtggtcatcggcgccacgttcaacgatctgcaggacaccaaatcctccccacaatccggtaagaccatcaccaatatcgagggttgcaaggccgccgatagcatgaccaagctgcccgccgacaccaaacacgacgcatacacggcggagtaaggcgcatacagcttcatcttcgcgaaaaaccgtacgctgacacgtattcagcgtacggttttttggtatcggactagtatcggactactgaatctcggcgtaccagcgcttgagttcttcgacggccacatcgtggtccaccggaccgttatccaagcggtattccagcatgtgcttgtaggcgcggccgatcatcgggccgggctccaggcccagcaactccataatttcgttgccgtccagatccgggcggatcgcgtcgaagtcctctttcttcttgagttcgcggacgcgctcctccatctcatccatggcctgggagaagatcatcgccttgcgcttgttttgtgtggtggcgtccgcgcgcgtgagcctgttcagccgctcgtacaggtgcccggcatccttgacataccggcgtacggccgagtcggtccacggctcgtccacatagccgtggaagcgcaggtgcatattcaccagttccgagacgtcctcgaccagatggtggtcaaaacgcagcgccttcaaacgcttgcgggtcattttggcacccaccgcgtcatggtggtggaagctcactttgccgcccggctcgaaccggcgggtcttcggcttgccgatatcgtgcatcacggcggccaagcgcagcgtcaggtcgggggcgggcaccgggccgtccgggccggtttccagggcgatcgcgcgttcgagcacaatcatcgtgtgctcgaagacgtccttgtggcggtggtgttcgtcgatctgcaattgcagggccggaatctccgggaagacgatgtccgcaagaccggattcgaccaacgcctcaaggccggcgcgcggacggtcggagagcagcagcttggtcagttcgtcgcgcacgcgctcggcggatacgatgtcgatgcggtcgcgcatcgaggtaatcgcctcggccgcgtccggcgcgatacggaagcccagctgggccacgaatcgcacggcgcgcatcatacgcaacggatcgtcgtcaaaggactgtcgcgggtccaccggcgtgcgcaacacgcccttggacagatcgctggcaccaccgaacgggtccacgaattgcaggtcgggcacacgcagggccatcgcgttgacggtgaagtcgcggcgggacaggtcgccctcaagcgtgtcgccataattgacctcgggcttacgcgagtccgtgtcgtacgtgtcggagcgataggtggtgacctccaccttgacctcggtgccgtccgggcggcggcgcatggcacccagcgtgccgaacttgcgccccatgtcccagaagccgtcatgcccccaccggcgcagtatcggctcgaactgctcaggccgtgcggatgagcagaagtccaaatcgtggctctttctatggagcagcaaatccctgaccgggccgccgaccaatgccagctcgtaaccctgttcggcgaacagtcgaccaagttcgatggcttcgggccatacttcgaaattcaatgggcaccttcccgcgtgcgacgtttttctgccctaccagcataccgttaccccacctgcacacggggttgagtaaggtggagaatatgattacgcccgccgaccttgcccgcatactggggcaaacaccagattcggcggatagccatacccaagaccacctgctgtatacgtccgaaactccgcatcattccgccgattcgggcgattctcccgatgccggcggcaccgtgagccactccaccaatcaggccgttcatcaagacgaagtagacgcagtaccgactgcgcaacattccggtgtacccggcacacccgcaacgcccgccacacccgcaccatccgaatccgaaatatcggacgccgccagcgacatgcccacaccgaagccgatgatgcccacaccggccaccgtcttcggcatgcatgccaccgtcaccatcgccactaccagcggcactatcgaggggcaggccgatggtatcgccggcgaggccggtgccgagacgattgccgaggtcgagccgattatcgccacggcacaaacgtccgtaaccatcgtcacgaacgattccgcggcgaccgcccacgcggccgtagatactgccgttgcggtcgccaaggccgccgccgcgcataccgcagcgataccgactccgagcgacgtgctgatgccgcctgcggcacgtaccgcaccggccgcaacgccggtcaccatgccggtctcagcgccgtctgcagcaccagtgaggcccgcaacgtcagcgcatcccacgccggccacggtcttcggccggcacccgtccggagatgttgcctcgccggaaccggcagtgccggtagaaccggtgacgccatccggcccgactccggccatgatgccgcaacgccgtacgtcggacggtccgaccacattcgcttcactggatgcccaggaactgccggtcgtacgcgaatattcggcaggcggtctgattttc

SEQ ID NO: 3928 - DNA, 9782 bp, Unknown
  R22_24m  MAG No. k141_18994
ctgactcggagtgctcatttattcctcggtttcaccatcttcgctggactcaccgtggccgaacagactggtttcgtcatggcgatcgtcgtcaacggtcgggtcggcccagtggccggccttgcgttcggccatcatcgcgtcgcgcacggcggcacgggcgtccatcatctcgtggtattgggcacgacgttcggcgttggagcggcggtgcgtgcgcgggtcctgttcctcaagacgcagatccttgcctcgggcaccgaggttggagccatcgagcatttcagcaccggcggagatggtcggatcccaatcgaattcgaccatacgggcaccacgaccgatgcgcacttcgtcgccggggtgagcacccttgcggcgcagctcgtcctccacgcccagcttggccaagcggtcggccagatagcccacggcctcgtcgttgtcgaagttggtctgcatgacccagcgctccggcttgacgccacgcacctcgaagaacacttcgccattgccgagttcgcggcgctcgaccgtgaactcaagcgcactgccgccctcatcagcgcgacgcggacggcggcccttggtctccaatggcttgataaccacgcgcgtctcctcttcggcctgctcgcggttggccacttcctcacgcatctcatgcaccagcgcagacaacgcgaagttgagctccttcagcccctcatgagaggcggtggagatctcaaagaccttcagcccgagtttctcgaactccggacgcacgaactcggccaattccttggcctcgggcacatcgatcttgttcaggatcacgatgcgcgggcgttcgggaatcgggatggcgcccaatggcagtccgagcttgtcggcgtagagcgccaactcgttttccagcgcgtggtagtcggacatcgggtcgcggtccggttcaagcgtggcgcaatcaatcacgtgggcgatgatttcggtacgttcgatgtggcgcaggaactccagtcccaggcccttgccttcagaggcgccaggaatcaggcccggcacgtcggcgatggtgtatcgagagtcgccggcgatgacgacgccgagattcggcaccagcgtggtgaatgggtagtcggcgatcttcggcttggcggaactcatcgccgcaatcagggacgactttccggccgaggggaaaccgaccaacgccacgtcggcgatggacttcagttccagaatcacgtcgcgttcctcgccgagttcgccgagcagggcgaagccgggggcgcgtcgggtcttgttggccagggcgatgttgccgaggccgccggcaccgccctgggcgacaacgcagcggtcgccctcgtggcgcaagtcggcgagctgtgcgccgggatgcttggctttgccctgttcgccgcgcgcctcaaagacgacggtgccgcagggcacgggcagaatcaggtcctcgcccttggagccgtccttattgtcgcccaaacccatggtgccgctgccggcgacacgatgcggcatgaaacgatagtcgagcaggctggtggcgttacggtcggccacgaacaccacggaaccaccgtcgccgccattgccgccgttcggaccggccaacggcttgtatttctcacgacggatgccggccgaaccgttgcccccatcgccgcccttgacatggacggttactcgatccacaaaatcactcatattgattaccttacaaaaaagccgcgtccttacgggcgcggcttgaaaaagcttgacgctatatcgctcaggcgatgacgtcgacaaccttgcggtcgcgacgcacaccgaacttcacggagccatcggtgagggcgaacagcgtgtggtccttgcccatgccgacgttgtggcccgggtggaagttggtgccacgctggcgaacgatgatgttgccggccacgacggcttcgccgccgaacttcttcacgccgaggtattgcgggttagaatcgcgaccgttgcgagagctggacgcacccttcttatgtgccatgattcatggtcctttctataactcaggcaatcgccgtgatcttgacgatagtcagcttctggcgatgacccttacggcgagcaacaccagtcttgttcttgtacttctggatgtcaatcttcgggcccttggcttcatcgttcacaacctcagccttgacggacaccttggccagatcggcggcggcgagggtgaccttgtcaccatcgacaacgagggagaccgggaattccacggtatcgcccttcttggcgtcgagacggttcacgaggatgacgtcgccaacctcgaccttttcctgatggccaccggccttcacaatcgcgtacattatcgttccttttatgttttggaaagctaccttgcctaacacgcaccgagcttgcggtcagacaccgagtttcgaatctacaccaccatgcggactaaatcaaatgatttttgcccgcgtgtcaagcacgacacacctgttactcttccgccgtattgttggcggcgacggcagcggcggcaatctgagccagtttggctttgacgtcggcgctggaaccagccggttcgggagcgggagcggtgccgcgaccgtgcttgttggttttgacgaacgggtcgccaccgcgaagcgcgtagggatcgtcgtagtcggccgaaacggtcggctgatcatgcaggatgaaaccacggcccttgcaggtcgggcattcctcggagaacgcctcgaccagaccctggccgatgcgcttgcgggtcatctgcaccaaaccgagcgaggtgacttcggccacctgatgcttggtgcggtcgcgtgccaggcattcgaccaagcggcgcagcaccagatcgcggttggcgggcatgaccatatccacatagtcgatcatcaccatgccgccgatatcgcgcaggcgcagctggcgggcgatctcttcagacgcctccaagttgcagcgcgtcaccgtttcttccaaggacttgcccttgccgataaagcggccggtgttcacgtcgatggtggtcatggcctcggtgcgatcgatgacaatcgagccgccggacggcaggtagacctgacgttccatgcccttacgcagctgggagtcgatggaccatttgtcgaacacgtccttgccttcgtgctcggccgggtcccacttctccagcttgtccttcaggtcgggggccatggtgtcaaggtattcctcgatacggtcgtagaccttgtcaccttccacgatgagcttgctaaagtcgtcgttgaagatgtcgcgcaccacgcggatggccacgtcgggctcgccctgcaggagtttcgggcgcttgccgtgccagaattcctcgcgcttggcgttgatgcgctcccactggcggaccagtgattcgagatccttgacgatggcgtcttcggatgcgccttcggccgcggtgcggataatcacgcccatgtctttcggggcgatcttggagacgatgttcttcagacggctgcgttcgcgctccgaaagcttgcggctcacgccggtcatgccaccggagggcacgagcaccaggaagcggccggcaagcgtgacctgagaggtcaggcgggcacccttgtggccgatcgggtccttagtgacctgcacgagcaccgggtcgccggacttgaacgccagctcgatgcggcgcggctgaccttcgagacgagcggcatcccagttgacctcgccggcgtagagcacaccgttgcgggactggccgatatccacgaatgcggcctccatgctgggcagcacgttctgcacgcggccaagatagatgttgccgacggtctgtacttcctgaatgtcggagacataatgctcgaccagaacattgtcttccaccacggaaatctgggtgtggtgttccttctcgcgcaccaccatcaggcggtccacgttctcgcggcgtgcaaggaagtcctgttccataagctggctctggcggctgcgctcacggcggttgtcacggcggcgctgcttcttggcctcgagacgagtggagccttccacatcggtgatttcgtcgatgtactgctgcttgcgggagcggcggaccagcggctgttcgctgttctgactctggtcgtcggtgccctcgccgttcttgccgccacgacggcggcggcgacggcgagtgacggtctgctcctcatcgtcctcatcacgatcacggtcatgatcatcgcgatcgtcacgacggcgggaacgcgtatcctcggcatcgttctcggcggtatcgtgctcgccgttggcaccggtttcgccgcgtgagccacgacggcggcgacggcgcgaacgggtgcgggtgacgtcggattcctcgtcgccctcctcctcggcaatcggcgagtaggcgatatcgtccagctcgaggtcttcctcaatctgctcgacttcggcggctgcacggcgctcctgggcgttcagacggcgggagcggcgcgaacggcgggagtccgaggtgtcgtcggcgtcgaaatcgtcgtgatcggcgttggtatcgccggacgcggcatcacgggaagcgtcacggtcggcggaggcgcggccgcggtcgtcgcgatcgtcgcggcgacggctgcgcggctgggcatcgtcatcgtcgtggctgcgcgagcggcgggagcgacgagacgggcgttcgtcggcgtcaacatcgtcatcacgagtgtcagcggtatcgtgcgcatccacggcggcgggcagcaccggttcctggaacagcagggacgtcatcggcttgccacggcgcacggtctcgtggccagagggcagggattcgaccgcgtcgaacaggcgctcatccggggtgtcctcgtgcgtatccgcaactgcacggcgagaacgacggcgaaccgtacggtcttcgtcatcatcatccatatccataggcgcacggcggaggcgggagcgaaccgggcgatcctcgtagtcatcatcgtcggactggcgggagcgagagcggcggcgaaccgaacggtcctcgtcgtaatcgtcatcgtccacgactgaacggcggcgggaacgcggggcggcatcgtcatcgaaatcatcggcactgaccgtgcggcgcgaacggcgcggacgatcatcctcgctatccaagtcggccactgcggaagcggcgcggcgcggacggcgcggagtctcgtcgtcatcatcggtatcgctggaagatgcggcggacgtacgacgggtgcgacgcggcgtttcggcggcatcgtcggccgtggaaacgcggcgcgtacggcggcgggttggacgttcggcggaatccttggaatcgctggattcatcggaatcgccggaatcggatgacttggaatcggccgcggtgctggcattgggaagcgcgggggcttcgaacagcggggtgcgttcctgcacttgcagttccagggaggcgccggcagcaccggtgccgcggaccacgcggcggccgccacgacgacggcgaacaggttcgacgggctgggaggcggcggcaggcgcagcgttcacggctgcagccgaatcggcattggatacggttgaattatcggttccgtcgttgacgaaaccttcacggttgtcagtgggcacaatgctcctcgcggcgcgctgcatcacgacgcctatttccaggcctatacgcttgactcacaccacgctctcaccgtggccgcgcgaaaacgcgccgcgtaaaggcaacttcgtctcaagtctgtcctgcgggtggcggacaccggcgcttgcgttgtctcattctcgagagccgcaaggggatcgacgccatctcgcacgctgatggttatgcagaaccaccatcctttagtatgccacatattttgtgcgggcgtggcccggcgaggctgacgttctctcggctcccctccctgcggtgacagctcccctcagagaggggagctcgagaggtgtcagaccagccagtcggtaagaattgcggtcatggcggccaggtcggattcgggcacctgctcgtcgtgcttgtgcgccagcagcgggtcgccggcaccgaggttgacggccgggatgccgagctgggagaagcgtgccacgtcggtccagccgagcttggccaacgggtcgcggccggtgcgctccttgaccagtcggaccagatcttgggcgagcggggcgttcaggcccgggcgcgcggaggggctttcgtccttcatttcgatgccgtagccctcgaacacgccgccagtggccacatgctcgccattgccgagttcggcaccggcatccgcgcccatcatcagagccttggcctcggccagcgacttgtccggggcgaagcggtagttgacgtgtacgcggcattcatccggaatgacgttcgtgcctttgccgccggaaatcagcgtggcgttgaggccctcgcgatagtcgagcccgtccacgttcacggtggccggctcgtaagcgttgagtcggctcaggatgtcggccgccttgtggatggcgttctcccccatccacgcgcgggcggagtgcgctgccacgccgtgggtcacgacgtcgaagcgaatcgtaccgttgcaaccgccctcgatgccgctgttggtgggctcgccgatgatggcgaaatcgccggtgatccaatcgggatgggcctcgacgactttgcgaaggccgttcttttcggcgacgacttcctcatggtcgtagaagacgtaggtgaggtcgactttcggggtggtttccggcgtgcggccgtcgagcgtggcggcgaggtagagcatcaccgcgtcggaggccttcatatcggtggcaccgcggccccacagcacgcggtcttcgggatgagcgtgggcgatttcttcgcgaatcagcgaatcgccgggctccagccacttcggtgggaaattgtcgatgaccggcacagtatcgaggtgcccggccaagatcacacggttcggctcgccgaagtcggtgctggccaccactgtgtcgccgtgacggcggacggtcaggtgctcttgctcgttaaggaaggcctcgacctcgtcggtgagggggccctcgtggtcggacacggagaagttctccatgatctgggtgagcaggctgttcagctgctcggcagtggatgcggtgcggttcaattcaaacgtcatgtgaacagcgtaccgcgtgggcggcgggcccagcacacccactacatgagattttgcggccgaatacatttttatgtgccacactggggtggcgaaagggaggattatgtcaggtctaatcagcgccatgcaaggcttctgcgttatcggcatcgtgattgcggtgggatatgtcgccgcacgaatgcgaatcggcgggccgtccgctcagatggtgctcaaccggttctccttcttcgtatcgagcccgtgcctgatgttcgccatcctctccaaggaaccgatcttcgacatcttccatccctcgattatcgtggcgttcttctccgccgtgctggtaggcgtggtgttcctggtgctcaaccgcatgttcttccacctgaacgccccggacgccaccatcggcgccctgaattcgctgtacctcaattccaataacatcggcctgccaatcgccacctacattctgggcaatccggctctggtggcaccgattctggtcatgcagcaggccatcttcacaccggtgggcctgacagtgctggacgtgaccaccaagggcaaggtctccatcaaggaaatcgccaagcagccactgcatcaaccgctgcttatcggttcgctgctgggcattgtggtctctgcgatttccgctaaaagcggctggttcccagtgccgaaattcattttcgacccgatcgacatgatcggcgattcagcggtgccaatgatcctgatggcgttcggcatgtccctacacggcaccaagccgctgcagcagaagggcgatcgcccggccatcttcacggtcgcggtcctcaagaacatcatcatgccaatcatcgcgttcctgctcgcctatttcgtgatgggcttccgcggctccgagctgtacgcctgcgtggtactcgccgctctgcccaccggccagaacgtgtacaactacgcggcccgctacaacgtgggcctcaccttcgcgcgcgacggcattctgatgagcaccatgaccagcccggtgtttatcgcgatcatcgcggcgctgctgagctgagccggcaactgtaatcaccgtaaaaaacttccgcgaaatccaccgtaggattccgcggaagcctgagatatacactacttgagaatcgccttaatcgcctcatactgctgagcagtgagttgcaccgctggctcacggatcagggtggaaatgttcagtcccttggccttgaccgcacccttgatggcggagatgaacaggtcggtctgatcgtacagcgccatcaggtggctgatgcgttcggcggcctcaattgcggtgccatagtcgccggcctcatatgcacggtgcagcgtaacgaaggtctccggctccacattggtcatgccgcagatcacgccatcaccgccggagacgcggttgacgagatagtactcgtcgaaaccggagaacaccgcaaaccgtggattcacggccttgaccgcgcgaatcaccttgcgggtgtggctgattgtgtcgaccgtgtccttgatgccgacgatgttcgggtgcgcggcggcaagctcggccacaagctccggggtcaagtcgctgccggtgcgcggtgggaaattatagaggatcaccggaagattcgtcgcttcagcgaccgcgccgaagtacgccttcgcgcctcccgcagtagggccgaagtaatacggcgaaacgaccacgagcgcatccactccacttgcttcgactgcccgcgcgaagtcgatcacattgttcaagttggtatcgcccacgcccgcgaacaccttgatgcgcccggcgacatgcttggccacgaagtcgaccgcctgcttcttgacgtccagagggaaggcatagaactcgccgatgctgccaaacaccagcacgccgttgataccggcctcgatcagatgatcgagatgctgcccccaacgttcatagtcgatgtcaccgtcgtccttggtgatggtgatggatgggcagatgatgcctgagaattcggcgctgctcgtcatgattgttcctttcgttacggaataggggtgccgcacaagcggcaccgggtttgcggcctctcccccagtcgtcctgcggacgatagccccctcatcagagggggcttgggtttagtcgatgttgtaagcgcggcgggcgttgttttcgaagaagtcctcgtcctcgccgaacgtgtccagcatgagttggaagtgcgtggcaaaggtcgagttgagttccacgaccggccagttggagctgtacagcaccttcttcgggccgaatgtgtcccgcacgtatttcacgatgtccgggtccaccgggttgtcgccggaaatcttgatatacgaattcggcagttcggccaacgctgcgagcgcggcgcacgattcctcatcaagcccgggcacgttgccgagatgatcgatgatgaccgtcacttcgggaacctgcgcgaacgccttggccatgtcgcccagttccgggccacggttgcacagctcgaatggcaatcccttggcggccatcgcgcgtagaccggcgatgaattcgggttcgagcgcacggccccgcggctcggaatccacatgcagcggttccctgatgccatcggc

SEQ ID NO: 3929 - DNA, 9056 bp, Unknown
  R22_24m  MAG No. k141_19125
agcccctcgaaatcgggatgcacggtggtcagcggtgggtacatgttatccacgccagacatgtcgtcgaatccgaccacgctgatgtcttgcggaatccgaagcccatgctcatgcaacgcgcgcatgatgccgacggcctgattgtcgttcgcggcgacgaccgcggtgggcaacgccgtgcctcgacgcccatactcatcaatgagatgattcatgtgcgcatatgcctcagaggcatcccacgtatggcagcgcacgatctgtgaatcgatggatcgggaggcggcgagcttgcgccacgcatccagtcgggtgtgggcgtcgcgccattcgttgggaccggcaaaatacagagccgatttgtgcccgtattcgcccagcaaggccaccactttggccattgcaccccactggtcgataccgaccagtgcagtgcgacgcttgttttcggtggagataaggcccaatccctcacgcacggtcatttggccgtgggtggcggtgacgatgacgcgtggctgagtgactcgcgcacggcaggcggcggcgaacatcacgtcggtcggggtcaggaagatgaaggcgtcgacgttctgctcgttgaaggtgtcgcacaggttgtcgaattcggactgcatgcacaaggcctcgtggaccatcatcacgctcatgaacagaccgtgttcgcgggccatggattcgatggatgagatggaggaaatcgggccgaagaatttgaggcctccggcgatcagccctatggtgcgcgaacggcgggaagccagtgcgcgcgcggagttggaggggcggtagccgagttggtcaatggcggcctggactcgcgcacgggtggcgtcggaaacgtccggcgagtcattgatcacacgggagacggtttgatggctgactccggcgagcttggccacttcgaacatggatggacgtttgcttggcttgcggccggtcaccatgctacctaacctcccctctggcggccggcatccgtgcacggccaggcttgtaccttaatcaatactgactttagcgcgtccacaacagttttgcgttagcgctcacactgtcgtgtcgcacgcggctcaggtcaggtgccatgagacacgatggagcggagtcggcccgtgttcggcgatggcggcacggtgtgcggcggaaccatagcccttgttatgagcccattcgtaggcggcgtaacgtgggttgctttgcgcgaggtcgaccatcagccggtctcgggtcactttggcgatgaccgccgcggtggcgacggtggcgcaatgctggtcgcctttgactttggtcgttatatcggctggaatcggcacgtccggcgcgtcgaacgtgttgagcgccttggtgatgtaatcgctcggcccgtcgagaattccggcgactttgggcagggcgcgaacgctttccccacaatttccaatggattcccctacggagtctcccggacgaccttccacaatctcccccgcagccttttttgccgtcaatccccctccaagccgtaagccaagttcgcgttcgacttggctgagcgcgcgcagggcggccacgccgagcgcataggtgatgccccattcgtcgatctcggtgttgctggcctggcctacggcgtaggccgcgcaccagtcgcgcagttcgtcgaaaatcgcctcgcgcctatgttcggtgagcattttggagtcggccacgccgtccggcacgccgaggtaggtccgcccggacagttcggcggaatcatcgccgtcaagcggcgccaaatcacaggcccagatggcggcgcacccgaccatcaccggaccggcgagcgcgccgcggccgacttcatcgaatccagtaataaggtcatagccctgggccgcaaggctgcgttccaagtcaagtgtcggggtaatcatgcgcggctcccatcgtctcacaatggttaggattcagacggtccaggttcaaatggttcaggattcagacggcccggaactcaatcgttcaaagactcacacggttcaaaaaagactcaggaatttgagccggaagcgtcaggcacgtccttgaagacttcgtggtggtcatcaatcgcaccaagccggtcaagcggccagtatctcgcgattccgactccgaccacatcggagatgggaaccaagccgcgatcgccgtcatcctgatgatagcgggagtcggcggaattggcgcgattgtcgcccatgacgaacacgtggtcctcggtcacggtcaccgagaacgggaaggcgctcggatccacgccggggcgaatgtaggaggtctcattgatggccacgccgttgatggtcaccggctggcccgcgcccttgcattcgaccacgtcaccgggcaggccgatcagtcgcttgatgaggtacccgccaccgggagcgctgctctgctcctcgttcaaccagttgttgggatctttgaataccacgacgtcgccgcgctgcagatcgaagatcttgggggtgagcttgctggtcaccacgcgatcgccgggcaccatggtgtccatcatcgagcgcgaaggaatctcgtaaaagccgacggcgaaaatgcgaatcagcagcacgataagcacgggaacgccgcaccacaggaaaaagtcgcgtagggtgaagtggtcatcatccatcgatgatgctgccgcggcattcgcgccagcggaagaagcggcgtgcgccgggcgcgccggtgccgggggaaccggggacagggcgatgccatggtcggcgacttggaacgtacgggaatcgcgggcatcggcctcgtcatcatacgaggtctgattgctctccggattgtcggaaatcgggaattcgccgttatcctgatcgtcctgcataccatctcctcgcgattcatgctgccggatatgaggggtgccggcgcccgtccatcatacgtggaaaatacgaaaacagcccgaaaccgaaacggttccgggctgaatttcacggtttattcgcgcacctgcatcatcaggcccacgattgcacccgcgaatcgactcacttagcggagttgtcgcggcgctcggcaatacgagcggccttaccgcgcagagcgcgcaggtagtacagcttggcgcggcgcacacggcccttacgcacgagcttgatggagtcgatggacggggagtgcaccgggaagcgacgctccacaccagtgccgaagctgatcttgcggaccacgaaggtctcacgcacgccagcgcccttacgagcgatcaccacgccggtgaaggtctggatacgggagttgttgccttcctggatcttcacgttcacgtcgacggtgtcgccgggacggaaggccgggatttcctcagccggcttcatgtgcttggcgtcaaaagcctcaacagcgttaaccattgttttccttcagtgctgccgcatatcagccacagatctggggccatccacgcgattgcgcatcacgtgcgttggcctgttctcgttatccctcgggtttgcccttgggaagcctgccgatccgccgaaagtcaggccttgcggccgttcggactggacccatggagacgtgggcttatgcggcggcccacttctcgacacagcaatcgtcaattgtacggattattgcggacagaatggctgcctgatggcattccaacaccaaggcactgcgacgtagttgacagacctgcaggcgggctttatcttgggagcgtcggtaggcgaggctaccgcagggatatgggttgctgccgctaacagtggagacactgcacgcaggtcagcagttcttgtcggatcaaggcatgaactaacgcaattccaccgccctgcgatgctgaagcttgaacgatggctcgaatcggcggattcgaatactttccgcccctcctgctggtcgcatggataccgacgatggtattgatctggcgtttcagcgcacggcttgaaggaggtgagagtccgatggacggtgattattccagtagttccgccgccggcaacagtcatagttgcggtggtgatgaccatgttttcttatattccgttatccggaagtcgggctctcgcctgtagtgttccttggctccccggataacccttgcataattcgtctttcctatgcatagggaggtcttttcatgaccatgttttcattcaatcgcgtcggcgcgcgtccaaatgcgtcggcccgcaacccttccaccgccgcgtccgaccgccagccattcgccgtgcgcctggcctccgacgtactggtcgtggccggtattctggcgctgttcggtctgatcgcttggattctgccggcgatcggcgaaccgatcggcccgaaaggcgtgccgtcacaagtcagtacgcatctcgccgacctgccgtattacgcgctgcgctcggtgttccgcatgctcgtggcactgttcttctcactggtgttcacgttcatctacggcacggcggccgcgcgctgccgccgcctgagccgcgtactgattcctctgttggatattctgcagtcggtaccgattctgggctttctttcggccaccatcaccatctggatggtgctgttccccggctcgatgctgggcgtggaggccgcgtcgattttcgcaatcttcaccagtcaggcctggaacatggcgttctcgttcacccggtccctgaccagcgaaccaactgaactcgacgaggcggcccgctcactacagctcacacgctggcaacgattctggacactggacgtgccgaacgcgatgattccgctgctgtggaactgcatgatgagcgtgggcggcggatggttcttcctgaccgcctccgagatgatctcggtgaacaatcgcacctatgcgttgcccggcatcggcagcttcgtggcacaggcggcggccgaggagaatctcgcggccatctgctgggccatcgtgacgatggtgctggtggtgctgcttatcgacgtactgctgtggaagccgctgaccgcgtgggcggagaagttccgcattacgcaaagcgagtcggcggtgcgcaagaccagtgtggtgctgaccatcattcgtcagtcacatatcgatgagatggtggcctggctgttcaggcctctcggcgacctgttcgacacgctggcccgcccgttgggtcggaccggtggacgttgggcggcggacgtgaagtccgcacgcagccgcgcgcttgacgtggtattcacagtgctggtgttggcagcgtgtgcgttcggactggtgcagcttatgctggtgattcatcgcgatgcgggattcggcgagctcgggcaggcgttcgtgttgggcatggtgacgttcctgcgcgtggcgctgcttacgctcgtctgctcggtgatttgggtgccgattggcgcgatgatcggcatgaatccgcgcgtttcgcggtttatgcagccgattgtgcaggtgctggccagcttcccctcgaacttcacgttcccgttcgtcacgctctggttcgtggcatgcagcgtggatatcaactggggcagtattctgctgatggcgttgggcacacagtggtacatcctgttcaatgtgatcgccggggccagccagattcccgacgatctgcgtgagatgacgcgcagcttccagctggggcgctggcagcggtggcgcgatttgattttgccggcggtattcggctcgtgggtcacgggcggcattacggcggccggtggggcgtggaatgcctcgattgtctcggaaatcgtaagttatggacggcatacgctgaccgcctccggcctgggcgcgtatatcgccgaggccaccgaaagcggcaacaccgtgaggaccatcatcggcgtgaccgtgatgagcgtgttcgtggtggccgtcaaccgcctgttctggaacccgctgcagcgcatggccgagcgccgtttcgcactgaactaaagacttaaggagaataatatgactgttgcaatggaaaccattcgttcgctgcgggcggtgaccccgcagaacaccatcatcgaagcccagcacgtcggccagcgcttcacggccgacaacggcaccgaactcaccgtgttcgacaacatctcgttcaacctgtacgagggcgagatcgtggccattctgggccgttcgggtgccggcaagtccacattcctgcgtgcgctggccggactggtcaagccgaccagcggcacggtcaagtatcgcggcgaggccctgaccggcccgaatcccggcatcgcactcgtgttccagaccttcgcgctgatgccgtggctcaccgtgcaagacaatgtggaactcggtctgaaggcgcgcggcgtaccacgtgcggaacgcaccaaactggctctggatgccatcgacatgatcggcctggacggcttcgaatcggcgtatccgaaggaactgtccggcggcatgaggcagcgcgtgggcattgcacgcgccttggtgctgcggccggacgcgctgttcatggatgagccgttctccgccctggacgtgctgaccgccgaaaacctgcgtcaggaagtgctcaagctgtggtcgagcgaacagcgcagcatcaagtcggtgcttatggtcacgcataacatcgaggaagccgtggagatggccgaccgagtggtggtgttgggctcgcacccggggcatctgattgccgatgtgcgggttgatctgcagcgcccgcgcgaccgtcacagtgtcgaattcgaggcgatggtggaccgactgtacgcgattctgaccggacaggcctcgcagcctacgcaacaagccgaggctctatcgccatcggcatcgctcacgaacgcacccgtcacgaacgcacccgtcacggacgcatcagaccttcagcccgccaagaccatcgagaaaatcaaggagcatccgctgcccaacgccacgccgggcgggcttgccggtctgctggatgtggttgccgagcatcctcacggcatcgacttggcagatttggcctcggctctttcgttcgaggtggacgacctgttcccgctggtggatgccggtacgatgctgcgcgtcatcgtggtacgcgacggccatgtgcagatcaccgaggcgggcgacgcctggcataaggcggacattctgcgggccaagcaggtgttcgcctcactggcgatggaacacgcgccgctggtgcgcaacattgagcatgcactgcggaagtctgcggaaggcaagctccgcggcgagctcatgctggacctgctgcgcgcccgttactccaacgacgaggcgcatcagcagttcgccatcgccgtggagtggggccgttacggcgaactcttcgattacgatgccgatgacgatctgctgagcttggatgaggcgaataagggcgaataagcgaatcagccacgtgagttggccagatagtgcctttatgcctgcaaacagatgccgaagcggaatatgaccatgttcgactcatctgactgacagcaatccgtatatgcaaagtgcccggcatccgaagatgtcgggcactagtcgtgagagagactccctcagtcaactacactgacagctcctctcacccgagggggcaccagaggaacgaatcagaactcgcgacgtgggcagtcgccagactgcccaccagacagcacagccgcggtcgcgcgaatcacgaattctgaccgagcaaagcgaatcagaattcgcgatttgcgcggtagaacttgatcaggctctgggtggaggcgtcctgggcggcgagggcgtcgtcgtcctgggagatggccggggtgatctgcttggccagctgcttgccgagctcgacgccccactggtcgtaggagtcgaggccccacacggtgccttcaacgaaggtgatgtgctcgtacagggcgatcagctcgccgacggcgaacggggtcagggccacaccgaagatggaggtggtcggacggttgccggtgaacacgcgggccgggacgatctcctccggggtgccttcggcgcgcacttcgtcggcggtcttaccgaacgccagggccttggtctgggcgaagtagttgcccaggaacagctcgtgcacgtcctggtcgccgtccttggtcgggttcggggtgttgacgaacgcgatgaagtcggccgggatgagctgggtgccctggtggatcagctggtagaaggcgtgctggccgttggtgcccggctcgccccagaagatctcgccggtctcggaggtgacgggggtgccgtcccaacgcacggacttgccgttggattccatggtcagctgctgcaggtaggccgggaagcggtgcaggtactggtcgtacggcagcacggcgtgggaggcgaccttgaagaagttgcggtaccagacgttcagcataccgagcagcaccacgacgttcttctcgaacggggtgttggcgaagtattcgtcgatctcgtggaagccgtgcaggaactcctcgaagcgggccgggccgaagacgacggccagggaggtgccgacggcggagtcgacggagtaacggccgccgacccagttccagaagccgaacgcgttgttcgggtcgatgccgaattcggcgaccttctccaggttggtggagacggcgacgaagtgcttcttgatggcctcggcgttcttctcgtcggagccgtcgatggcgcccttggccttgagctcttcgagcagccaggtgcgggcttcacgggcgttggtcagggtctccagggtggtgaaggtcttggagacgatgatgaacagggtggtctccgggtcgaggcccttggtcttctcggccagatcgttcgggtcgatgttggagatgtagcgggcggagatgccggcgtcggcgtacggcttgagggcttcgtacaccatgacgggacccaggtcggagccaccgatgccgatgttgaccacggtctcgatcttcttgccggtcacaccggtccactcgccggaacggaccttgtcggcgaaggcgtagatgcggtcgagcacctcgcgcacgtccttgacggtgtcctggccgtcgacgatgta

SEQ ID NO: 3930 - DNA, 2506 bp, Unknown
  R22_24m  MAG No. k141_19237
caggcgttcttgccggcaccggcctcgatcatggcgatggcgacgtcaccgttctcgacaacgcggccggcgaccacaatctcgaacacggcgcgctcacgctcgctccagcgcgggaaggcgacccactgaccgtcgatcagagccagacgaacgccggaaaccggaccctcgaacggcagaccggaaatcatggtggaagcggaagcggcgttcagggcgatgacatcgtaagcgtcatcagggttcacggcgagcacggtctcgacgacctgcacttcgttgcgcagggtgtgcgggaacagcgggcgcagcgggcggtcgatgatgcggcaggcgaggatggcctcggagctcgggcggccttcacggcggaagaacgagcccggaatcttgccggcagcgtacatcttctcttcgacatcgacggtcagcgggaagaagtcgtagttctccttcgggctggaaccggcggtggtggtggacagaatcatggaatcgtcgtcgaggtaggcggccacagcgccatcggcctgctgggcgaggcggccggtctcgaagcgcagcgtgcgcttgccgaacgatccattgtcgattacggcctcaacggccttgatttcgggaccctccatagggttcctccttctttaattttctaattattcctacatactgtgctgcggtttggcgactcgcttgaaccgcaactgtcctcttcagcggacgtcacataccttgtttcgactggccccttggccgtcgttcctcgtgtcaaccccttcattcgggttctcttgtcggccttacctgctggcctatcctctaaccctcttgccgttgttgccgttggctggcgatatgtaaaacgcccgagcaccatcctaggtactcgggcggaagtcttcaattatcgacgcagacccagacgctcgatgagggaacggtaacggttgatatcaacgcgcttgaggtagtcaagcaggcgacgacggtcaccgatcatcagctgcataccacgacgggagtggtggtcgtgcttgtgctccttgaggtgctcggtcaggtcggcgatacgcttggacagcagagccacctggacctcgggggaaccggtgtcaccttcgtgcgtcgcgtactcgttgataatctgggtcttctcgtcagccgtcagtgccacggcgtcctccttattgtgtcgttgcgcggtgtttcgtgcaggttcgctcgaaacgctctctatccgcgggcgaaattacgccaaatgaaaactatacggcaggggccggactggggcacacgcgctcacacagtggtgagcaatccgccaaacaacaccacgagcagggcgatggtttcaatcacgaagtacagaatgaagctcgcccagcttttggtcagtacgttcagtggtgaggtcttccggataatcaccagcagacccacgaacatcagggcatatacggcgatgccgatcgccgcacccataatgcccagattcgcggcattcgccaggccggcctgcttaccgtagaccacgtacgtggaataccagaaattgagattgagcatactgagtcccgcgatgaactgctcgccggccaacccgatcacgaacacgatcaaccacggccaggacggcgagacgaccaccgccatcgccaatccgacgtacgcaatcaccacggtcacccaaccgaccagtgcgatgccttgcggagacactcccccgagcacggccacaatggagtcagtattatttaccgccaacgaacggccgaaccagtacggcgcgatgatggcgcacagtacggcaagaataatcagcgcccaacgcaacggatgcgaacgacggcgctcgatatccgccagagacaaatcggtctcgggtatggaagcctcggggtgcttggaaacctcgacggtctctactttgccgcctacgatttccgtcgcctcgttaggttcttgctcgttggattcctgctccatgcaccgcctcgccgattacctgctcattgccgattattgcgatgcccatcttagcgtgtgtgttaggcaagtctccgatacgatcgattactcgccatggccctcaccatgatcctcgctacgattctccttatccgaatccgcgggagcaacgtcattattgcccgcagacaagccgctgttggctaattcgtgctactgccctatatcctgattttcggtattttcagggtatagaaaaatccccgtagagcatactatgctctgcttttgatgattatcgaaacatagaacatgctttggctcaatcgtcatatgcccgaagtggcaacaattacaagttatcccgcaccatcgcaacgacatcatgattgattttgttgatgccggggtcggcaagcatctcatcaagagtcatccagcggcagtccttggcaccaacatggaactcagtggaacgccaggcgtcaggcattaccgttacgctagcgcggtatagcgtgtattcgtaataacg

SEQ ID NO: 3931 - DNA, 5029 bp, Unknown
  R22_24m  MAG No. k141_19379
cggagcggcctggttgaagtccggggttgcgggagcgccgtacggtgcgccgtaagcaccctgaggcatcggggcagctactgcgtcatcgtcgaaacgtgcgccttccggcttgctgggcatagccatgaacacgatgtagacgattgaaccagcgagcgtaatcagtccgccaatggccatggcaccgaggccgccggttgccatggctccatagctggagttgctaaggctgccgaaggcgccatacagtgctgcgccaccgccggcaaccatgatgatcatgccgagggccatcgcgccatagaagatggcgacccaccagccgggcttgtccgtgtcatgcagacggcgaacggcgagcgccagactgggaatcaggatggccagactccaaatgctggaaaggaacccgagcttgtcgtccgtggcactgctgaggaggctcagcaggacgctgatgccgacagaggccaacgtccaccaccagaactcgctgcgggaggcacgtcccttgaagaccacatacttcttccagaaacggaggaatgcctcagggaaggggcagtcgtaatacggcttgttcaacggcacggctgctgtggcagtgggagcggcgtactggttgtatgcgggtggcacctgaccgtaagcgttggcgtccggtccgggctggccgtaggtaggagccgcgccgggagcggggaattgcggagccgcattcgccgcgtacgggtcggcggcgggctgaccataggcgggagttgcaccgggcgctgcgccgggtgcggaagaatcgggagcgggctgcccgtatgcgggctggccgtaggccggctgtgcgggggctggagcgttgaattgcccataatctggctgtgcgggggccggagcaggtgcgccgtattgcggcgtgctgggattctgctgggccggggtaccgttgggcgcgggcatctgcggcaacggcacgttgttgggatcggtcattgattcccctttcataagacgattgcgtcgactcctattcttccatcgtttgggtaaaaaactcaacagttgcgccaaatggtgtcgaagccttgcgtgcgggcgtgtggatggcgccaaagtaggtgtcaaaacaggtgtgaagacaggcatcaagatatcgggcactaccaaagacaggcaaaagagatttcgttggaaaatggccgttttgggatggtgttggcccgaaatgtcaataacgaagcaaaagagcgaggagcgctgctctccgcgtccggcgcgcgcggcacaataggggattatgactgatgctgaaaacaccaaacccgaactgcccaagaacgttcgtgttcgcttctgcccgtcgccgaccggaaccccgcatgtcggcatgattcgtaccgctctgttcaactgggcggaagctcgcgccaccggcggcacgctgatcttccgtatcgaagacaccgacgccgtgcgcgactccgaagaaagctacaaccagattctcgaatccctgcgttggctgggtatcgactgggacgagggcatcgatgtgggtggccctcacggcccgtaccgccagtccgagcgtaccgccatctacaaggatgttgccgccaagctgctcgaagccggctacgcctacgagtccttctccactcccgaggaaatcaaggagcgcaaccttgccgccggccgtccggccgagttcggctacgatggctacgaccgcaacctgaccgatgagcagaaggccgccttccgcgccgagggccgcaagcctgcgctacgtatcaagatgcctgatgaagacatcgccttcgacgatctgattcgtggcaccatcgagttcaaggccggctccgtgccggactatgtgatcgtgcgcccgaacggcgacccgctgtacacgctgaccaacccggtcgacgacgcgatgatggaagtcaacgtcgtgctgcgtggcgaggacctcctgagctccaccccgcgccagatcgtgctctaccgttaccttatggaactcggcatcgccaaggagatgccgctgttcggccacatgccgtacgtgatgggccagggcaacaagaagctctccaagcgcgacccggagtccaacctgttcaaccaccgcgacaacggcttcatccgcgagggcctgctcaactacctggccctgctcggctggtccattgcaccggaccgcgacgtgttctccatggacgagatgatcgagaagttcgacgtgcgcgacgtcaaggccaacccggcccgcttcgacatcgacaaggccatctccatcaacgccgagcacatccgtatgctcgagcccgaggacttcctgcgccgctcggtgccgtacctgcaccgcgatggtgtggtttccgccgacaactgggatgccctgaccgaccgtgagcgtgaggtgctgaccgccgccgctccgctggtccagccgcgcgtgcgcctgctgggcgaggtcgccggcatggtcggctccctgctgtccaccgaggagtatctggagcctgcggatgacgccaagaagcagctgaaggattccgccggcgaggtgctggacaaggccatcgccgtactcgaggctgtggatgaagctgactggaagaccgacaacctgcatgagaccctgaacaaggctctggttgaggagggcggctacaagccgcgtctcgccttcggcccggtccgtgtggccatgtccggacgccgtgtctccccgccgctgttcgaatcgatggagatcgtcggcaagccgatcaccgtcgcccgtctcaagggcctgcgggcgcatctgtgatgcgtcgtccaccgcacgccggcggatgatgggagcgtgacgcatggcgggcatccgtacatacggatgcccgctttcgcgttgcatggggtgttcccgcagaacggcggaaaatggcgcgacacgccgggatttgcgtgagagcagggtagcgcgtaatatatctacctgttgcgcggttcgcctcgcagccggttgaaaaactgaatatgcccccatcgtctagcggtctaggactacgccctctcacggcgccaacaccggttcaaatccggttgggggtacgacgaacaactcttcggagttgctacgccaagccaaattggggtgtggtgtaattggcaacacagctgattctggttcagccattcttggttcgagtccaggcaccccagccaataaccctcgcggattagcgagggttttttgtttttacacgtcctgctcctgagatacggccgagagggtaatcctgaatagacaactctggggcaaagactgggctatagtcccaatccgtgactcaaaaacggcagaaatcccgcgtccgaacgtaaggggcgcgggatttctgccgtttcgggccgtgcaggaccggccgacatcgcgcgttgccgcgacttgagcgctgtccgatcctgaaaacgtgagggagaccgccctcgtttacttcttgaccgcgttgacggcgtcaacagccttctgcagcgacgtggtgtgctcgtggtaccacgtgacctgctgttcgagtttcttggtcgcggcctggtagcccttggtgtcgtcggccacgcagccttcgtacgtcggcagttccacggtcagttccttggacagcgcgtcgagagcggaggcgtccgagacgtctgccttggtcagagcggcggcttctgcagcatcgccattgaccaagttgttgtagtcgttggtggcgttacgtacgtcttccgaggcggcggcgcaggcggccactgcactatcgtactgagacgcgctgtatgcgcgggtgccgaacaccgcgaccgcggcgataatcgccaccgccacgatggcaatcactatagcgacccacttcgtcactcgcttgttgtgcggctgtgccgtcgcttctgcttggttctgggattcgggctggttgccgttcgcctgctgtgcgtcagtcatatttacctctccttctcactgcccctgtttgtatcttgcggagggcctgtttcaaacaacgggtatccaacatatcgaggagagccgagattgccgggcgtttcctactggttgcgctgtggcgtggccgtttttgtctcatatggcgaaagtatgcgccagaggctattgccggccggtgacccacggcgcatccgaatggacgtgcggaatcatcatcgcgatgaccgccagcagacacccgagcatcaccatcaagatgatgttctcgtgtccgtgcgcctgcagaagcgcgccggtcagcgcgccagacgccagcgccagcattacgaccgcacgccgcccgagcttcgactgctggtggccgtgtgccgaagcgtctgcgacgacgccggtcagcgtcatcgtgagcacggtggtgggcaggtccggcaccgacagcttgcgggcggtggagttctggatgcccattgccggggcgagcagcacgatcagcaggatgatgtgcaggtcgatgtgccgtgcggtggggaagttcaggctcggctgtgaggcctgggtggtctgtgcaagccgtgcaatcgaggagacgccggacgcatcgtctgcggggccggtgatgagctggttcaaaagatagacgccgattagcgcggcgagtacgaacgacgcctgcacgcaggtagaaaccaacagatgcttgacccggttctcctcgaatcgccggatgatgcgcccgccgataagcgcgccgaccatgaaggagacgagcgtcagcgccgacgtccaccagacgaagccttgggcatgggcgatcgaaaacccaagaaacacgatgttgccggtcacgttggccacgaacacatgccccagcgacaggtagctcagcgcgtccaccagcccggcgacgaacgtcagcaccaccaaggcgggggagagcagaccgtatctgtcttccttgcggggaaccaacgtgcgtcctgcttcggcaagatgtgatgtcatggttgcgacgaggctccttttcgggattgaaattatggcgagaac

SEQ ID NO: 3932 - DNA, 6664 bp, Unknown
  R22_24m  MAG No. k141_19467
gcgttacgcgtgttgattgctgtcgtcagcgtggctgtagtgacggggctaacgtggctgctgctcttctcgtcggcgtttcgtctggaaaccagcgagatcggcgtatccggtgccaacgaatgggtgagcgcgcagaccatccatgccatcgccgataagcaggctggaaagtcgttgttcctggtctccacccatgaggtcacagagcaactcaagtccattcccggcgtcagcgaggccaaggtctccaaacagttccccaagtcgatgagcgtggaagtcaaggcgcaacggcctgcggccatgctgaaaagaggcgataccctgaccgcggtggattcccaggcgcgtgtgttgaactcggtgaagaacgccaacgtggatggcatcccggtgatcgaggtcaaggatatagacgccagtctcaagaaccgttcggtgaaggaggcgctggcgattctgggcgcattgccggaatcgatgcgtaagtccattaccaaggtcaccgctgagacgcaggattcggtgaccaccacgcttaacgacggtgaccgcgtaatcatttggggagactcctcgcaactgaagctgaagctggcggaagtcgaggaaatcgacaagaacatcaccgctggcacggctggctttgccggcaaacatcagattgatgtttccgcatcccagaagcccatcatcaagtgacggcgattccgttggttccgttggttccggggcggcgttcgctccgttggtcctgctgacaacgttggtcccgtcaatgccggggcgatgttcgctgccggcgatttgcgcgagtagcgccatagggtgtatgctgaaaagtccggccgaaaagccggaagcttgataactcaagattgggggcgatcggtttcgacggtgacctgttcgctgcagggaagcgtgccgagaacgccgggtccgctcgtggatgaccccggcaaaagaataagtgctaaatctaaccgcactgagttcgctctcgctgcctgatttttagtcaggattaaccagtgagcagccgctccgttcactcctcctcgtctttgggaggatgctgagcgtcgtttagaagacttgctgatgcagttgagcctcagggctgcatcgggactttaactgcggatatgctcgccatcagttgtctgcgacatcgatgggggcagaaaaaacgccaacttggccagcagactacgcacgtagaagactgtgggctcggtcatcggaccggggttcaattccccgcgcctccaccaatccgtttcggcggaaacaagccgcttggccttgcgggagtagggctgagcggcttttcttattcccgccgattccctcgtattctctcggtttcacgggataatgtgggcaaaatgtgggcaaaaatcgagcccgcgaagccctctgccacaacgcgagaacggccccgaccggcaagtaggccgactcgggttgagtcgtctgcgatgccggacggggccgaactgtgcgtggtggtcatgcggcgaggtcgaggcgctgtttgatggcgctgacgccgatgagcgcgccggcgaggatgccgagcgcgttgagcgtggtcactatcgcgtccacgtgagtccagccccatgcggggccgaccgtactgacgaacagggcgagtgcgggcaggacgatgaggcccaaccatttgaggatgtcgtagacgcggctggggattgcgcggttggcttcgatccgacgacctgcggttttggagaccgccgctctaccagctgagctacgcgcataggcggtcatgccggttgattgccatggcacatgaccattgggtggatatgagtaaagcccctgaaccggttgattcagaggctttcacactaatcctgatacggagtgtgccacggggtggattcaccctactcccgcttgtgttttgtttttcaggcggcttggatggtgaggcgtccgccgagggcgtggattaccttggcgatggtttggaagctggggttgccgtccttgctgaggctcttgtagaggctttcgcgccccacgcccgcgtccttggcgatctgggtcatgccccgggccttggcgacgttgccgagcgcggcctgcatgagtgcggggtcgtcgtattcggctatggcgttgaggtaggcgatgatgtcctgttcgttttcgaggtattcgctggtgtcgtagtcggtgaattcggtgctcattgtcgttgttccttgtagtcgttgaggatgtcgtgggcttgtctgatgtcggtctgctgggtgcttttgtcgccgcctgcgagcagcagcatgagcacgttgccctgcatggcgaagtagacgcggtatccggccccggtgtggaaccgcatctcgctgaccgggcctcccacgggtttgatgtcgccgaatggcctgcctgcgagcttgcagacatcgagccgggcttggatggcggccttcgctttgtggtccctgagtttcttgaaccacttgcggtattcggcggattgcttgatttccatacctctattgtatcctacagactacatcatgtcaagccgaacggccgctggagcccatagccaacgcaagaatctcccgtatgttgaactcccggtagccgtcatcgacgggtctcgagctggggagtttgccccggttgagccagttgctgatccgcttacggctgacctcgtacccgtagtttcccttgagccattggctcatgcctgccggtgtcttggtcaggtgtattgcctcggccttgtcgcggctctgctcgcgcagctcctgcacgttgatgggattgccgcacctgcacaggcgcagcgcctcgcccttcgcggtcatcacttcgcgtctgcattcggggcagacgccgattatcctgcgggtgcgcggcctgcggtcaaccttggcagagcgtccatggtgcctcgacctgctggctgccgcagtattggcatggttcggtggtgatgactgcacacgttgtactgtagggaaccatgaaagtcgtattgcaacgagtgtccgaagcgtccgtggacgtggtcaatgaattgggcacgctggatcccacgttcgagccgcagcagattggcccgggattcatgattctggtgggcgtcaccgatgaggacggcgacaagcagatcgcctggctggcccataagattctgaatctcagggtgttcgaggatgcgcagggcaagatgaaccgttcgatccaggacatcggcggcgagattctctccatctcgcagttcacgctgttcgccgacgtgcacaagggcaatcgcccgagcttcatcaaggccggcaagcccgagcatgccgatttcatgtggatcaagttcgacgaggcgttgcgctccgggggagtgccggtgaaggaaggtcgtttcggtgcgcatatgcgggtcggactggtcaatgacgggccggtgaccatcgtcatcgacaccgagcatgacatgcctgacggaacacgctgaattgcgatagtaatttgacatcatatcccgttccctccaatatgttactaaagcgctttagtcttctgcgggcgagggcgcatgtcgatatgtttcccatgaacgggcagcacaatgatgtggccgcacaagcggcagagataaggggagtgaacagcagatgttcctgaaacctgaacagcaactggagcggtgcaagcgcatagtgcgccagcgcgtggaccctcatatccacccatcgatcgcacagcttgcggtggagtcctttgacattcccggagagccgatgcccactgacgagttcttcgagaagctcaatcgaggtgacatcgacttcaagccgtttacgctcggcggtgaatggggcaccacatggggcacagtctggttccgcctgaccggtaccgtgccggccggctacccgaaaggcaagccgctggagctcatcctcgaccttggctggtacccgcactcctgcggcggccatatcgagggcctcgtctaccgtgccgacggcaccgccatcaaagccgtacatccgctcaactattgggtgccgttcatggatgctgagggcaacgcgcaagtgtcggtcgccgaagacggcagcttcaccctgtacctcgaagccgccagcaacccgctgctgctcggcgtgcctccgttcattgagaccgaactgggcgaccatgccaccggcaagccggacgagccgtacgtattcaagtccgccgatctgaccgaattcgatgtccgtttcgagaactactccgtggatctcgacgtggtgagctccctgatggaattcgccgacaaacagtcgccgcgctactggcaactcgccaaagcattgcagcgttcgctgaacgcctacgacgagcgcaaccccgaatccgtggaagccgcgcgcgcagcactcgccggcgtactggccaagccggccaatgcctcggccatgaacgtcagcgccatcggccacgcgcatatcgactccgcatggctgtggccggtgcgcgagacccgccgcaaggtggcccgcaccgtatccaacgcattggcgctgatggacgccgaccccgacttcaaatacgcgatgagctccgcccagcagtacgcctggctggaagaggatcatccggacatcttcaagcgcatgaagcggcgcattgaagaaggccggttcatcccggtcggcggcatgtgggtggaagccgatggcatgttgcccgccggtgagtcactgatccgccagattgcatatggccgcaaatacttcaaggaacatctcggtgtggagcccaagggcgtatggctgccggacagcttcggctacaccggcgcatggccacagatcgcccgccgtgccgggtacgaatggttcctcacgcagaagatctcgtggaacgataccaccaagttcccgcaccactcgttcatgtgggaaggcatcgacggctcgcgcatcttcacccacttcccgccggcggatacttatgctgcttggtgcaaggtccaggaactcgactacgccgagaagaacttccaggacaaggatctctccgaccgctcgcttctgctcttcggtttcggtgatggcggtggcggccccacgcgcaacatgatggagcacctgcaccgctacgagaacctcgaaggcgtctccaaggtgagcatcgaagagccgaatgacttcttcgacaaggcgcatcagcagcttgcagagaacgccggcccagaaatgcccgtctggaagggcgagctgtatctcgaactgcaccgtggcaccttgacctcgcaacaggacatgaaacgcggctgccgccaagaggaatcgctgttgcgcacggtcgaatacctgggcgcagccgccgtgttgtccgatccggagtgcgtctacccgcgcgaggagctggaccgcatatggaagacgctgctgctgaaccagttccacgacatcctgcccggctcggccatcgcatgggtgcaccgcgaagcccgcgaggactatcgccgcgacctgaagcgtctcgctgaaatcgcccaagacatgtgcgccgtgctgcgcaaggccaacccgcaggccgacttgctcgccgaggcccgcatcagccagttccgcaatgacggcgtgtcttggcgtgccaaccgcatcaacgaactgaccgacgcgctttccgtactgacccagacattggacaacggccgtgtactgctggccaacggcgtactgtccgtcactatcgaggccgacggtacaatctcgtcgctgcttgacgaggagcatggccgtgaactggttccggccggcacccgattgggccaatacgaactgttgagggacgaacccgccgtttgggatgcctgggagatcgaacgcgaatccctgctcatggcgaatgccatgaccggatcaatcgaatcggtcgataccgaaaacggtgcggcacgagtccgtgtgcgtaccgccgacgatgacaccgtcatcaccaccaccatcacgctgcgccccggttcacacacgctcgatttccacgccgacattgactggcacgaacgtgaacgcttcctcaaagtcgatctgccgctgggtatcgtggccgaccaagcgacatacgactgccagtatggtctggtccgccgcccaatcgtcaaaaacaccgcatccgacgaagccaagtatgagagcagcacgaaccgcttcgcccttatcggcgacgccggttacgcggcggccgtcatcaacggatcggtgtacgggtccgatgccgcgccgatctccgggaacgccgccgaaggtcgtgactcgggcaccatgttccgactgtcgctgctctccgcgccgaccttccccgacccgcgcaccgatatcggtgcgcacgagttcgactggtccgtggtggccgacgccacggtgggcagtgcgcttgacgccgcttgcgcactcaacgcaccgacgcttcatgacatgcccgacttggcgccgctcgcctcgatcgagtcagcaaacggcaccgtggtgttggactggataaagctggccgacgatggctccggagacctgattgtgcgcgcctatgaggcggccggcggcagggccgatgccacgctgcacgtctgcccggcgctcgcaggcgcttcggtgcatgagaccaa

SEQ ID NO: 3933 - DNA, 3549 bp, Unknown
  R22_24m  MAG No. k141_19690
agcctacactgagaaaccatgagcaagcaccaccatcgcgaccgtagctgggccccggcacctgaagcattgccggacgacgcccagaccatcgacaaccacactcacgtggcctccgtaatccctttcgcgcgcgctatgagccatgaggcgcaggagaaggggcagcccgaagtcccggtgtacgacgtcgaccaattgctggcgcaggcgcaatctgtcggcattgggggtatcatcgactgcggttgcgagctgccgcacctgatgaccgccgtccagatggccctcgatcatccaggtaacgtgcacgcggcgctcgcaatacaccccaatgagtccgtgctccacgggcatcgcggtgtgccggggccggatggtctgcctctcaaatacaagccttaccatgacacgtctttcgaggacgcgctcgccgaagtacatcgcctcgccaccacataccccgagcaagtggtggctatcggcgagaccggcatggacctcttccgcaccggcgaaggtgccaaggaactgcagcgcgaggctttccgcgcgcatattgccctggccaaggaactgaacctgcccatgcagattcatgaccgcgactcccatcgcgaagtcatcgaaaccctgctggccgacggcgcgcccgaacgcaccgtattccactcgtattccggcgaccgcgagatgggtgagattgcgcgcgagcatggatggtacctgagcttctccggcaccgtgagctacaaaggcaatgacggtatccgcgaatcgctacggattgtgggtctgggccatgcgatggtcgaaaccgacgcgccgtatctgacgcccatgccgtaccgtggccgcaccaacgcgccgtacatgatcccctacaccttgcgggccatggccgatacgctcgacctgtccatcgcggatgtggcgcgcggcacccgcgataccgcccgcgccgtatacggactgtgagggccgggtgtgcggccgtcgcggcgatgtgttgacttgtaaaatttgtcagaattgtgaacgaggtctaccatgatgtacctgacataagcgagggggatgatctccacctcaatggaggactgaacgtatggctgagtcgaaccaaaggaccgcacgcgcccaaaaagcctcaaaggcccagacagcccaggctggcgccgccaaagccaaggcccgacaggaagaagaagcactgctgagggccgacacctttaccaacgctcccaaggtgtcccgccgcactctcaccaaggaggagcgcgaggcactcgccaagcagagggaagccgaaaccaaggaagccgagaaaatcgccagcgcatggtcgaaaggcggcctcggccgatggtgggcccgcttgcaatccagcccagacaaggttacctggggcatggcgatcgtggcgctcggcgtggtgtacggcgacatcggcacctcgcccctctacaccgcgcagaccttccttgccggtcagggagggcttggcagcgtaaaccgagaggccgtgctcggcatgctgtcgctggtcttctggtcgattacgctgatcaccaccgtcaaatatgtgctcatcgccatgcgcatcgacaacaatggcgaaggcggcatcttcgcactgtactcgttgattcgcaagtacggcgcatggctcgcgattcccgccatgctcggcggcgcggcattccttgcggattcggtacttaccccggcggtttccatcagttccgcagtcgaaggcttgcagaccctgccgccattggaagggttgttcgacgaaaacccaagcctgaccctgatgattaccgtcgtgatcatcgtgattctcttctccgtgcagtcgcgcggcaccgaaagcatcggcaaagtattcggctcgatggtgctggtctggttcagcttcctcgccatcgtaggcgtcacgaatctctctaacgactggtctgtgttcgcggccctgaacccggtgtacggcatcaaattcctgttcagcccggacaatgctgccggcatcgccctgatgggcaccgtgttcctctcgaccaccggtgccgaggcgctgtactccgacatgggccacgtggggcgcggcaacatctacttcacctggccattcatcaaggttgcgctggtgctcaactacttcggccaaggcgcgtggatgctggccaatagcgataaccagcaatacaccgcgatgaagtcgctcaacccgttcttccagatgatgaccccgaacgtgcggtacctggccgtgattctgtctgtttcggccggcgtgatcgcctcccaggccctgatcacgggcgcgttcaccatggtttccgaggccacccgcctcaactggatgccccatctgcaggtgcgttacccggcccgtacgcgcggccagctgtacattccggtggtcaacggcgtgttgtgcgtggccacgctcgccgtgctcgccatcttcaaggattccgaacacatctccgccgcgtacggcctggcgttgaccattacgatgatcaccaccaccgtgttgctcggcgtctacttatggcattccggcaagcgggtcggtgccatcgtgttcaccgtgctgttcttggcgattcaggctatgttcttcatcgcgtctatggccaaattcctgcacggtggttggttcaccatgttgctgaccgccgcgattctgttcgtcatgtacacgtggaatgagggcaccaagctcgaacgtgcgcaacgccgtcacatgcggcccaacgacttcctacccgcgctcgacaagctgcacggtgatttccgcatcccgtattttgcggacaacatcgtgtacctgacctccgactcggaaaccaagcgactcgacacggacatcttcttctccatcttcgccgaccaccccaagcgtgcccgtgcttggtgggcagtcagcgtggaaaccaccgacgagccgttcacccgtgaatactcggtggaggacttcggcacgaactacatctaccgcgtgcgcttccgtttgggcttcaaggtttcgcagtccatcccggcgtacatccaccagatcatgcacgacctgtccaaaaccggcgaactgcctaagcagaagtcgatttaccccaaggtcgacgccgatccggacatcggcaccatccgttacgtgctgattcacaaggccctgatgccggaatccaaggtttccgcacgcggtgccctgtcgttgcaagccaagtacgcaatccgccgcatggccggctcgccggttaagtggttcggtctggcaccttacaacccgctggtcgaggtgcagccgctgttcgtctccacccgccgcccaccgcgtctgaagcgcaccgatacggccaagaccatcacgacgcccacgccgactcgtgcagtggccgacccggccgccgtccccgacccgatggacaccacgtccgggcttgggcgattggtacaggagctcgatgccgccgtatcggccgaggagcggaagatcgctgagaccgctgccgccgctgcggtcgctgagcagggcgataa

SEQ ID NO: 3934 - DNA, 9728 bp, Unknown
  R22_24m  MAG No. k141_20254
ccacggcataccgtcctcccgcgcgtcatgcagaccatcgaggctccgaccagcatggccagcccgatcagcccgtattcggcgatgacgctggtatacgcgcacatcgtccacaccgtgtccgcgttcacgccggccgcgaatcccgtggccgcgccgccgttcataccaagaccgtccagcagccgtccggctttggccgtgccggcccacaccgcattgatgatgttgcccgcgccataaccggtgagcagcgtccacggatgggtgagcaatccgcatatcggatcgaggctttggtagatccgcgcgaagaacgagccgtctccctcggccccgttctccgcgatggcggagagtctggaatccgccagcacacccagcaggcccagtgcgcatgcgccgagaatctgcagcatgccccggacgcggcgtgcgccgtcatgccaatcggtgcgcgccacaagggcgatcagcaacgccacgacggaatcgatgacgattctggtgccggcttgcatgagcaccgcgccgacggcatacgtgacgatgaggtcacgcagccgtttggcgtagatgcggtcgcgcccgcgcatgagccacatgagcggaagcagtatgccgaacaggtgcatgccgatatagctgggctcggcgaacaggaactgcggacggccgccgccccacaccgagttgtcgctgatgtattgccggtacatgaggtgcgagaaatagtcggtcaacggtttggcgcgcagacggatggacagccattgcacgacgcccactccgaaggaaacccagtatgatgcgatgagaatccgcaatggcgtacgccacggaatgcgtttgatgtcgaacgcaagggcgatcgcacccaaagtggcgagcacgcccagcaatccggtgatgctcatgaacgcggcgttgaggtggatgccgaacttcagccatcccgggatggacaggattatacagaccaccggtaggaggaacattggcaggtaccggttggctgcgatgcgcagttgccgccaattgcataggcagtacacggcgaacagcgccggactgattggcgaccagaacggcgcgtacaggccaagcgtggtgccgtccaccggaagaaaagcgacggccagcaacagccaaatgacgttgcgttcctgcgatgtcagaaatcgcaggaacgaccggtattgcggtcggccatgatggttgcccgcgtcgatggtgtcgttgcgtacgcatgcctggttcatgtgattctccctccccgtcaaccttactcgttcatcacgatgcgcggacgggggcatgctttccccgccgaacgtgcaatggcccgaacattgacaaggccgcaccgaatgcccccatcattggcacattgtgcgatctcgtcgcggctggctgacgaaataatgttggccgaccggttacattggttcggtacagtgacggcattattggccactggatcaagcgatttgcggcagaacgacgaaagcgacacttgggcgaaaagaggcaggcatgactacgaatcgaccgctcattgcggtgactccgctgatggattacgggcgcgatagtctgtggatgctgcccggatatatggaggcgataatgcgggccggcggtacgcccgtcatgttgccgctgaccgatgacgccgacattcttgcacaatgtgccgaacggtttgacgcgtttctgtttacgggtgggccggatgtgggaccgatggttggtgcagtggcctccgccaccggccgtagcgaggtgctctctcctgagcgcgaccgcatggagtcgattctgctgccggccgcaatggcttgggacaagccgattctgggcatctgccgcggcattcagttcatcaacgcggcactgggcggcacgttgtggcaggatttgccaagccagcatccgagcgatatcgaacaccatatgaatccgccgtacgatgcgttcgggcacagcgtttccttggtgcccggcactcccctggcttcattgttcgcggggcagactgagattgcagtaaacagctaccatcatcaggcggttcgtgatgtggcccccggtctcgaagtcatggccgtcgcgcccgatggcgtgatcgaggccctgtaccggccggcaagccacttcctgtgggccgtgcagtggcatcccgagtttctctacaaggtagatccacgctcgcaggcgatttttgatgcgtttgtggagagttgctaacagcggattttttgcgtgaccacgaaagcataatcgagattgccacctcatgccaacggttccgcaccaggcagcggcgcgtctgtgttatctggaaacatggctgcatcttgctggaaaacatcacctgaagtattctaaggtcattggatgttatttttttatcacataaaatatcatttttttatacagcatgtgataaaattatcaacatgattccatcgaacgttcgatacgtaactcgaccgttggcacaagtcctccgtcagtgtccaaacaaagtagcggtgctggaaggagcacgagcagtcggcaaaaccatgcttgttcagacagaattgccagacggctatcattatgagacgcttgctgacaagaggacattcgagtacgcctcatctcatttggatgagtgggttgattcgctacccacgccgtgcattatcgacgaagctcaacgtattcctgacttgcctctatccgtcaagggagtaatcgacaagcaaactggttctactccttttttcattcttactggttcagcatcaatcacccgagatgggctagacggacaggacccccttacccgccgttccctgcgttataccttatatcccctaacacgcagagaaatcaataaaaatactgataccagcatcattgacttgttgtggaacggtaccccaaatgcgaactatcattcagagaccaatagggacacactagctaggtatatgactgtgggaggtttcccctcgtatgcaatgccctccatacctattgcagagagcgatttacgtttttccgtaaaaacggatatcgataatgttttgggcgataccatacttcccggagagcgattggataaagcaatagctgatgccatactcaaagagttacttgcagtccctggcgggattttgaatgtaaaaagaatatccgacactattcattcgaatccctccaccattgagcgatacatcagtattttcatgcgccgattcctaatctccgccttaccgaacctacgctcagcacctggtaagcaactgtttacccgcgcaaaaatacatccagtagacacgtcattcagcgttgaaacaatacgacaatccggcagagattttcataatgatcgcgttctgtttggcgagctttttgaatcattcgccgtcaatcaaatcattccggaaatacaatggtccgatatacaccccgacgctttctactggcgggaaactggcaataagcccaaagaggttgatctcgtgctgctacacgataatcaacttgtcgctttggaaatgaagtccaacaataccgtggaccgcaaagatttttctggtattgcagcattgcgcgacagcgacaagcgcttccaccgaggctacgtcttatacacaggagacaaggtgcagcagttcactaacaacatatgggctctgccaatttcatcattgtgggacagtgacggattccagacagctacttcggatgctgaacattactcattatcggttccatcagttttacctattcggccgtccgacaccgatgtggcagctcatgccaatgcccctactgatgccaacctgtttttaagctactgccatgcagacaacgaccacctcaagggggcaatacttcaattcgtgaatgatattatcgacgaatacaattacgagaccagcaatacactcgggttattcgtcgacaagacctctataaactggggtgaagattggcgtcaggcacttgatcgaggcattggtaatgcaaatatcattcttccaataattactcccagatatgtgcgcagtgaggcctgtcgtaaagaactgctggatttcaatactcgggtcacggaacatggaccgaatcgtatacttccattgatgttgcaaagcatagatggcatgactggaattagcgatcgtgatcctgtttgggacatcgcgcataatcgacagtatctaccagtgggcgatttgcgtttaatgtctgctgaagatcgtcaaaagagaatccttgaaatcgtgaaagaacttcgcgcagtaatagaggatattactgcccgatcacaatctgatggcacatcagagtcagttgtgagcaagtttaagggagacaacacaccggatttattgagtgcctggaatgagatagaaaaacttacaccacaagttaatgtgggcgcgcaagaatttgccgtatcatttcaaaatatctcaaagacattaagtacccatcccgctcctgcgaacggcaatgcgtctgtctattcctcatgggcgatacaactatcagaacaactacaacctgacattgattcgctcaacaaggcatcggataatctgtcagaactatggaataacgcctatgccgtcatgtctcaatacgtgggcttcattcagagccttccacaaggcgctctacgcaacagccagattgacagcatgggaacaacattcgatggattgcgcacttcgctatccatgcctccggaagtgacacagatgctgccccttattcgtatgcttggtaattttgcgcgtccccttcgcccatttgctgatgccgtcaaccaatcattcaatgtaatcgaaaatatgggcaccatgacggctgcattacaaaatcagcttgatcgcatacctcgataaatcggaattcaattcagtgcgcatcggattaatgcgaatcatctaaaccacctaaaaggggctgctccggttttccggaacagccccttttagcggtagcagtcagcagactgatttagtcatcggtgctggcttgccagcgctgattggcgcgtgcggagaccgccgtccgaaggcgaggggcgtacgaaggtacgtcgaacctgaggaaaggcggtatacgctccgccaatcagtgctggttgttgagacggtggtacatctcggacagctccagttccttctcgaactggcgagcggtggtgttctcgtcgatgacggcgagctcaacaccggcgatgcgggcgaagtcttcccaagcctcacgaccgacggaggtggtcatgcaggtgtggtgagaaccaccggcggtgatccagcactcaacggcggtcttcaggctcggcttcggctcccagacggcgcgggcgcacggaagctccttgagggagccctgcggctcaacgacgtcgacgacgtccatgagcaggcggaagcgttcgcgaacgtcggacatggagaccacgacggcgtccttggtgggcttgccggagaagaccaggcggaccgggtcggccttgccgccgatgcccagcgggtggatctccagcttcggcttggcgatggtgccgatggacggggaaacctcgagcatgtgggagcccatgtcgagctcgtcgccctcggtgaagttgtaggagtagtcctccatgagggaggcgccaccctcaaggccgtagcccatgacggcgccgatgcgcacgaggacggcggtcttccagtcgccttcagcggaaaagccccagccgtactcggacgggaagcgctgtgggccaacgcccggcagctgtggcagagcgccgaggtcctcgaaattgtcgacgccggcggtgcagccgttggcgcgcatcatgttgaccatcgcggcctcttccttggcggcgatgaacagggagtcgtacttggcgtccagcagagccgggtcgacgtcgtacttggccttgtagtcctcgatgatctccttgacctggtcgtccttgacggcgtcgtacgcagcgacgagctcgttgacggcccaagtgttgatggaggcgccgaacacgcgctcggcctcggtcttgtcgccctcggtgacggcgacgttacgcatgttgtcgccccagcgcatgaccttcatgttgttggaggcatcccagccggcgcaggcgcgggcccaggtgccgaccttctcgactacctcaggatcggtgtagtggccgacgacaaccttgcgcttgatgccgaggcgggagacgatgtaaccgaactcacggtcgccgtgggcggcctggttcaggttcatgaagtccatgtcgatggtctcccacgggatttccttgtggtgctgggtggccagctgcagcagcggcttggtcagcacttcgaggcctcgaatccacatcttggccggggagaaggtgtgacaccaggtgatgacgccgatgacgttcgggttggcggaagcctcgaccatgaactccttgacaccgtcggaggacttcagggtgggcttgaggacgatcttggccggaatcttgccggtgttgttcaggtagtcgaccatttcagcggagtgaatggcgacctggcgcagggcttcctcgccgtacaggtcctgcgaaccaacgccgaaccagatttccttgccctcgaaggggttttccataaccatagggttacttcctttacttctttgtttatgggggtttgtttaagtttcattcgccgaccgaggctcccctcagagaggggagccaagacaccaccgtgctggcggagtcagcgctgatttgatgtgtgtgcccgcaaggcgcggaaggcgaaggcgtacgaaggtacgtcgagccttccgcaacgcggcggacactccatcaaatcagtgctggccgtagacgttctggtagcggtcgttgagcttatcgatgtcggcctggtcgatctcgatgatgtcaccgagctgacgggcggcccacatggtgtgagcgacttcctcggtcatggcagcggccttgacggcgccttcagcatccttgccgatggtgaaggggccatggttctgcatgaggacggccggggacttcgggtacttcttgagggtctcgacgacacccttgccgatcgcctccgagccgatcagacggaacgggccgaccggcaccgggccgccgaactcgtcgcccatcatcgtcaggccgcacgggatgttctgaccagtggcagcccaagcggtggcgtaggtggaatgggtgtgcacgacaccgtagacgtcgggcatgttgcggtagatgtaggcgtgggaagcggtgtccgaggacggggcttcggcaccgtcgaccacgttgccgtcaaggtcgcacacgaccatggaggacggggtcaggtactcgtagcgcaggccggagggcttgatgacgaacaggtcggcggtgtgcagacgctgggaaacgttgcccgcggtccacacgaccaggttccacttgatcagctgctggtgcaggttggagacgacctcacgaacctgcttgacctcggcgcgaacctcggggccgtaatcagccaaagttgccattattggttttcctttccactgtgatggatggacgttttttcaaaatctcaaggacctctctcaatagagggaggtcagaaaggcttacttatcttcgaggttgatggtttcgatggcagcgtgctcgatgggcaggcccttggtgaagcgggcgaagaagtcctcgaaaccaaccacatcggaagccaccggcttctcagtggtggactgggcgtccttgaacacgaaaccatcaaggaagtcagcgaggttgctgtgatcctcgttggtgttccacaggtagttggcgagcacggccataccccaggcaccaccttcggcggcggtggacatgaccttgatcggggtgttgaaggcagcggcgagaatcttctgagccaccttcggagtggtgaagatgccgccgtggcccacgagagagtcgacctgcacgcgctcctgcttggtcatcacgtccatgccgatcttgaccggggagaacgcggagaacagctgggcgcgcatgaagttgccgagggtcatgttggcttcggggctgcgggcgaacagcgggcggccttcaggcagaccggccaggaattcgccggaacggaacggatagttcagcaggccgccgcagttggcgtccacgtcgtcggcgatggccgcgcggaacaaggtgccgtacagcataccggcatcaaccgactggccgatggccttggcgaactggccgaacaggccgacccaagcgttgaggtcggaggtgaagttgttggcgtggctcataccggccagatcgccggccggggtggtgaccaagtcaacctcagggtggagggccttgagcttgtgctccagaaccaccatggcgaagatggaggtgccggcggagacgttaccagtgcgtacgcgcacggagttggtggctaccatgccagtaccggcgtcgccctcaggcggggcgagcacgatgccgggattcagggcaccggacggatcgagcagcttggcgccttcctcggtcagctcgccagccggagtgccggccacgagcggctcaggaagcaggttctccagcttccacggctgggctgcgacctcaggcagagcgtcgaacttctcgatgaatgcggtttcgtaagtgtgagtggtcgggtcaatcgggaacatgccggaggcatcgcccacaccgaggaccttctcaccggtgagcttccagtgcacgtaaccggcgagtgtggtgaagtaagccacctcggagacgtgctcttccttgttgagcacggcctggtacaggtgagcgatggaccaacgctcggggatgttgtactggaacagctcggagagcttcttgtgagcttcggaggtgttggtgttctgccaggtgcggaacggcaccagcagttcgccggcctcgtcgaatgcgaggtaaccgtgcatcatggcggagaagccgatgtggccgacgtgcgtgagcttctcgccataggcggtctcgacgttgttggccatggaggcgtaagcggactgcaaaccgccccagatctcctcggtggtgtagctccacagaccatcctccaagtgggaggcccagctgtagtcgccggaggcgatggtctggaagttgtcgtcgatgaggacggccttgatgcgggtggagccgaattcgatgcccagcgtggtcttgccagcgcgaatcttctcggcgatgtgggcggcctgctcggccgcgttgtcggttgctgccatatctttcctttgccttggagcgccggcgttgttatccccttccttggggaggatgttagcgctcacaatttcaaaaaaacattgtaccgataacctgcattcgacacaacttataccgtgtcacgcatcataacggtttgataacagcgccaatttaccgccggggagccggccccaaggaccgccgagcacgcacctcggcgggaatcagccccacgccgtgctgggtggtcaggaaggtcggctcgccgccctcccccagcaaacgcagcgtctcgcgcatggcggccacgccaagcccctcgaaatcgggatgcacggtggtcagcggtgggtacatgttatccacgccagacatgtcgtcgaatccgaccacgctgatgtcttgcggaatccgaagcccatgctcatgcaacgcgcgcatgatgccgacggcc

SEQ ID NO: 3935 - DNA, 3351 bp, Unknown
  R22_24m  MAG No. k141_20577
ccctcgtcagagggggcaaagctactcgaagcgggacttcgggacgaatcaagtatcgtcagccctcaatcgcgatttggtgcttggactcgacttgcggctgggcctgcatcttcggaacctggatgcacagcgtgccgttccggtagctggcgtggatgtcggactccttcacgtcctcgccaacgtagaaactacgcgagcaggagcccatgtagcgttcgcgacgcagccacttgcccgaatcggacgcgcaagcgcacttgctgtcggaagcctcgccctcagcggccggagccttgtcctcatgctcgctgcaacgcgaggcggacacggtcagatagccgttgttgagctcaaggttgatatcttccttcttaaagccaggcatatcgatgtcgacgtcgtaacccttgtcggtctcgcgcacatcggtggtcatcatgttggcaggcattgcggcactcatcgtgttgtccgtgttgcgccaaccctcaaagaacggatcatcgaacagatccgagaacatcgtgtcattcatcaaagccggaaacattgccataatcggtactccttgattaggagagaatcggcttggatgccggccgccaacccgtatcgcggggctagcagcggttatcgtggccggttccggaaccctcccgggctctcaacctttaaccttcacttcacccaattcccgagcgcggcaatcattccgggattatgcccacagagaaattgcggcggggaatggttgccggtaagccggccgagccgagcgccgtgaccaccctcagccagtcttacggctgccagctcccgccagcgggagcatatatacgcacaccagtaggcgtactcatatacctctgccaacgggagcatgctggcgcacgaacggctcacatctgctgggcgttttcgagcaaggcgtttttgaggtcggactcgatttggcgcatcttgacctgggcggcctcgcggttggccttgccttccttctggatctgcacggtctccttcagggtggcgatgagttcggcgttgatcttctccagcgtgtcgatttccaccacggaacgctggttggccttttccgcgtccaccgcacccttgtgcagggcggccgcgttacgcgccagcagcttgttggtcacatcgtcggccttgttctgcaggtcgagggccttgcgctggttggacaggcccagcgcgatcaccatctggctcttccacaccggaatcgtggtggagatggtggtgtcgatcttgtccacgatggtctggtccgcgttctggatgattttgatctgcggcgcggtctgcaaggtgaccacgctgatgcggtcgaggtcgtcgagtcgcttggcaaaacggtcgagcttggacttgaagtccttcagcacttgcgcctgcatggcgtcgccactggcggcggcctcggcctccagcgctggcagctggttggcgttgaagtcggcgagcgccttcttgccggccagtacggtcattttcagctcacggtattgctgggcgttctgcgtgtacatcgtgtcgtacatggagatgtcggccacgagtttggcttgcgcggattcgagacgcacgatgatttcgtcgatttgcgcgtcgactttctgatagcggcggcgcagcttatccacgctgacggccacctggccgatgatcggaatggtgcggaagccgccgaggtcagcctcgtcaatggtgaccagcatggtgttcagtagttcgcccgcctcgccggtgtctttggagcgggtgtcggagaggatttcgtcggcgaaggtggaggtggcgcgctgggcgtccttgccgtagctggattcgatgccgtcgcgagtgaagtcgatctggccggccatctggttgaccgtggcctggtcggcttcgggcaatttggcgatctgctggtccggggtcagggccgcggcggcttgggcttcggcggcggcggggacgagggtggtgttgggggcggcttggttggtgttgagtaacgggttggtgatgggggttgcggagcttttggtgaggtctgcgagggtgatgttttggggcattctggttccttttttgatagttatgtttgggtctcccccccccacccggctttgccgggagcccgaacgcaattaaggacggcttacagccgatttcttatttgctcgctctcgctcgccttcgtctacaaacagcccactgggctgtttgctatacgactcagctcgtcagagggggttaataaaaacaccgattgggggctggcaaaagagttattgcgtggattggagggtggcgatgagttgttgcatggcgtcgttgttgggcagttcggatacggcggggatctggtcgagcgtgccgggcacgccgaatcggctgatcgaatcggtgccggcgaagttggccgcgcggaagccgtggcgctcccacgccagcttctgcaccgccggtgttttcaacaggttcagcagtgtgccgcctttctcgtccaaggccatcagcgtgtgggtgctccacacggtcggcgtcgggtagacgatgaccacgtcgtccttgatctgcttgaacgcatccggttggttcacggccaaatcaagcagctgcgattcgtagcccaccatcatcggcttggagcccacgcccaaggtcaggaactggttgaacgaatcctcggaagaggtctccatccaaccggatttggcgaagatggaggcgatggtcttgccgtcgcgcgccaccgaatcgaccgtggccggctgcccgccattgagcaccgtggcgagcagcgccgcgtattcgttgcctgagttcgacttcaccggatcggtcgagtcgatgcggaactgcccgtagcctgccgtgtatccgacgtcggcccaggttgtgttggcgaccatcgcgtccacggctttggccatatccatgtggtacgcgcccgaattgtccttggtcacaagtccgccgttcacgagcccgtccgccacggccttgtgcgtgtatagcacaatcggtgagttgaagacgatgtcgctttgggtggccttgacgcctttcgcattgccgtattcgacggccgcgcgcgaggaggggaacaggtaatccatgcctttccggtccgcatccatcatggccagcgatccggccttgcgatagtcgatggcgatgccttgcttggcggcaagcgccttgaacttggcgtcatcgaacaggccgattttctcgccgcccaggtagccggtgatgctcacctgttcggtcggttcggccggcgctggttgcgattgccgccacaccagcgtgccgcagaccacgcccactacc

SEQ ID NO: 3936 - DNA, 30671 bp, Unknown
  R22_24m  MAG No. k141_20852
atccgtggcgacgagcgtgtgcagatcgttggcgtactggaaatgcaggtggctgggcagcccgccctcggcgaacgccttgcgcgaaggcagagggttgatggccagcagccagcggaacgggctgtcttcggcggccgggcttgaagccagggccgcaatccggtgccgatacggttccaagtcaaacgcccgcaatcccatggcggtcacgcagccgggggagagggacaggaattcatcggcctcgtaatcctgcacgatatgtccgccgtcgaataccacgtaccggtcggccacgccgttgagccatgcgagtcggtgatgaaacagggcagcatcatcgtgacgcccacggccagcgcggagaccacatgcagccacggcagtcccagggcatcggggtcgagcattcccagcgcggtgagtacggcataggtcacgccgaagttcaacgcggttcgccatcgggcggccgccagcaggagcaacaggaacagcacgaccatgacgatttgcgtggcgagccctacatggaagaacagcatgaggttcgccaccagcagaaggaagagtctcgcgcgcggatcgagcgtccggcgggcaggaagatggagccgaagccgctggtgaacagggtgctcaccagtgtggcgatgcacaccatcacgaagtacagggccgcaaacacgccgatggtgatgaggtcggagacctccagtttgccggatttggcgggcttgttgagctggtcagaggtttcggcgggcgtgttcggtgcggtcacgatgttttccgtttcgtatgcattgacaatattcctctcgccaatctaacgatgattttccgcaaggcaatagtctgtctgtgatttttgcgtgcgaaacaatagagctcccctctttgaaggggagcctgagtgttccatcaaaaccgaatgctcacccggaactcgccttcggccggttggccgagttccagcctggctcccatcgcctcgcatgccgcactggcgatggacaggccgagccccacgccgggcacggcgctgatacgcgagttctcgccgcgatggaacggttgggtcagctcgttcagatcgtccggcagcatctcatccgtggtgttcgtgacggtcagacggggtccgcttccatcctcatccgatacgacggttacgtcgatcgacccatcatccgtgttgtgcacgacggcattgcgcagcaggttgccgaccgccagttccagcaacgccgggtcggcggcgatgagaaacatgtccgcgtcgccgccggccttgttcacggttatggtgatgcgacgcttggtggcggcatcgtcgatatccgcaagggagttgccgacgcatccgtacaaatctgtggatgtgcgtgccgttgatgcgggactcatctgtgtcacatcgcccgcctgcttgccgccgatggtcccgctttgaatacgggacaaggtcagcagcgcctgcaccagttgcgcgccgcgccgattggcatccagtgcgcgctgtaccgacggtcgcacatcctcggggaaccgcccctgggccaacggcgcgtccagattggtctccaccgcggcaatcggcgtgcgcagctcgtgcgaggcattggacacgaaccgccgctccgcttcggatgcggcctgaatccggtcgagcatgccgttgatggcgtcaccgagctgcgtgacttcggaggattggccggcagctcgaccgtccgtgcggctgtccgtgctatgatcccaatcctcggtcccgcgtctgcccgcacgccggaactggggcctacggcgagatggcggcccattcacgtcgatgcgcgtatcaagtttggccgggtccaatgccgccgcctgcgcgctgatggaggtcagttgccgggacatgcgcgaggtgaccagccagatgatcagaatgctggtgatcccgaagaacacgaagatgatggccgcgctgatgcgcaatccggtggcgatgttgtcctggttccacacggagacgccatacggggtgttgatggtatacgatccgtccttgccccattccacctgatagtcaccgtcgcccatatcgccgccgacgctggatgttccagtgatatcgttcagacctgtgccgcttccccgggaaaacattcgcgggtcggaatccgggcgtttgccggtgccggaaccgctgtgctggctttcgacctgcatctcagggtttttggcggtgaccgtcgtggcgtacgtgaacatgctgttgaccacaatggtctgcacgagggtcgccgatcccatggcgatgaggaacacgagactgatggacaacgtcagtttggcgcggaatgatttgggccgcagtttgccggcaagcgcctgtatacgacctgatgctttcgccgtgttcgtcgccttcattgcagccggtatccttccccgcgtgtcgagacgatggcctcgcgatcggcgagtttgcgccgtagcgaatagatggtggttttgatcacgtcggtcgggtcggcggcggtcggctcatcccaaaccgcatcgtagagttcgtgcgcggtcacgtatccgccttccgcacgcatgagctccagcaatatgccgtactccttgggtgtgagtttgacgagcgtgcgcccgtggtcgcggaacacgagccggcgtgtggaatcgagggtgatgtcgccgcgcgtgagcacggctgcggtcgcgttgctggtcccgctgcgccgttgcagggcgcggatacgggccagcagttcgggataggcgaacggtttggtcaggtaatcgtcggcccctaggtccagcccgctcacgcggtcgctgacctcggcggcggccgtcagcatgattacggccacgggaatgcggttcgcggcgacggtggccatcaccgcgtcaccggacaataccggcagatcacggtcgagcagcatgatgtccacgttcgtgccggcaaggatcttcaacgcttcgacgccggtggttgccagactggtcgcgtacccctcgtagcgcagcgcgtcgtccaacgcggcggccagttcgcggtcgtcctcgacgatcagaatccgcatcatgtccccttccgagccttcccgaaccaatggcatcacccaacattttcccgattctacggtaaggcgaaagtaatccgtccgcttaccgacgctccacggtgagggcgattggatggaagtcgtcacaatcgactcacggaatggagacggtaatgtccactactcatacgcgcctggtacggcgaatcgcaatgcttacgtccgcactctcgctggcttcgatgctgggcgcctgctcgtcaccgctggcggcagtcggaacaggctcaggtgccgacgatcggtccgatgcgacgaccaccaccgacgccacggcgaagcgattcgccgcctgcctgaccggcaaaggattcgacgcgcgtacggctgctggcgtgtcgtccggctccggctcgggcaaacaagccccgaccaaaaacgcggtcgcactgcgcatgatcggcaccgacggcaagccggtcacctcccaaggcaacagcctcagcgcatccgacgacggcccgcaactctacccgaacgctgcctacacgtcgatggaagacgacagcacctgggtggtgttcaaggacgccaaggcgctcgccggctcaccctacgaatccaaacagcgggaatacgccgactgcgaggccaagaaccccgacttcacccagcccattccggacatggggccgcaacaccagtattccggggaagacaagcaggcggcgctcgcctacgcccaggccgcgcgtaagaagggcttcgactgggtcaaggacccggacgccgatacgcccacctcaatcacgattcccggcaccgtaagcgaatccgaactgcgccgattcctcaaggaatgcccgaccgatggcgcgaacatctcctatgccttcgctggcaccaccgaggaattcggctatgactacaacaaagtcctctccgaattcacctccggcagcgcgtccaccgaagccgcgccccagcaatgagacggccatccgataacggacaaaggagcaatcatgacacggacggaagcgcgcagattcgggaaataccgcagaatcgtgacgatgattatcgcggcgatcgccgtgatcggactggccgcggtgtgcgtggcggtgaggccgtggacgttggccgggcacgtcaccgcgaccgggcagactggccgatcgcagcaggtggatgtgtccacgctgcgcacgcaggaggtgaccaagggcgtgctcaacgccgagacccggctcggcgcgagtctgcaatacgatgacgcctccgatttcgcggccgcttccggcacaatcacccaactgccggtggccggcaaacagatcaacaccggcgaacaggtgtacgagatggacggcgcgcccgtgccgctgttccacggcgaccgcccgttctggcggacgatcggcgatggcgtctccgacggcccggacgtcacgcaactggagcagaacctgcaggaactcggattctacggcggcgaggtcggaccgcatttcaactggctgacccgcgaggcgatccggcaatggcagcgctcgctcggcctgaccggcgacgcggtcaccggcacattcgacccgaatacggtggccctggccgcggccgcaccaatccgcatcacggcggtgaacgcgaaactcggccaatcacaggtcagcccggcaagctatacgggcgtcaccctgcatgcgcaggccacgttgaccgccacgcaggcggcgatgttcaaagccggagacaaggcgcaggtcgtgctgccggacaacaccgccgtcgaaacgacgctcgcctcggtcgatcagggcgggcagaagaccggcgacaacgggcaagccacacagccatcggcgcgcatcgacttcccggaccagtcgcaggtggcggctttcgggccgacggccgtgcaagtcatcatcccgaacgccgatgcctcgaccggggaggcgctgatcgtgccggtgaccgcactgatcgccagcgccggcagcgcgtatgcggtcgaagcggtacgcggcggcaagttggtgcgtgtgccggtgtcaatcgggctggtgtccgacgcgcaagtgcaaatcaccaagtccgacggcctcaaggcgggagacaaggtggtggtctcatgaacgacatcgagtttgcccccgctggcccagagcatggggcattgctgacgttggagcatgtgacgaaggcgtttccaggcaaggacgggagcgtgctggagatattgcatgatacgtcactggccatcgatcgcagcgagctcgtggccatcgtcgggccgtccggctcgggcaaaagcacgctgctgtcgttactgggcacgctggacatgccgacctcgggaatattgcgatacgacggcggggatgtgaatgcgatgggtgagcggcagcgcagcgtcctgcgggccgcgcgcatcggcttcgtgttccagcagttccatctgatcgccaccgtatccgccttggagaacgtgatgacaggcctgcaatacacaaccctgccgcgcggcgaacgtcggcaacgggccgccgaggcgttggaacaggtcggattggggaaccgcctgcatcaccggccggcccagttgtcgggcggcgaacagcagcgtgtggccatcgcccgcgccctggccaaacggccggacatcatcttcgccgacgagccgaccggcgcgctggactgcgaaaccggccacaccatcgtcgacctgctgctcacggcggccgattccggcgcaagcctggtcatggtcacccacgaccagaccatcgccgcacgtttccccaggcgtctgcacatccaagacggcctagtcgccgaactcgacaagccgaatcaagccccctctgacgaggggctgtcagccaaaggctgactgggggagagatatgagtgaacgtactcctatgagtaaaccaatacgcacgcgaattgcggatttgatgcatgcggcttgggttggggccgccgggcgggcgtcccgcacggtgctggcatcgctgggcatcgcgcttggcgtggccgcatatgtggcgttgtccggcatcgccgcatcgaaccaggcagcgctcctcgcccaactcgacgcgcttggcgcgaatctgtcggtggtcgcccccggcgtggacgccgcccagcagaaggttccgctgccggattacgcgcccacaaccatcgcccgtcagccgcaggtcgaacgggtcggtgtcttcgacaccgcgccagagaaggtgcagatcttcaagaacgggctgtgccccaaaaccaacggcaacgcgctggccctcgccatcatgcggcccggcgcactcgacgccgtcggagcaagcctcgcccaaggtcatggcatcgacgcgaacaacgagcacctgcccgtcgccgtgctcggctcggacgccgcctaccggctcggcgtcaacgagcccggcgaccgcatcctcatcgacaacgcatggtacggcgtcatcggcatcctgaaccccacgccgcaggctgaaaacctgaacgccgccgtcatcatcggcgagcaatgggcgctcggccggtaccccgaccagaccgacaccatcggacggatcagcgccatctacgtgcgcaccacgcccggcgacgccgaaggcacccgccgcacgctcgcccacgccgccaacccggccggcggcaacgtgtccgtcaccgcgtccgccgacctatccaaagcgcgcaacaccaccaacgattcactgaccacgctcggcctgatgatcggcgtgatcgcgctggccgtgggcggcatgagcatcgccaacatgatgattgtcaccgtgatggaacgtcgcggcgaaatcggcctgagacgcgcgctcggcgccacgcccggcaacatccgcatgcaattcgtcaccgaagcggccctcctgtccacactcggcggattcgccggcatcgcgctcggcgccggcgctgccatcggcgtcgccgccagtgccggccagccgatcgccctcgactggacctccctgccgctcgcctgggccgccgccatcctggtcggcatcctcgccggcctctacccggcctcccgcgccgcccgtctcaccccgaccgaggccctgcgcggcgaataggggcgacggctggagtgaacgatcaccatgagtgcgcagcctcaatgtcacttttactgcacatgatgacatgtgcagtaaaagtgacatattggtgctgggcgggagagagcacgcgtggcgcgggcggggtgtggttcgcggctatcggctagtatggtgcggtcacgacagagggaggcatgctgtggccgatgtgatgcgggagctggaacggctgcgaccggtgtatgagacgggcgtcctgcggttgctgttgcgccagaacgcgatgctgtacgtgtcgctgctgcgttccacgttcgacccgctcaccggcgagctgccgcgcgagaccgtggaggagcggttcgcgcaaagtctgaacgctctggccgacgccggcgaatatgcgccgcgcgaggaccagaccttcgccgaggccgcccatcagatcctcgccgacctgacccgtgaaggcgaaggcgactacgcctggctcgccaactcgcatgatgcggccacacaccgattcctctaccgtttgacggcccgcgcccaccgcgccatcgaggcgctgagcaggctcgaagacgaatcacgcgccctgtccggcgcgcaggccaacagcatcatcatggaaatcgaacacgcgcgcatgcagctgaccgccgaccccggcgagcgcatcaaactcctcaaccgtgaaatcaaggaacgcaagcacgagatcaaacgcatccaacagggcaagcagcacgccacgctgagcgaagcccaagtggaggacgtgatcgccgtgatccacaacacgctgcgcggcgtacccatcgacctgcgcgaactcgtgctcgacgagcgggacaacggcgacgccttgcgccggcgcatgcagaccggcgacatcagcgtggacgagaacctgacccgctaccacgacgaataccgccgctcgttcagcgaatcggacagcggccgccgcttcgaggacgccttccaggtgatcatcaccgacgagggccgccagcaaatcgacgaagccctgcgcgccatcgccaaaaccccgtatctggccggcgaatccggcgtgctgctcggccagatccgcgacgaactggcccgcatctacgacggcatcgaagccgtgcgccgccagatgcgcgtctccgacgaggcgatcagccggctcgtgcgccagcaaaccgacactcgctaccgtacgatgctcacccgcttgaaccgactgtacgcgcgcctcaacgcggatgcgaaaacccatatgggagacgcctcgcgcccgtacgacacggccaccgcggacgcgctgttcgcgccattgccgatgcgcccggccaaatccatgacccgcgccaccgcacccggcctgagcgacctcgccgccgaagccccgcaggcgactccggtggccgatctgcgggatatggtcaacagcggcggcccccgactcctgcgcatggtcagcctcatccggcgcaacccggtgaccgttgacaggtccgatgacaggtccaacgcaaccctcgtggacatcgccgccagcttcaaccggctgcccgaaagcgaacgccgcgaaagcgagatcgtcggcttcctgggcgggctgggagccgtaagcggcagcgccatcgccgacgagccgtccactgacggcatcggcatcgacagcgacatcgccaccgagccggccccggcgcagcgcggcgataccgcgacttggcattgcgtatcgatcgacggcgagccccggcactggatcactagaccggtgctggccgacatggacgagctgaacatcattgtggaggaaggatgaccgtggccgaggaacacgaggagcacatggacaacgccaacccgtacgccctgttcgaaggcgacaccggcgacatgccggccgaggcacgcatggccgccatcgccctcaaacgcgaccgctatatcagcgggcccacctacgacaccgtgctcgacaaccgcgacgccgtcgtacgctccctgaacaacgacctgctcgacttggtgatcaacgaacgctaccgcatcatgtacgccacgcccgtggccggcgacgacgtgaccctgcgctcgctcaaaacccgtgtcagcctcaaacgcgaggaggccgcgctgctcgccttcctgcgcatccgcgtcctcgaatacgagaacgtgcacgccgaccccgccgactggctcgtcagctttgaggagatccgcgccgcgctcgccaccggcgccggttacctggcagcccgcaatgacgaggaaggcgtggcaaagcagatcggcgccatcgtctccgcgatgatcacctacgggtatttggcgcgcctggacgacgaagccatgtaccagatcacgccgctcgtgcccgtggtgctcgaccgcgaactggccgacacctggctcgacgtcgcggaacacggcgacggcgacacggaagatgacgatgacgacgagaagggagccgaatgatgcaggcgacagatgtgcagatgatcgcggaccggtggatgctggaatcccgccgactcatcaactggggctcctatgagggctaccacgaattccgcccctccacggaccacaagctgccggtgaccctgctcgccggcgccagcgaatccggcaaatccacgctggtcgacgcgcagatctccctgctgtacccgaccggcacgccgttcaacaaggcctcgaactccggccgctccgaacgcagcgactacacctacctgcgcggcatggtcggcgtgggcagcaccgaaaccggcgacgagccgctctacctgcgcggtcgcgacgagaacggcgcgccgcaacccgtgtggggcgccatcgtggacacctatcgcaaccagaccaccggccaggtgctttcctgcgccaaattcctctacctgatgcccggcgacggccgcggcgacgtgcgccgccagtacgtggtctggggcaagcccgtggaccccaggcgcatggaccaataccgtgacgccccgttcacgccagcccagctcaaagccacctaccccgactgcctcacattccccagcgccgaagcgttccacacacacatctggagcgcaatgggcctgagcgaggccgcctgccgactgctgcacaagatccagtccgccgacgcgccctcccggctcgacgacatcttcaaacaaggcgtgctcggcgtgcccgaagccctggacctggcccgcaccacggtcgaggactacgaacgttacgacgagaacttccacgccatggacgagaagacccgccgcatggacacgctgcgcggcatccaacaggcctacggcgaatacgccgccgcacgcggcaaggcccgcgccttcgaaccggtcaagccggccgtcgacggcacggtgccggccgtgctgcgcgactgggcattggcccgcatgcgcggcgaagtcgccgtccaactgcccgccgaccgcgccgaacaacagaacagcgaggcggaagccaagctgctgcgccgccgaaccgaagacctgcgcacccgcctcgacatgatccgaggccagatgcagggtctggacggcggcaacctgacccgactcgaactcgaactcgaccaggcccgccgcaccctcgaagacatgcaagccaaccgaacacgaatcgaacaaacgttcgcatccatcggcgagacgctgcccagcaacgaacagtcctggaacgaacgccgcatcaacgccgtgaacttcaaacgcgaatacaacaaacgagacggcgaatgcgaggaagccctcaccgccgccatcaacgcacgggccggcgcacgcggcgacctcgaacgactgcaacgcgacttcgaccggcaacgctcccagcgcacccgcatctcccagcagatggacgaaacccgcgccatgctctgccgcgccaccggactcgcccccgccgaactgccgtacgtggccgaactcatggacgtgaacgaacacgaggaagactggcgtctcgccatgaacgtcgcctacgcgcccatcgcccagaccatcctcgtcgacaagcgccacgaacagggcttcgccgcaaaagtcagcaccatcgacccgcgcaccatgccccgacgcacctggcagttcgtggacaccgcacgccactacgacgacaccggcgcgcacgcgaacatactcaccggagaacaggacggcgactggctgtccggcaaactgcgctaccgcgacgactcgcccttcgccgactggctgcgctcgcagacccaggacgaacgattcgacgccctatgcgtcaccgccatcgacgacaccgaccgcaccaaccgtcaggtgcaggccgacggtcagatcaaatccggcgcacgcggccagcacggcaccaaagaccgcgcccaggtcatcggattcgtcaacgaaacctacctcaacgcgctcgcagcgcaggtcgacgccgcccgcaacgcgctcagccaagccgacaccgactacacggccgccaaaacacagtccgataacctccaccgcgaactcgaactggccaaccagctcgcctacacgtcctgggaacgcatcgacatcgccggcgcgcaacggaccatcacggacacgcaggacgccatcgcatccatcaaaaacgatcccaaactcgccgaactcgccaaacagcgcgacgaactgaacgccgaactcgaccgtgtggaacgccagcgcatcgaatccgaccaggccgcggcccgcgccggcagcgccgtcgaagcggcgctcatctggctgcgcgaccatgccgacaccggcacgacggacgccgccggtgccaccgccgacaatgacgatgacgccgcttccggcccgctgccggacgaagtcacggcggcgctcgccgaatcctacgacaaccgattcgccggattggcggacgcggccatgcgcgcgcacatgatcatcggcgcgggcgcggcaggaacgcaggcgccgggggagagcttccccgaacgcaccatcgccggcatcggcaaggacatggcctcccgcatcaatctgctgaacggccaggccgacgccgcgcgcaccggcgtcgaatcgaaaatgagcacctacatcgcgctctacgcggccgacgatgattcgctgaccgccagcgtggaggactaccggtactatctcgacgaactcgccagcctcacccagctggccgcggttgccgccaccgacgccgaataccggcgctgcctcgaacagctgctcaggagcttcctgaccatcaaacgcgccatcgacacggatgccagcgacatccacgaccagcttgaccgcatcaacgccatgctcaagggccaacagttcggccccaagcacggcagcctgtccctgcacgcggacgtgcgccgtcccgagcgcaccttctgggcgcagctcatccgcgtcatcggcaccctgaacgattggaaatccgccgacgtcaacgattccgacgcctcgcgcaaggctttcgcggcctgcgcgccgatggtcgggctgctgcgcgccgaactcgcgcaggtcaaggacacgaacggcgtgaaaagctacggcgcccgcaacctcgacccgcgctgccgctcgtccttctacgccatcgtgcatcatgccgacggtccggacgaacgcatcacctccaccggcggccgttcgggcggcgccttgcaggagctcacctcgttcgtatacggcgcggcgctcatctacctgctcggcggcggcctgaccagcgagccctcgtacaccacgctgttcctcgacgaggcgctcatcaaggccgacggccgttacacgcagcgcgccctcacggtgctgccgcgcctcggattccaggtcatcgtctccgccccggaaagcaagaccggtgaaatcctcgaggtctccaccaaggcctacgtgacctacaaggaccccgacaccggcctcacctccctgcgcgaggccgtgctgcatcagaatgacatggacgatgaatcatcgtcggatatattgaaggatgacggggttgccgaatgagcaatcccggcgtcgccggtattaagacgattcggttcgactcgacgatgttcgaaagcaggtgatgggaactatggccggcatgaaagacatcgctgcgatcaccacatgcgtgaagaaacatatgcgttcacatatgtacgacatcgaaccggcatggccatttcccgtgccggtgggattgccggaccaagcatttttggaaaccaatgcgattgcagtgcatgacaacaacaatgagatacggcaatgggcaagcaagaatggttgcgaaatcataaccaagcatcgcaccataggcacctctgtcgagttgatctccaaagtcgtcgttcctgacgaatcaatagccatgcgtgtggttggtcgtacgctggcggcggaatatcgcgaagcgcaccgtcgcacagattccactgacaggattcagcggcaaatggctgaatgagtcaaaaaccaatcgtcgtaaggccatttgccgactgctcggtgtcgaaacgttgggtctgtcaaaacggccgaccgaactgcggttccgttatctcgatccgggccacgacgattttggtaccgatcgtactgaacgcagcgcgaagattgctatgcgggagcctaagccgacgcccggccttcaatcggcggagcgacgtctttatgaacgactgtgtgctgacaaaaccatcgcttatcggcgtatcgaacaggaacgcattcccatgcgtgatgcagttgacgaattacgcaagcttggcatccccgtggagtccattgaagattttgtcccggttcgaacatcaatcgtttgacggacgtaccggggcagaatccgttgtcccggtttgtgatttcgggtgtttttcgcgaaccgggacatgttgtgttgccccggtatgggcgtcaatcgtttgatgcgagaatcgggacaacatggcgattctgagattggctttattccgccgtttccgttcgcgttttatgtggttcgtggaaactggaatgtcctggttctcgaaaacaggccaaaatcacgaaccgggacagcgggttttgccccgatgcggacgtcaaacgattgacatgtgaaccggggcaaatcagaggaggagaggtcttcgggatagagcttgggcgcacggttgatgtcgcgtgggccggctcttgcgtttcggtccactgatggtccggaattttgcatactatggttcggttttccggcctgacacgccatcgaacaagcgttcgaatttggtcgtgtgttcgggtatccttgggacagatttggcgcgcgcataaccgtgcgcgcgggaacggtgagatggaaggtgggtgtggctgtggcggcaacgcggactggcgcaaggcgcgcaacaagcgcaaagggcgcgaaaaccagcaagggcaagaacggtgaggtcatcgtcgaaaaggtgatgaccagcgactccttcctgagccgggaaatcaaaaaggcgccgctgatcgaacacgatggttcgctggtagctgatatctcgcacatcccgaacgatctcaagatcacgattcagggtgcgcgcgaacacaacctcaagaatgtcgacctggcgattccacgcaaccgtatggtcgtgttcaccggcctgtccggttccggcaaatcctcgctcgcgtttgacaccctgttcgccgaaggccagcgacgctacgtcgaatccctgtccgcctacgcccgccagttcctgggtcagatggacaagcccgatgttgacttcatcgagggcctgagcccggccgtctccatcgatcagaagaccaccaaccgcaacccgcgttcgaccgtcggcaccatcaccgaaatctacgattacctgcgactcctcttcgcccgcaccggcatcccgcactgccccgaatgcggcgagcccgtcgcctcccagaccccgcagcagatcgtcgacacgctgctcggctacccggagcgcactcgattccagattctctcgcccgtggtcaagggccgcaagggcgagttcgtggacatgatcgagctgctgcgctccgacggctacgcccgcgcgctcatcgacggcgaggtgacacagctgtccgacgacatcaaactcaccaagcagaagaagcacaccatcgaggtcgtggtcgaccgactcgtggtcaaggacggtatccgccaacgtttgactgattcggtggaaaccgccctcaagctcgccaacggcagcatcgtcatcgacttcgtggacgaggaggaaggcagcccggcccgccgccagccgttctccgaacaccgcagctgcccgaacgggcacacgctcgaactcgatgaggtcgagccgcgcaccttctccttcaacgccccctacggtgcctgccccgcctgcaccggtctcggcttcaaactggaaatcgacccggacctcatcatctccgacccggacaagtcactggccgacggcgtcatcgaaccgtggagcggcaccaagatgacctcccagtactacggccacatcctcgaaggcttggccaaggaaatgggcttctccatgaagaccccttggaaggacctgccggacgacgtcaagcacgacatcctctacggccacgacttcaaggtcaacgtctcctaccgcaatcgctggggacgcctgcgtgaatactccaccggtttcgaaggcgtgatccgcacgctcatgcgacgccacgacgaaaccgattcgcagtccatgcgcgaatactacgagtcgtacatgcgcgaagtgccctgccaggtctgccacggacgtcgtctgaagcccgaggtgctctctgtcaccgtggacggcaaatccatcttcgacgtatgtgacatgcccgtcgtacgcgaactcgcctggatcaacggcctgaaactcgaaggctcggcacagctgatcgccggcgaagtgctcaaggagatcaaggcccgactcggcttcctgaacgacgtcggcctcgactacctgaccctctcgcgcgcggccgccaccctgtccggcggagaagcgcagcgcatccgactcgccacgcagatcggctccggcctggtcggcgtcatgtacgtgctcgacgagccgtccatcggcctgcaccagcgtgacaacgaacgcctcatcgaaaccctgcaccacctgcgcgatctcggcaacacgctgatcgtcgtcgaacacgacgaggacacgatacgccgcgccgactgggtggtcgacatcggccccggcgccggcgaacacggcggcgaagtcatctactccggccccgccaagcacctcatcgaagccaagcgctccatcaccggcgactacatcgcccaccggcgagagatcgccgtgcccgccaagcgccgcaagatccacaagacccaggtgctcaaagtcgtgggtgcccgcgagaacaacctcaagaacatcgacgtgagcttcccgctcggcgtgctcaccgtggtcaccggcgtctccggctccggcaaatcctcgctggtcaacacgatcctctacccggtgctcgccgacaagctcaacggtgcacgcatcgtacccggccgccacaggcgcgtggaaggcgtggaccaggtgcgcaaggtgatccacgtcgaccagaacccgatcggccgcacgccgcgatccaaccccgccacctacaccggtgtgtgggacaagatccgcacccttttcgccaagactcccgaagcccaggtgcgcggctacggccccggccgcttcagtttcaacgtcaaaggcggccgatgcgaggcctgccacggcgacggcacgctgaagatcgaaatgaacttcctgcccgacgtctacgtggactgcgaggtctgccacggcaaacgatacaaccgcgagacccttgaagtcacatacaacggcaagaccgtggccgacatcctcaacatgcccatcgaggaggccgccgacttcttcaaggcgtacaccggcatctcccgatacctgaagaccctcgtggacgtcggcctcggctacatccgactcggccagcccgcacccaccctgtccggcggcgaatcgcagcgcgtcaagcttgccaccgagctgcagcgccgatccgacggcaaaaccgtgtacatcctcgacgagccgaccactggcctgcacttcgaagacgtgaacaagctgctcaaggtgctgcagtccctggtggacaagggcaatacggtcatcgtcatcgaacataatctggatgtgatcaaggaggccgactggctaatcgatctcggtccggagggtggcgacggaggcggcaccatcgtcacgcagggcacgcccgaacaggttgccgaatgcgaagcctcatggaccggcaagttcctgaaatccatgctttagccttccattgcagctgacctcgggtgggttggggtggtatgttgctggacacgctccgggccgctcaggccaagtctttacggtccagcagcacataccaacccacccaatccctgatgattggttttgcttaatagcgaggaggattatgacgaacgatattgagcggcatagtccggatgagtggcggaagaccgcggcggcgttaatgccggaaagcgtagctgtgggcgccggggaaacgacggcgaaggtgaatgcgaatggggcacctttgctgggggattctcgcgacctgttccgacccaagacctcggatattcccgccaaacccggtgtgtacaaatggcgcgacggggaagggcgcgtcatttatgtgggcaaggcgaagaacctgcgcaacaggctcaccaattatttccagccgctgtatctgctgcatccgcgcacgcagaccatggtgctgaccgcacgcagtctggagtggacggttgtcgccaccgaactggaatcactgacgttggaatacacgtggatcaaggaattcgacccacggttcaacgtgcagttccgcgacgacaagacctatccgtatctcgcggtcagcacgggggagcgaattccgcgcgtgtgggtcacgcggtcgcgcaaacggcgggatacccggtatttcggcccctatgccaaagtgtgggaattgcggcacagtcttgaccggttgctgcgcacgttcccggtacgcacctgcaccaccaacgtattccacaaggcgcaactgaccggacggccatgtctgttcgcctccatcggcaaatgctccgcaccctgcgtgaaccgtatcgaagcggacgaacaccggcggctgtgcgaacagctggtcggcgtgatgaccggacgactcggacggccatacatcgcccagttgacccgcgacatgaaagaggccagcgccgaactcgaattcgagaaagccgcccgactgcgcgaccagatccaaatgctggaaaccgtggtgcaacagaacgccgtcgtcttcgaccaggatgtggacgcggacgtgttcggcttcgccagcgacgagctcgaagcctcggtgcacgccttttatgtgcgcgccggctctattcgcggcgaacgcaactggagcgtcgaacgagttgaggacatcgatgacgccgacttgatggccgaccttctggtgcaggtgtattcggacgccgccggggacaatcacccccagtcggccgcgaccatctccaccaatcgcgaggccatcggctccacacagaccatcacggccacggacgctgtggcacgcgcccaggccacccgagaacgcaacacccgtcaggagaccaccggacgcgcggacctgctggcacccatcgcaccggtaccgcgcgaaatcatcgtgcccgtcgaaccggcccgccgcgaggaactcgaaggctggctgaccaatctgcgcgggggcgcggtgaccatccgcgtggcctcgcgaggcgacaagaagcagcttatggaccgcgccaacgagaacgccagccaagcactgcaacgcagcaagatgagccgcatctccgacatgggcgcacgcacccaggccatgaacgatgtggccaaggcattgggactcgcgcaagccccgctgcgcatcgaatgctacgacatttcgaacactgtgggcggtgccttccaagtggcctccatggtggtgttcgaagacgcgatcgccaagaaatccgaataccgacgcttcgccgtccgaggcaaggacggcaaaggcgcggtggatgatctgtccgcgctttacgagacgctcacccgccgcttcaggcacggcaacatcgccggcgactccggcgaaagcatcgacgcggaacagcgcgcggcctcggccgccggcaagatgaccactgccgtggcggcggagacaatcgttgcgaacggtaacgacaatggtgagggcggttccgacatcagtggcaaggggcacgcggtgccggtcggagtgcagaacgatgcacgggagtcctcgcccgacatcgtccagcagaacacaaaccggcatcactttgcctacacgccgaacctggtggtggtcgacggcggtaagccacaggtcatggccgccgccaaggcgcttgaggactgtggcgtgatcgacgtggccgtctgcggactggccaaacgcttggaagaggtgtgggtgccggacgacgactatccgatcatcctcaaacgccagtccgaaggcatgtatctgctgcagcgtgtacgcgacgaatcccaccgcttcgccatcacctaccaccgccaacagcggcgcaaaggcgccctgcgcagcgcgctcgacgagattcccggcatcggcgaaagctaccagaagcggctgctcaaccacttcggctcggtcaaagccatgcgcgaagccagtgtcgaggacttcgagaaggtcaaaggcatcggccacgccaaagccaaagcgctgtacaacgcgctgcacgagcagtgagccggcccggtccagcagcccagagtgaattttcggttgcggggcctgtggttgacatattcgaagcaaagtgtcggctagcatggaaacagacatcaaggaggggatatggccaatcatcgttgcgctgtactcggcaaacccgtcgcgcactcattgtcgcccgtgctccacaacgcggcttatcgttcgctgaaactcgacgattggctgtacgacaagcacgaggtgggggaagacgacctcgacgctttcctcaaaggccttggctcgacgtgggctggcctgagcctgaccatgccgttgaagaagaccatccaaccgtacggtgttccggaaaatctgtgggccaaggaactgaaggtggcgaataccgcggtattcgactggagtgtggctaccgatgatcccgcttggccgaacggcaagccgggcatcaagctgtacaacaccgatgtcatcggcatccaactcgccttcgaccacgccaatcgcgaactcggcgaacaccacaccgcatcgagaagcggcgccgcgctgatcatcggcaatggcaacaccgccacttcggcgttggccgcatgctgcatgatgcccgaaatcggccatatcatcgtcgccgcccgccaccctgggaaaaacaccgggcttaaaccagtggccgaaaagttcgtcaacgtgcataacccgtacagcgaaatcgaattaggcgacgatcaggccctgctcgaggcagcccgcaacgccacctatgtcatcaacacgattcccggacatgcggccgacaacgtcgcggatgccctcaccaatgccggaaccgagccattctccggactgctgctggacgtggtctacgatccacgccccaccaagctcatggaagcctggcgcgctcatggcggtcacgccatcggcggcgaagaaatgctgctgtaccaagctctcgtacaggtattgctgatgaccggtatctgggatgacgacccgcccagcgatgccgaccagcgtctgcaggacaccaccaccgaagacgaccagctggagatcgcgatgcgcaaagctcttgaggaggcgttgtaatgagtcaacagacaacaatccgcgataccggcgaggcggccgccacgaatgcgccggcgaattccgcgacatccacatcgactccggacaaccagccgaccccgcttgatgccttcgaggtgctgctcatcaccggtatgtccggcgcaggccgctctcatgccgctgactgcgtggaagacatgggatggtatgtggtcgacaacctgcctcccaaactgcttatcccgcttgtcgacatgatgaccacctccggttccggatcggggtcgggcgtccacaagcttgccgccgtcatcgacgtgcgctccagctatttcgacgagctggccgccgtgctcggccatctggatgatctcggcgtcaaaacccatattctgttcctcgacgccagcaacgaagtgctcatcaagcgctatgaatccgtgcgccgcccgcacccgctgcagcacggcaaccgactgatcgacggcatccttgaggaacgtcacctgctggaagacctcaaggagcgagccgactgggtcattgacaccagctccctgagcatccaccagctgtccaccaaactctacgagacgatgctcggttccggccccaccaccgtggcggtacacatcttcagcttcggcttcaaatacggcatgcccatcgacgccgatttcgtggccgatgtgcgttttctgcccaacccgttctgggttcccaacctgcgcgagcttaccgggcacgacaagccggtcgccgactacgtgctttccagcaagggagccaaggaatttctcgacgcttatgagaaagctatcgagattgcgttggaaggatacgcccaggaagacaagcactatgtaaccatcgccgtcggctgcaccggtggtcagcaccggtcggtggcgatgagcgaagagctggctcgccgcttacgcgcacatgggctcaacgtaaccgtttccgcgagagaacagcataagcgtcactcatcgtaagcaggcgtcgagcggtcatcgggcaagcgttcggtgaccacactgcgagaaagcaaagcccataatacgtatcaaacgggttcgcttgtccaccagattaggtatcacagaaagccgatggcttccgaccgtatgacagcagataacggcacgaagcgcctgaagcattgagaagaacgggactgtaggaggtagatcttggctcttctggacgatgtcaaaagcgagttggcggcctttgaaggcgattcgccagccgcgatcaaggcccaagctgcggccatgatccgttttggcggcggtcttcgaccggtacagaatacatacgttatccaagccgtattcacctcgcttgacgttgcagaatggctgaagaacacattgaggaacacgttcgggcatgaagccgaggtcaaccacctcacccgtcagaccccgaacggccctgtcgagacctacgtggtgctcgtcacccgcaacgtagtggccttggctttgcagaccggactggtcgaccgccgcaagcagcaggtccgtggactgccgtctgaagtggtcaacggatccatcgcccaaatcaaagcagcatggcgcggcgccttcatggcccgtggcttcctatccgatcccggtaaggccagcttcctggaaatcgcttgccccacggaagaggccgccatggccctgtgtggcgtggcccgtcgtctcggcatccaggccaagcatcgcacgctgcgcagctccgagcgcgtgaccctcaaggatcccgacgccatcgaacgcatgctcaagctcatgggcgccacccgttcggcccgcgaatggaccggcaagcgctccgacggcgaggcccgcggcaaggccaaccgtctggccaacttcgatgacgccaatatgcgccgttccgccaaggctgccgccgaagccagcgaaaaagtgcagcatgctttcgaagtactcggcgataacattccggacaacctccgtcaggccggccagctgcgcatcgatcacgtggacaagagcctcgaggagcttggcaagatcgccgaaccgcaaatcaccaaggatgcgattgccggccgaattcgccgactgcttcagcttgccgagaaaacggagaaggctcgcgcagccgaaggcaagtaacccgacaacgacgtaacgaaacaccgcattcagtcagtaggcgaatgcggtgttttgttccggaatgcctgtaatatgcaaagtggcaaaattggccactttgacgtgcgattcgtcaaggaaaggatattcatgaagacactcaaggaccttggagatctcaagggcaagcgcgttctggttcgcgctgatttcaatgttccgctggacggcaccaccatcaccgatgacggtcgaatcaaggctgctctgccgaccatcaagaccctgcgcgaagaaggcgccaaggtcatcctcatggcccaccttggccgcccgaagggcaaggtcgttcctgagctgagcctggccccggttgccgcccgcctcggcgagctgctcggcaccaacgtgccgctggccaaggacacctacggcgaggacgctcaggccaaggtcgccgccatgaacgatggcgatgttgtgctgcttgagaacgttcgcttcaacccggaggagacctccaaggacgccgacgaacgcgccgcttacgccaagaagatcgccgccctcggcgaggccttcgtttccgatggcttcggcgtggtccaccgcgcccagggctccaactacgacgttgccgccgatctgccggccgccgcaggcctgctggtcgagaaggaagtcaaggccctgtccaaagccaccgagaacccggagcgtccgttcaccgtggtgctcggcggttccaaggtctccgacaagctcggcgtcatcgagaacctgctcgacaaggccaaccgtctggtcatcggcggcggcatggtgttcaccttcctcaaggccaagggctacgaggtcggcacctccctgcttgaagaggaccagcttgagaaggtcaagggctacatcgagaccgccgagaagaacggcgttgagctcgtgctgccgaccgacgtcgccgtgaacgccggcttcccggccggtgacaccccggttgctccggaagtcgttgccgccgacgccatcccggccgacaagatgggtctggacattggcccggagtcccagaagctcttccacgacaagatcgtcgactccaagaccgtcgtgtggaacggcccgatgggcgtgttcgaggttcctgagttcgcctccggcaccaaggccgtggcccagggtctggtcgacgccaccgcagccggtgcgttcaccatcgtcggtggcggcgactccgcctccgccgtgcgcaacctcggcttcccggaggacggcttctcccacatctccaccggtggcggcgcttccctcgagttcctcgaaggcaaggagctccctggtctgaaggtgcttgagtaatccattttctagctcccctccttgaggggagctacgtattttttagaggggaaacatatggcgtccaaacgcattccgttggtggccggcaactggaagatgaatttcgaccatcttgaagccacttacttcgtgcagaagctggtatggctgttgcgtgacgctcgctttgacttcaaacgctgcgaagtcgcgcttttcccctcgttcacgtcattgcgcagcgtacaggtgctggtcgaagccgacaagctccatgtcgcctacggcgcacaatccgtttccgtgaccacccaaggtgccttcaccggcgatgtgtccgcggacatgatcgcccatctcggctgctcgtacgtcatcgtcggccactccgaacgccgcaaataccatcctgaagatgacgccaatatcgtcgatcaggtacgtgccgtgctcgccgccggcatgcagccgattttgtgcgtcggcgaaagcttcgaggaacgacgtcaaggcattgaactcgatttcgccgtgggccaggtacgagacgtcacccgcgatctcaacgaagaacaagccgccgaactcatcgtggcctacgaacctgtctgggccattggcaccggcatggtggccactccgcaatccgcccaggatgccgcaaacgccatccgcaacgatttgaagaccacttttggcacgaaggtatccgatagcgtacgtatcctgtacggcggatcggtcacctcgaaaaacgcggcggaactcatttcccaacccgacgtcgacggcttcctgatcggaggggcggccctggatgttgaggaacttgccaaaatcgctcgactggcactgaaatccacgaaatcacggaactaataccacggttttcccgtgtgtgcgctatgctggtcaacagtccaatcaatccggaggtaccctgtgaccgctcttaagatcacgctgcaagtcatcgtcgtgctgctcagcttcgtgctgaccctgctcatccttatgcacaagggcaagggcggcggtttgtccgacatgttcggcggcggtctgacccagaacgccggtacttccggtgtcgccgaaaagaacctgaaccgttggaccgttatcatcgctctggtgtgggtggcattgatcatcggcctcgacatgatgaccaagttcaacctcggctgatcggcttgcacgccatatagacttgtcgctcgcgacccatgaccgttaccgtcggtcatgggtcgtatgcgttctatcgagtattacgaaaggacatcaccatggtcactatgaaccgcaacaaagtcgttatcgtcggcactggccaggtcggtgccaccgccgccttcggcatcgtcacgcacggcctgtgcaatgagctcgtgctcatcgaccgctccgccgccaaagccctgggggaggcccgcgacctcgatgacggcagcgaattccaggaccgccacgtcaaggtgcgcgccggcgactacgccgactgcaaggacgcggacatcgtcgtcatcaccgtgggccgcaagccgccggccaactccaaccgcatggccgaactcggcttcaccgtgggccttgtgggcgaagtggtcgacaacgtcatggcctccggcttcgacggcgtgatcgtcatggtctccaacccggtcgatgtgatggcctggtatgcctggaaacgttccggcctgccgcgcacccaggtgctgggcaccggcaccgcgctcgacacctcgcgtctcaagaccatcatcggcgaagagaccggcctcgacccgcgtaacgtgggcggcttcgtgatgggcgagcacggcgactcccagttcaccgcatggtccaccgtctcgctcggcggcaagccattcgcccgcttcctggccgacaaccaagaccgtttcgcctccgtgtccaccaccgaaatcgaagagaagacccgcacccgtggcgatgagatcgtcgcggccaagggcggtaccaacttcggcatcgcctccaccgtggccggcatcgtgcagaccatcctgtgggacgaacgccgcatcgtacccgtctccaccctgctgaacggcgaatacggcgaacatgacgtgttcctcggcgtccccactgaactgcgcgccaatggtgccaacgagatcgtcgaactcgatctgagcgaggacgagcaggccaaattgcaccattccgccgaactcgtgcgtgaacactgcgaggggctgctgtgattctcgacgccatcacaccgaaacaaccccgactgctggtcgccgacctcgacggtacgttgctgcacgacgccgaggtattcgaggaccggttcatcacccagcgcagcatcgacaccatcaaccgcgcgcacgatgccggactgaaattcgccatcgccaccgcgcggccggtgagtaccggcctccagttcgccgaaaaactgccggtggacgccgtaatctatctgaacggtgccctcatcgatttcgacccggcccactccgacttcgacctgctcacctcaggtgccacgccggccgatgagaaccatttgatcaagattggcttctcctcacggcgtgcctgcgaagtctgtctgttcctgctcgatcgcatgcccggcctgaagctcggcatcgtgatgaacgacgtgcgctacaccaacttcgatgtgcgcgtgtattggaaaacacaggccttccaatatacgaacttccacgacgtgcccgaaggcgtggcggataagatcaccatcttccccgagcctgaacagtggaacgagctgcgtgcgctgattccgccggacttcgacatctccattagcgaaggcgtgatgtggatgctcatgaacccgcaggccaacaaggagcacgcgctgcacctgctgtgcgaacgactggacgtgccgctcgaacagaccgccgccttcggcgacgacctcatcgatatcaacatgatgagcgaatccggccggggtgtggccgtggccaacgcgaaccccaaggtgttgtctatcgccgacgagatctgcccgcccaacaacgaggacggcgtcgcccaatggattgaagcgcagttgggctgaaccggccgagactcgagaacacgccaaaattgaacttgtgttgaaccgggagtatgctttgaactgttgttcaaaagataaattgaactcccggttggaggcataaggatatgagcgtatcggtgtttgcggaacgtctgcgcaatgcgatgaacagtaggggattgaagcaggtcgatttggtgcacgccgccgaacatcgtggcgtaaagatgggcaagagccatatcagccaatacgtggccggcaagaccatgccccgcgaagacgtgctcgaattcctggccagcgaactggacgtcgacgcgaactggctgcgcggcgaggaatccaccccgcaattgaactcggacgcttccaacagcgtcacgaacggcgaacacgccgccacgccgcttgccacgggcaccgccaagcccctgacggacagcgagattcccgtgggccgccgccgtaccttcggcaaatcgcacaagctcgacaacgtgctctacgacgtgcgcggcccggtcgccgacgaggcgatgcgcatggaggccaacggcacccacatcctgaaattgaacatcggcaatccagcacccttcggcttccgcacgccggacgaagtcgtctatgacatggcccaccagctcaccgacaccgaaggctactcgccgtccaagggcctgttctccgcgcgcaaggccatcatgcagtacgcgcagctgaagaacatcccgaacgtcaccatcgacgacatctacaccggcaacggcgtcagcgagctcatcaacctgtccatgtccgcgctgctcgacaccggcgacgaagtgctcgtgccctccccggactacccgctgtggaccgcctgcgtgaacctggccggcggcaccgccgtgcactacctgtgcgacgaacagtccgaatggtatccggacatcgatgacatccgctccaagatcaccagcaacaccaaggcgattgtcatcatcaacccgaacaaccccaccggcgcactttacccaaaggaagtgctccagcagatcgtcgacatcgcgcgtgaacaccagctcatcatcttctccgacgaaatctacgatcgcctcgtcatggacggcctgcagcacatctccatcgcctcgatggccccggacctgttctgcgtgaccttctccggcctgtcgaaatcgcacatgatcgccggctaccgcatcggctggatgatcctgtccggcaacaagcgtatcgccaaggactacatcgagggcctcaacatgctcgccaacatgcgcatgtgctcgaacgtgcccgcccagtccgtggtgcagaccgcgctcggcggccaccagagcgtcaacgactacatcgtgccgggcggccgcgtgcacgaccagcgtgacctcgtttacgacatgctcaaccagattcccggcatcaccgccgtcaagccgaaggccgcgttctacatcttcccgaagatcgacgtcaaacgcttcaacatccactcggacgagcagttcgcgctcgacctgctgcatgacaagcacatcctcatcagccacggcggcgcgttcaactggcatcgccccgaccacttccgcgtggtgtacctgccgcgcatgggcatgctgcacgaaaccatgggggagctcgccgacttcttcagctactactggcagagctgatccttggtacaggcgaacacgatcgatgccgggctgggcaccaaaccggtgccccgtctggccctgaccatgtcggtccccaccatcgtggcgcaggcggcgaacgcctcgtacacgatcatcgaccgactgttcatcgggcacatccccgaagtgggcaacgcggcgatgaccggcgtgggcatctgcttcccgattctgccggccgtcaccgccttcgcctcgctgatcggcgcaggcggcgcgcctcgcgcctccattgaacttgggcgcggcaacttcaagaaagccgaacgcatcctcggcaccagcgccgcgttcctcatcgccatagccctgaccctcaccgtgctgctgcagttggcgaaactactgtggccatggtctccgtactcatcggcaccggcatatccatccttcttgaccccgtgttcattttcgtgttcggatggggcgtcaggggagcggccgccgcgaacgtgctcgccacattccccggcttcttcgcctcatggttcacctcggaacagacggtcatcgacatcgtgacccgcatgatgccgattttcgtctgcggctggggtatcttcggcatccagatgggcgcgcaatgcgcactcgtcggcatgggccaggccaaacagtcggtgttcttggccatcttccgcaagatcatcctgctcgtgccgctcgcgctgctgctgccgcactggatcggcgtcaacggcatcttcatcgccgaacccatctccgacgccacctccggcatcgtggccggcttcctgttctatgccacctaccgcaagattcggcgagatatggtctagactcctgattcaatggatgtgccgtctcatgcgttgcgaaacacgggacggatagaatgcctcgcaaaacgggtgcccgttgtttcgtgatatgaaggagattttatgccggtggtgtcgcgtcgtgcgcagccaacgtgatggacataatcgccgaaagcagggagaacaatggcagcacgcacaacacgacggtcagcagttccaaagcttcacggccgatgcaataagcgacaagacctgcattgtcagttaccgatagcgctgggcagaaatcggtgtgtctaccagtgttgtagctgttggtaaagaacgtgagacctgaccagaacagggcaacgggaacagagccgatggcgcgaaaagccctgtactcccgcaacggtcagacagagaatcgcgacaacactcagcgcagtcaccgtcataaaccacagtggtgagg

SEQ ID NO: 3937 - DNA, 3184 bp, Unknown
  R22_24m  MAG No. k141_21836
atgtaatcgacttccgtatgttcgccggtttccaagtatttcgccacatcatcaggaccggcgaaaaccagttcgaccgcttgcgcaatcatcagattgacacgatccattggcgtaaggttttcgaaatagccgtacaccgggattcccagcgcatgcgcatatccgatttcgaacatcgtgcccgggtcctcgtccataagattggcgaccacggctttagcagcattaatgccatggatatcgtccgcaaagcatccttcagggcctacttcttcgatctggctgacaaaccgcggcttgaacagtaccttgccatggtcttccagtatcttttccaaacgttccatacttgccgtttgctcaggatcgaagaacggaccggccacatagaagtcatactgtttgtcttcactcatggtctctagtcatagcgcagccgcgtcggacgccagccgttattttcactgtatggacaaggggtcgtatcgtgaacattactacgggataaccgtcaatgactacgtacgttgcccccgatcagcacactccgccactttcgccccctcccgtatcgtcgagcacgcgaaccaagccgaccaaatagccgccatcccatgcgctgattaccgtatccgaatgctgcaatgccttgaacaaccgttcgggccactgcgccgattcccaaccaaccgacttgaacagcgcctcaacctgttcgacagtaaaccgcttctcttccgtgtattcgatagccatggaccctcacgataaccgtgaagccccacatgtctttgcatagtttcacatgacgggatgatggatggtggaacctatacgtttacacatgcctaatgcctatggctcatcaccgatgaatagaggctgagataccgtcatgtttccgaagccaagtgcccgagatcggattcgaaccgacgacacccgctttaggagagcggtgctctatccactgagctactcgggcaacgacgtttcattgtacacggccgcacgcccagtcgcatcatgttcgcgtggcagcctacataagacgcatggcagtctgtgtaagctacctggcagaacccgccaccaaggcatggccggttttcgtgctggtttggtgcgaactgctcttgcgcacggcgaaaagacaccgaaagacaagccgcacacggtacagtggcaaatcgcacgaaaagcaaggtaacagtaaacaagccggaggaaagggcagcatggcaaaggcacgaagtactaccacaggtgcaagcgtacgagctcgcgccgctgccaagccacgctctgccaaagccacggcacgcccagtatccaagtctgccgtgaagccacacaaacggcatcgtctgcttggttttctcgccacgatgttcgcgcttcttgcccttgccggcactgccgcccgcgcgctgcctgccgatttacaggaactgccatttgtgccgattgtggtatcggcaacgccctggttcacgttgcttggcctgattgccctactgttggccatcgtgtcgcggcgtatccttgccgcactaatcgccatcgccgcaatcgcatgcaatggctattggcaatatccgttcttctactcgaccgacccactcccccaagccgcgcagaacgccgtggctgcggcctcccccaacaccagcgatgcctacgcgcgcgtcatgaccttcaatgtatacaaggggcaggccgacccacaagccatcgtcgaactagtccgcgatcagcgcgtcgaagtgctcgctttgcaggagaccaccgaggatttcgtcaaaaaactcaacgaggctggcattgagcactatctgccgtatgcgcaggtctcatcgtctgacggcgtattcggtaacggcctctggtcggccacgccacttgccgatccggccgacgatgacgtgaattccagcgcctcattcatgcccggcggcacggtgaatatgggtggtcagcagattcgattcgtatccgtgcacaccaccgctcccgtacccggctattggcggcagtggaagcgatcgctggatgagttgggtccgatgcgcgggcatacggatacacggtatattttcatgggcgatttcaatgccacttacgatcacacgccattccgtgattttcttggcgaccggttcgtggatgccgcacgtgaatccggacatgggtttacgttttcgtggcctacgaaccgcgtgtatatgccgatgttcgccggtattgaccacgtggtgcttgatcagggcatgaaggccgggcaatgcaaggtggtcaaagtcgagggctccgatcatgcggcgttgttggctaccgtggcggttgggtgatttcgtattcctcggccagccgcatacactgggacacggcttccagaatcgcctcgatgccggacttcttgattgagccgtcatcctttaaatacttcatcaggcgcactgtggatttggtgctggcctcggggtcagggcgagcgccgggagcggcgtcgacgataagcatgtggatagtgttcgaaccgatatcaagcacaccaagtcgcgtggtgcgcgaacgcagattgaccatgatccctattcctgaccttacccaacccgtgatggccgaacaacgggccgaccatcgcaatcagccagccgtgcgccaccatggcgagtcgttcggccggcaaccaacaccgcgaggccagccgaacatcacacaaactcgactaccgtacaacaatcacaccggatgccgcgccgttcacaacgattcgacgaacgttccgagacgttccagcccctcggtcagggcctcacgtgaggcggcatagctcaggcgcacatgcgtatccgctgtggccgcaccgaagtcgcggccaggagtcagagccacatgggcttcatccagcgcgcgttcgcagaacgcccaggcatccagaccagtacgggagatgttgaagtaggcgtagaacgcgccattcggctccacctcaaccggcaaaccgatgcgcttgagcccgtcaatcacaatgcggcgacgggcaagcaattcctgacgacgagcttcacattcggccaaactctccggcgtaaaacaggcgagcgccgcatgctgggtgggcgtgtgggcgcacaggtagtagttggtggccaggtcgtcgaccgcttccagcacg

SEQ ID NO: 3938 - DNA, 10240 bp, Unknown
  R22_24m  MAG No. k141_22154
ctccgtggccttgggtttcggcttccgctgcggcttcctgggtctgctgcacatggagatcgtcaacgagcgactctcccgcgagttcggcctcgacctgatccagaccgccccgaacgtcacctacgacgtgaccgccgaggacggcagtcagcatcatgtgaccaacccgagcgaattcccggacggcaagatcaagaagatcgtcgagccgatggttgccgccgacatcatcacacccaaggaatttatcggtgcggtgatggatctgtgccaggaccaccgcggcattatgggcacgatggagtacatctccaccgatcgtgtcgagatgcactaccgcattccactggccgaaatcgtgttcgacttcttcgaccagctcaagtcccgcaccaagggctacgcttccctcgattaccatgaggatggcgagcagtccgccgatttggtcaaggtggacatccttattcagggcgagaaggtcgatgcgttcagcgccatcgtgcaccgcgacaaggcctacagctacggcgtgatgatgaccaagaagctgcgtggcctgattccgcgtcagcagttcgagattccaattcaggccgcaatcggttcgcgtatcatcgcgcgtgagaacattcgtgcgttgcgcaaggacgtgctcgccaagtgctatggcggcgacatcacccgtaagcgtaagctgctcgaaaagcagaaggccggcaagaagcgtatgaagatgctcggccatgtggaggtaccgcaggaggcgttcatcgccgccctgtccaccggcgaggactccaacgaccgcgacaccaaagacaagatccgcgccgctcagaagaccgagggctagtgttcgaggtctacatccacgtcccgttctgcttgcggcgctgcggttactgcgacttcaacacctacacggctacggatcttggtgcgggggcctcgcgcggcaactatgccaatatggtcattcgtgaaatggccctgaccaagcagtggcagctcgaccacggcatcgaggagccaccggtctccaccgtgttcttcgggggtggtacacccacgattctcgccgcccgcgatctggtcgccatgctcgatgccatccgcaagatctggagcatcgcgcccgacgccgaaatcaccaccgaagccaacccggacacggtcaacgaatattacatcaatgagctcgctgccggcggcttcacccgcgtttccttcggcatgcaatctgccgtgccgcacgtgctcaaaaccctcgaccgcacgcatacgccggccaacgtggccgcaggcgttaatgccgccaataaggccggcctgcgctccagcgtggatctgatttacggcgcaccgggggagagccttgacgattggcgcacctcggtcacgaccgccatcgacctcggcgtgaaccacatctccgcctacgcactgaccgtggaacccaccacgaaaatgggtcgtcaaatcgcggccggcactctgcccaaacccaatgacgatgacgaagcagccaaatacgaaatcgccgacgacctgttcgccgccgccggcctcgaatggtatgaggtctccaactgggcccgccccggatacgagagccagcacaacctcggctattggcgcaacgtcgattgggccggcctagggccaggtgcccactcccactacaacgcggtgaccgaggctgaccacccccagtcggcttcgctgacagcccccgccagcgggggcaagtccgaagccattgcctctgcctcagctgatggacaggccaacgccgaacttggagaaaccaacgccgaactaggtatgatcaacgcgcatgggaacaactcccaagaaattcatgcccccgctggcgggggctgtccggcggatgccggactgggggtggtttctgtctcacacggtctgcgcagctgggacatcgcgcacccgcgtttgtggggcacggccatcaacgagaaccgtgtgccgtgggccgatagcgagacgatcactcccgaggaaaacctcgaagagctcatcatgctcgggctgcgcctgcacgagggccttggcctcgaccgcatcaaccgcgccatcaacgatgcaggtatgagcagcacgccccagactctccgaaccgtttcggttgaccaactcgcccccatgatcagcgaaggcctgattaccgtatccgataatcatcgagtggtgcccactcgtcgtggccggttgctcaatgactcggtaatcgaacagttcttcgattacgtcggtgtatgagtcggtggtatggtgcgcggcagtcgccattacctgttcgctagttgtggttacaccgtcagagggagtttttttgttttaccggcgggggagggaaccgcgtaggactacgtccggggcgctttgcacgtagatcaggcggttggcagtgccgccggtggcctccgcgtcatcgcggttggacaggatgctgtccacggcggcctggcccatttcggccagcggcagatgcacggtggtcagtggtgggaacacgtcggcggagtaggggatgtcgccgaaaccggtgacgccgatttcctgacccggctcgatgccgttggtgcgcaacgcggtcatcgcaccgatggccatcacgtcgttgagcgcgatgattgaatcgatgcctttgccgtcgtacagtgcgccttcgcccggcttcagcagtccggatcgggccatttgcatgacggccgcatagccgtcggtgcggctgaacttaccgtttgccacggctttcgggtccacggtgatgcctgcctcgtccaacacttccatcacaccggccagtcgttctttggaggagcggtgtgcgtcatcgcccttgagaatagcagggcgcgtatacccggaatcgacgataagctttgcgatggcacgcgcgccgacgtcgttcgccacgtccacggccgggaagggcaggttgcggttgagtacgaacacggcatgtccgccggacgattcgtactggatgagttccgtctgcaacgcctggcgttccggcgcgtcggtgtattcgctttcggagatgatgatgccgcgcggcctggtggatacggacttacgcaccgcctccaactcctcgtgcggggtggctgccacgccgatggtcacggagatgccgcgttcggccgccgccttgaccacgccttgcgacacggatgcgaagtagggatcggagatatcggagaccagcagcacgatgttcggtgcagtgcctttggccactgcctgagcataggcgttgggacgatagttgagcttggtggctgcttccatcaccttgacatacgattggttgcgtaccttgcgggtgctgccgttgagcacacgggatgcggtggcgatggagacctgggcttctttggcgacgtccatcaatgtcgctggcgattgcgccttatcgttctgtacggccacgatcgaatcggtccttttcttccctgaaacggaaaacatgtctaaacgcttaccgcaatgatatcgcagttttgcttgcaatagtagcattgtggattggaaagcctgaattttgaacaaaaataatcacgcgaattatggaaagcgcttaccgttccgcgtgtcgtgcggtatgctcgaagcatgacgcgatacttatgtgcccctgactccttcaaagagagcctgaccgccatggaggcggcccgggcgatggctcaggggattgagaatgccgaccacgatgccgaggtccgttgcctccccatggccgacggcggtgaaggcaccgcacgtgcgcttgtcgacgccactggcggatcgatgcacgccgtgccggtccacgacccgctcggccgacctgtcgaaggccacttcggcctgctcgctgacggcacgaccgccgtggtcgagacagccgaagccagcggcctcgcactgcttgaagccaaaaaacgcaacccgttgattgcctcctcctacggcaccggcgaactcatactcgccgccgtccgttccggagccaagcgcatcatcgtcgggctcggcggcagcgccaccaacgacgccggtgccggacttctgcaggccctcggcgttcgtcttctggacgggaacggcaacgaccttaagcacgggggagcggccctcgctgatctggccaccatcgacatcagcacgatggacccggctctcaagaacgtctccatcaccgccgcctgcgacgtgaccaacccgctgaccggtcccaccggcgccagcgccgtgttcggaccgcagaaaggtgcctcccaggccgacgtcgccacactggacgccgcgttggcgcacttcgcgcaggtcatcgaaagccggctcggcgtcgctgtgaacgacgtgccgggcgcgggcgccgccggcggtatcggcgccgcgctgaaaggcttccttgacgccgaattccgtccgggcatcgccatcgtcatcgaacaatccggacttgatgcggccgcgcaatgggctgacgtggtgttcaccggcgaaggctccatcgacttccagaccaagttcggcaaaaccccggccggcgtggccgaaaccgccaagcgccacggcaagcccgtgatcgccgtcgccggacacatcggcacgggcatcgacgaactgcatgaggtcggcatcgacgcggtattcggcatcgcccccggtgccgccagcctcagcgaactgctggccgacgcggccgccaacgtgacccgcaccaccgaacaagtcgtacgaaccctacaactgaagcagcttcacaagctccctctgatgggccgagccgtgaaggaaacgccggaggcgtttccaggcgagggcttgacgacagtcaagccagccgaaggctccataattgcgggacgagctgccgcggcaaagccgtgactgagggggagacttatggcgcagccgcaaaaaatggcatcggctttcagccgatacagtcattcgtctgcttctctccctcagtcagctgcgctgacagctccctcgtcagagggagccacacaattcggaaaggaagatatgcgcaccatgctgtacaccaaggtgaccagcatgctgagcaccacgggcatcgccagcgagagatacgccttcggaatcggcgccttttcgaagggttcgttatccatttccgtcccttggtgttttcgttcttcagtcactgcgcgggatgccgttcggcgtgcatcacaggcattgtagaggcaacagtgtggacaacgggcgggggggagtatctcatgatgcggtgagggcgttgatgatgacgcatcgtgtattggtggccgtgtgcatcgtatgtgaacctgtgctggcacggcgtacacacgatgggaaaagaaagaatatatggaccccgttgtcccggttattgttcagttattactgtgttgaattattgcgttattcaattattgtggtgtgccggccgattgcggcctgcgggggattgccttcgtatgtgtcgtgcaatctcatgaatgggatcgttcgctagattcagcgagcgtccttgttggcggcgttgatgatgtcggcgaacatcttggagtcggcgtagccggcgcgggcgatggcgtccataccggagagggtgaaaccgcgaatcatggaatccatgaatgacataatgtgttccttgtcttgacttgcaaagccgtgggctttgcgatgtgttgttgtttacgttatgagacgggccgtgtgtgagcggcgagtcagggaagaggctcagcgagcgttcttatcggtgtcgttgatgatgtcgagaatcatctgggagttggcgtgaccggactgggccagggaagtggcaccgtacatagccagaccgcgaatcatggaatccttgagagacatcatgtttcctttcgttggtcaaaaccttgtggctttgagttttgtttatcggtttctttctgaaaccggtttcagaataacgcagtccgatgacaaacgcaaggggactattccgctctcggcgtttctggcggaatatcgccgttctatagataccgttcggtagttaagaggctgtctagtcgactttctgacggtcttgttctgggcgcatggttttcacgaaatggcctcatgtcgcggaaatcgtacgctgagtcgtcgtaagcgtacggtcttcacgaaatggggtctcatctcgtgaagaacgtacactgagtcgttctgggcgtacggttttcacgaaatggggcctatcttcaccggattttgggcacaccggccttgagcagcttggtctcaagattgatggggcgtagcagatcctcatagaacacatggacgatttcggtgacgccctgttcccggagatgccgatcacgtctgcggtcgtactccattttcgcctggaggcttgcgcgattcttgttgctggtgtcggcgtatttggccatgccgtcgtattctgccacgatgatgcggccgtctgcgagcttccaacagaaatcgacgcgatatggcattgcgggattgtcgggattcatgaactgcacctgcagcaggggaatgccgaaagacaattcggtgatctggccacgcatcaatgattcgccgccgttttcgctcaggggatccgcgtacttcagcagcttggtcacggagacctcgtcgcagacgctttgaatcatcagcgactgcacctcttcgatggtcgtcagggactttctcagagccgaatcgtatatgggcagcgcctgtgggaatgggaatgccgcgcagtcgagcagcgttcgcgccggagtcgtcaagagaatgccattatgcttccgcgtcggaatccgattgatatagatgcggttgagacgcgcctcgtctccgccgccgatgccggacttcgaggcgatgtgcactgtgccgtcgtgcagggaatagttgtgctgcagtccgtatacgcacgccgcactcaaccccgcaaatacccactgagggtggattgcggacagcgcacgtatgacctgcaatgactgttgctctctggtcatggtgttccaaagtattcggtcggcgtacaggttcttatacggtgacaccagctccccggcatgcaggcgacgtttcagggcgcgccgttgcgcatcactggtgccatagcagcagcgacgctcctgcttcgcctgctgcagcagtgcagaaacttccttgtgttctttcatatctcgacgctaagggtgattttgattgttgcacaagctcaaccggcaaatgtgaatactatgtcacgcgaattgttggtgtggataacttgaatcgacgtcgacggctttgccgacggtcttgtcggaggcgatattagcctaggacaccttgctgcgccgccttccataccgagaacagtcatcagtgacaccgagggcatcttcagcgtatgttcttcacgaaatcagctgccatttcgtgaaaaccgtacgctcagaatgactcagtgtacgttcttcacgagatgaggccccatttcgtgaaaaccgtacgttgacgacgattcagtgtacgttcttcacgaaattagggatgatttcgcggaaaccgtacactcaccgcaactcagcgtacggttttcgcgaagttattgatttggatataggttccccgtcatgaactacaatgaatcgcggcgaaaaacggggaaccgaagtcggagcgcggctgaacggatatgggtgtgactggatgactgccatggtgatgccggttctccttgacgtacgcaacaacaacaactgacaacaacaggggagacaaggatggcgagaagtgcgggccgcacccgaccggtgatcaaggacgtggccagactggccggagtctcggcaccgaccgtctcccggtatctcaacggcaccgtcaatgtcaccgaagacaagcgtgaacgcatcgccaaggccatcaaggagctgggctatgagccgagcattgtggcgcgcgccctgtcgaaccgggagatggactccgtggtggtgttcgcggccaatccttccgccttctccacgtccgaaacgaaccatggggtcgaggccgccgcccgtaaacgtcggttcctgctcaatatcgtttctttggatgagtccgacatggactccgtcaaggctcgtgtgcgcatgggtttgtcgatcaggccggcgggcgtgatcgtctacgagtacgaccgggccggcatcgccgcactggaatacattcccaaagatatgccgatggtcgtggtgggtggcagcttcggcgacggcgaataccagatcatcaacgccgaaagggatggtggccgttggatgaccatgcatctgctggatctcggccatcgcaccgtgttccatgtggggcgcccggaaggaccgaccgataacacccgcaccaatgggtggcgtgacgcgctcaaggagcgcggcgtcacggtacctgacccaatcatcgtgcccgacgatgatttggaggagtcggtcaaggctgggcgcaccttgggccgtcgtggtgatgtgactgcgattttcgccggcaacgacgagaccgccatcgctgtgatccgaggtctaagggaggttggtcgccgcgtgcctgctgacgtgagcgtcgtaggctttgacgaccgcaacttcggtgccatgtggaatccggcgctgaccagttacacccagaacttcctggacatgggggagcggtccttccggatgctgttcgaacagattcaggccaagcgtgccggcgatgacgcgccgccctcgcaggtcgaagtggtgcaaggcaagccgtgtctgcgtgcctccgaacgcgcgtacggcgacggcgaaatcgcgtagtcgatggggcgtgcgtatcaatcgatagtgactgtagcgcattcatatcgtgacgaggagtctcccatgccgaactgtaagcgcttaccttaaatagttcgtaatgtgatttacgtcatactaatagatgttctgaatcatagtgttatgcaaggattccttgcggaaaatggctatttatcaacagttttcgaaaagtccgcatgatgggcgactgtgagcacgctttatggtaatcgctttccgtagtgttattgttacagtgtgacttttgaacaatcggtaactctgaagactcagccccagacctcgggcactatctcagcggcagacgccgcgatgcaatcggcccgcgacgaacgcatccccggcaaactcatctgcgcgatcgtggccgtcggctcactctcattcttcggcatcctgaccgaaaccgtgatgaatgtgctgttcccgcagctgatgggcgtgctccacatcagcgaggccaccatccaatggctcaccaccggctatctgctggtcgtgtcgattactgtgccgctcagcgcatggctgcgccgtcgcttccgccagcgcagcatcttcctggcggcaacgcgatgttctccacgctgcagcagttcacgggtgcggccggcaccactgtggtgggctaccgtgatctccgtgttccagtccggctcgggcaaggtgggttccgccggctatgccgccgccaccgtgaccggcgcatagattgactacgcgatcatggctgtggtcatcgttatcgttatcgtgttcgtcgccatgctccacgccctgcgtaaccggaagtagatggtaagtcgagtggcaccatgctaccgcgcaatggctgggcatggagttttggctaggaatcgttcgacaggcgttggcgcggccgctgagagcattcgcgtcgaaaggtttgccggagctcgttcggcgtggaatgggccgattcaccggtgattgttggtcaaacagccaatgctgacccttctgccaatggttagcgaggttcctatcataagcatttcggagagcgatctcgaaaaaggcgacatccttcacgaggatttgaccaaggtcaacattccactcgtataaagtaaggctgtaagcgcatcttggtggcaagcgtcaaggtatgtacggaatcgcggggcggaaagccactcctcaatccactgcggattggtaataacggatgattgtaacgcatgaatcacgaggcccccttacctgggttataggccaaaatgtgtgtccgttttggcttgtgttcctttgtggcggtgggcgttcctcctgttcgagttgtatgggcggggaactcgaggtcggccagaatgtgtgtccggaatggccggtcaggccttgcggca

SEQ ID NO: 3939 - DNA, 23422 bp, Unknown
  R22_24m  MAG No. k141_23032
atccttgggaagatgagcaggacggaaccggaatggcgtacgccggtgcgttctcccttaccgtcacaggtggcgacatcaacgtggacgacaacagtctgcaatgttcgcacatcaccggattatcgctccgcttccgcagtatgagcggattcaagggaagcgaccagcagccggaacgaagcatgacggttatcgccgaccatctggagaaaaccatcgacgagtggtcgaccgacctgcagaccatgctcgaccgccatatcgcggactaccgcagatatttcgacagggtggccatccatctcggttcagcccatgatgacgatacggaactaccgttctcggcgatccttcgctcggatgagaacaaagaaccgcatcgtctggagatgctggcggaggcgatgttcgatttcggccgatatctgcttatctcctcatccaggccacacacccaacctgcgaatctgcaggggatttggaaccataaggatttcccgaactggtacagcgcctacacgacgaacatcaacgtcgagatgaattattggatgaccggcccctgcgcgctcaaggagctcatcgagccgctcgtctccatgaatgaggagctgctggcaccggggcacgatgccgctgacaagattctcggctgccgaggatcggctgtcttccataatgtcgatctctggcgtagggcccttcctgcaaacggcgatccgatgtggtcgttctggccgttcggccaggcatggatgtgccggaacctgttcgatgaatatctgttcaaccaggatgcatcgtacctgtcccgcatctggccaatcatgcgggacaacgcgcgattctgcatggatttcctatcggagacaaagcatgggctggccccgtcccctgcaacatcaccggagaactgtttcctggtgaatggagaaccggtatccgttgcgcaaagcagtgagaatgccacggccatcgtgcgtaatctgcttgatgatttgattcaggcttctcacgatttggaaaaccttgacgaagaggacagcgctctggtccgtgaagcggaatccgtccgttcccaactggctgaaacgcgattgggagctgatggaagagtcctcgaatggaacgacgaattcatcgaatccgatccacagcaccgccatctgtcccacctttacgaactgcatcctggtgcaggcatcacgtctaagactccgcgtctggaggaagccgcgagaaaatccctcgaagtgcgtggcgatgatggttccggttggagcatcgtatggcgcatgatcatgtgggctcgtctgcgtgatgcggaacacgccaaacgaatcataggcatgttcctacggccggtggatgcgaacgctgaaaccaatctgctgggcggaggagtgtacgacagcggattatgcgcccacccgccgttccagatcgacgggaaccttggattcccggcggccttgtcggagatgcttgtccaaagccacgatggctggattcgcgttcttccggccctgccggaggattggcatgagggaagcttccatgcgctccgcgcaagaggtggaatccaagtggatgcgacatggacggatcagacagtggaatatacgttgcgctgttcgaagcctacggagattacgctgaacgttctggggactgatatgggacgtgtcgcattgtctccggataagccattcaagggaaccatccggcgttaacgtattgcgttatatccgttactaaatgttgcggaccgtctttcctaatagaggaggacggtccgcaatctttttttgatgggaaaggagattccgccattttccacgattggtatgcgcagatgaacctgtacagtgaaagctatgcgtgtaatttctggacgattcaagggtgtggcgcttgctacgccgaaaacgggtacccggcctaccacggatcgcaccaaagaggcgattttctcgcacctcgactcatggggagtgctggatgacgcccgtgtactggacctgttcgccggtactggtgcgttgggcatcgaagcgctgagccgtggcgcgcgagaactcgtggccgtggaaagttcccggcctgcggcggcgctgattaccaagaccttgtcgcagttacagaagaatcgttcgtgggatgcctcgctcaaggcccgtgtgttcaccaaaaaggccgagcaagtggctggcggctttggtgaatcctttgacgtgatattcattgatccgccctacgcctatgagaccgctgaatgcaatcagttgttggccaatctggcggtgggcagcgccaccaacgagaacaccgtgattatgctcgaacgctcggtacgctccgacacccccaccgcccccgaaggctggcaaatcactgaaagccgcaactacggcgaaaccgccgtcttctacatcgagcccgcggatgacgactcggatatagagcgttccgacgattccgccgcgtagtgaatctcccaccgtgtggtgaattaatcggcgagccggcgcggatgggtggcggagacctcccagcccaaggccatcagggtcttgcggtcggccttatccagcgccttgcaatccagtgccgcgataaggtctggccggatctcggcggtgcgggccagcgcttcgtcgcggcgaaaacggtccaccctgccgtggtcgccggacaacagcacgtccggcaccgcaataccacgccacacggccggcttggtgtactggcgatgttcaagcagtgcgtcctcgccagtgtaggattcctcgacaatcgaatctgggttgcccatgaatccgggcatcaggcgggtgatggcctcaagcatcaccgacaccgccacttcgccaccgttcagcacatagtcgccgatcgaatattcgcgtacgtcgacgccctgggagcggtagtagtccgggatgcgcgcatcgtagccctcataccggccgcagccgaacagcagatggtcggcatggctgagctcggtggcgtcgcgttgggtaaacaacggggccgatgggttcgggaagatgagcaccggtgtgccggatagggcggaggattcagacggccgcgagaatcccagcagttcgtccaggcattcgctccacacctcgggcttcatcaccatgccggccccgccgccgactggcgtatcatccaccgaatgatgcacatcgtgggtccagtcgcgcaggttgtgcgctttgatctccaacaatcccttggcctgggctttgcccatcaggctgaggttcatcacctcaaagtattcggggaacacgctcacgatatcgatcttcatgttatccagcctaacggtagccccgcccgcattacacggccaccactacactattgcggtgatgaatacgacgatgaacctccccacccgcaaaaagcccgaagtgttgtccccggccggcaacctgaggggcctgaaaaccgcggtcgattatggtgccgacgccgtctactgcggcggcaaagccttcggcatgcgatcggcccccaaaaacctaagccttgaggactttgaggaaggctcgcgctacgcccatgaacgcggcgcccgcgtgtacgtgacctgcaacgtgctgccgcgcaacaacgagatcgaagccatgcgcgagtacgtcggccagctcaaggacaccggcgtggacgcgctgatcgtctctgacatcggcgtgatgatgatggcccgccaagtggctccgaacctggaattgcatgtctccacgcaggccggcgtcaccaattaccaagctgcgaacgccttctatgagcttggcgctcgccgtgtggtgttggcccgcgagatggacttgcaggccgtgcgtgatattcgcgccaacattcccggtgacctcgacatcgaatgcttcgtgcatggcgcgatgtgcatggcgttctccggccgttgcctgttctccaactatctgaccgggcgtgatggcaatcatggcgaatgcgcgcagccatgccgctggaagtattcgatcgtggaagagaagcgccccggccagtacttcccgatcgagcagaccgagaacggcgcctatctgttcaattcgcaggacatgaatatgctggggcacttggatgatttgattgactccggtgccaccagcctcaaaatcgaaggccgcgcgaaaagcgcctactatatcgccgccatgaccaacgcctacaaaaccgcggttaatgaatacatgattcaacgcggttttgaagacgctgatggcaatgttctgaagcctttccgtgaccgtgtgattcgcccgggcgaccccgattttggccaaggaaccgaagatcaagtgatgagcaatgccgatgccgcgttcgccggtgtggccgatgagggatatgaccgtggctctgatactgcggttgccgattcggtcaccggctcggttgccgcagaacgtgaccgcgtgacggttgctgatgccgccgactcaactgcctctggtacgtcggccggcaccgccgtcgaacccgacggcatgagctcccacgcccgctccacgcgccgcaagtccaacaccgcggtcgaacagatcgagaccgattggaagcatgcggccgttcgcccggccccgcacgtcgaactgcccgaatggctgctcgaggaaaccgacaaggtggcccaccgcgactactccaccggcttctattacccggagcacaaggtcacacagaacaccgaccgctccgcctacttccgctcatggctggtagtgggcgaagtgctgagctggagcgcggacgaaggcggacgtgtcacgctgatgagccgtaacaagatcgagcccggtcaacaggttgaattcctgctgcctagcgagagaccattggtctttaccgtgccggaaaccggcctgcgcgatgccgatggcgcgccagtacccgccatcaataatccggcgcacgtgttctcgatgccctgcccgcaccaggtgcccatcaacgccgccatccgctcgcgcaccaaaaagcccaccctcaaagccgaataacctaccactccgcccccgctgactgggggtggtcatgggaatcatgaacaccgcccgcacccaagaaagaatgccttatgcctgaatacagcgaagaaatcctcgattccaacagcatcagctctaccgataaagccggtcgccctattccggtgaccatccccatcgcactggcccccggcatcaaggtggtgtacaccacgcgactgggcggcctgagcgccggcgattacggcaacctgaacctcggcggcaagtccggcgacgaacctgaggccgtgctgtcgaaccgcatcgcactcgccgaagcggtgcaagcccgcctatcgctggtctcccaagtacattccggcgtggctgtggacgtggacgactcgttcgtcatcaacacccccttcggcttcgacgtgtccggcacacatggtgagactgacactccgcacgtcatcgaggcggacggccaggtcaccgcacaatccggcatcgccctaggcatgttcgcggccgactgcctgccggtgctgctgggcgacccggtcaccggcatcatcggtgcggcccactgcggccgtcgtggtctggagcgtggtgtgatcggcgccacggtagacctgatgaagagcaagggtgccgacccggcgaacatcgtcgccacactcggcccgcgcatctgcggcgactgctatgaagtgggcgacgagatcgccgatcagttcatcaagcgcttcccgctgaccaagacgaagacccgcttcggtggtgccggcattgacatcgccgaggcggcaatgatcgacctcgctttcgccggcgtacaccaggtggtcgattcgatgccgcgcgtgcacgccgccacccagtaccttgaggaagacccggaactcgccgaactgtgccgtacggacggcgaaggcccggccgagctcgcggagcgcatcgacaacatcagccacagcatgtgcacgctcgaaaacccactgtggtactcgcaccgccgcgccgcgctcgccaacaaaacacacgaaggccgcctccttgccctcatcgtgcgtgactaaacggagaatgcgggcacattccgtggagaagatgtgatgcagttcacggacggccagccctcaccctacggtggtgcctatgactgagagagatttcgatacccccgtcgagacgcctaccgtccagccggcccccgctcagggcgccaaaccggcacaaaccgtgccggtggtggccgtggtgctggccgccggcttcggtacgcgcttcgaccccgacaatcccaagcagcttgtctccgtgggcggcaagcccatcgtgtgctggagcattgatgcctttgaacattgcgatcgcgtcagcgacatcgtggtggtggtcaatcccaaggtgcgcggcgaagtggaaacgttggttggcgagatgggctacaccaaggtccgcgtcatcattgacggcggtgacgaacgtgtggacagtaccgccgccgcgctcgacatgctggctactgctggcattccggacgatgccaagattctgatccatgacgccgtccgtccgttcgtggaacagtccgccatcgacggttcgattgatgcgctcgaccagttcacggccgcgaccgtggcctacacctcaaccgacaccgtgctgttgaccgaggatctgggcgatttgaaagtggtcaagtcggtgccggaccgcccgaacaccttccgcgcgcagaccccgcaatccttccgcttcgcgacgattcgtcacgcttacgatctggctgccgccgacccggacttccatcccaccgacgacacgcgcgttgtggtcgattatctgcctgatgaacccgtcgccattgtctccggtgcggaaaccaacctgaagatcaccacgctggaggatattcccacagctgagcgtatcgccgaggagattctcggtcgtgatcccaaggaagaggcccgcgcccgcatgcacgccctgctggcccaagcggccggccagatgcatcgctagactggcattatgcgtgaactcaatgttgtgatctccggcttcgaccactatgacggcgtggaggtcaatcccgccgtcgaagtgcccaaggccatcgccgagcaggggttgggcgtctcctctgctccggacgatccgttggagcaggtcgccgtcaccgtccatgccgtcagcatcccggtgagcttcgccaaagcctggcccacgctgaaagagacgattgaggccaccaagcccaatatcgtcatcgccaccgggctcaagcacgcagcccgaggcgtgatgcttgaacgatgcgccaccaacctgatggacgcgatcaagccggacgcggacaacgtgaccccacgccgcgaacccatcgaccccaatggcccggccgcctattggacccgcctgccgttgcgctcgatcctgaatgatttcacggacgattcgattccggccaccctgagctcggacgcaggcacgttcgtatgtaattcgctgttctacaacttgctgaactggaccgccacccaggagcgggtgctgggcggattcgtcagcttcccgccggtcgtgccggcggattccagccagcatggtctgccactcgaccagcagatcgccgctggccgtgatgtggtgcgcgaagccgtgcgctactatctcaagccctccagctccggcatcctcatcgcctagcacgctgcgcgccacgccggaatagaacatggttcgcacgcattgtaacgattgcgcgtcactcaacgcccagcgctagtgcgatgcgctacagtgcttcaaggatgtgccaagagctttatgcgtgtgcgaaaggaataaacagcgatggtggatcgtttcccggtggtgctgcgaggatatgacaaggagaaggttgatgctgccttcgacgctactcaggagagtgtgaagcgtgcgcagcagacgttggccagcatgcgtgagcagattgcggcggatgacgaccgtattctgcaactgcaggcccagcttcaggaagagaagaacaagaagccggaaggcaacagcttcgcttccttgggagcgaacgcccagcagatgctcgcctccgccgaacagacgagtaccgaactgctagaacgcgccaagcaggacgcgtcctccatccgtaccacggctcaggcgcaggccgaaacactgatcaacaacgccaagctggatgcccagcatattgttgacgacgccaatgccaaggccgcctcgattctgacgaacgccaacaatcaggccgaatcagtgaccacctccgccaacgaggacgccgcacaactgcgctccgaaaccgccaagaccatcaccgaacagcgtcagaccgtcgagcttgagctcagcaacgcgcgcgaagagcacaccaagaagatggcttccgaacgctccacccaagagcgcgaaatcgccgatatgaaggcggaagctacccagcaggttgccgcaatgcgcaaaagcgccaatgaggagatcaccaagcttaagtccgattccaacgatcagattgaggcggcgctcgccgaggccaacaagaagctcgccgacgtgcgcgagcaagtgtccaagatgatgaccgaagcccagcgcaaggccagcgaaatcattgatgcggccaagaccaagggtcaggaaatcactgatgaggccgaggtcaagcgcaccagcacgatgagccaggtcaacgccgaagtcgagcagatccgtcacgacatcgccgctcagcaggatgaggccacgaagaaggtcaacgaactcctgcagcacctcgaagagcgtcgtgtggcggccaagcgggaagccgatgagttggtcggccaggccaagaacactcgcgaccaagccgattcatatgccgcgtccaagcgcgaggaggcggacatccaggccgccgcaatcgtgcataaggcgggcgaggaagccgatgcgcagatcgaggagcgtcgtgccgccgcccaaagcgagcttgacggtctgtccaagcgcatcgccgatctgcaggaacgcgagtccgtcatcacccagcgtgtttcggaactgcgttctatgttctcgcaggcgttctccggattcgctttcggtggtaatgcggcggcctctggtcagagtcaggaagccgctgccgtggcgtcattgccggtggtcgcgcccgtcccggaagtcaagcctgtacacaacgaggccgatgatcagccgggtgagttgagcggaaacgagtcggctgccgacgatcacaatgagacagatgcggcaccggctgattcggctgattcagctgcgcagaatgagcagtccgaatcgtctgagccgtccgagcaccagacacagggcgaaccggaggccccgactcaggagaatccagccgtatctgagcagaacggcgaatgacaggccttcgattagactactagcggtaagaattacggcacctgcgctttcgagccaggtgccgtattcgtttggatctgcgccacaagcgcaccatcacagaaggagtatgacatgagtgaattgacgcctctgaccggcgaagcattgaataccctgcgcggcgatttcgcacagagcggcaccaaccgtctggccatgaacgcggtgaccgccgccggcatcgacaaggtggctcgcaattatgaccgcgctcgtctgatgcagcgccgtttctccaccatcgttgacaatggcgaagccacccatcaggatcgctccggccgctgctggctgttcagctccctgaacgtggcccgtttcgtggccaagaagaacatgaacttgaaggagttcgagttctcccagaactacgcgatgtactacgacaagctggagcgcgtcaactacttccttaaggatgtggccgctctggtggctgccggagagccttccgactcccgcctgatgcagcacctgctcgccgacgtgatgggcgatggcggccagtggaccatggccatgaacgtgtacaagaagtacggcgctgtgcccaaggacctgttcccggagaccgaatcctccaagaacaccggtgaaatgaacacccagctgcgccacatgctgcacaccgccgtggcgcacatgtacgccgctgacggcgatgcctccaaggtcgaggcgattattgccgacgccactgctgccggccaccgtattctgaccatccacctgggcgagccgccggtctccttcgactgggaatggaccgacaaggatggcgaattccaccgcgacggcgagattacgccggttgagttctggaagaagtacgtgggtccggctggtcttgaggactacgtgtgcctggtggatgatccgcgcaccgagcacgccaagggcaagaagatcggcatcgagcacctcggcaatgtggctggcggcgacgccaccgagtacctcaacgtgccaaaccagttcatgaaggactgtgtcaagcagattctcgttgagcagggcatcccggtatggttcggtgccgactgccacccgttcatggaccgtgagaacggcgcttgggccaccgacctgttcgagtacggccgcgtgtacgacgtggacttcgatttggacaaggaagcccgcgtgcgcttcggtgactccgccatgaaccacgccatggctttcgccggcgttgacgtggccgacgacggcaccacccgccgctggcgagtggagaactcttggggcaccaagatcgccgacaagggctacttcaccatgtccgacgactggttcaccgaatacgtctacgaggtagccgtcccgaaggccctgttgccggaggaataccagaaggccctcgaagagccagccaccatgctccccgcatgggacccgatgggcgccttggcctgacttcgccagcctcccggaatcggcctgacggccgatgctgtgttttttcgcagcctgccggctgctagggtctctccctctgtcagcgcgaagccgctgacggggggagaggccgcggtcgcaggccgcacaacaacacagcatcgccgcaggcgagtccacgcaggcgagttcacccaaagtccataaccgccggcccaacaagcagtccccgtaacagactgctatagttgggcttttgcgtctatagcgccataccgacggtacgtatacaaggaaaggagtcgagcaatggcagcactacgtggtccggatagttccgaggatgaacgtcgtttgggggagcaggccgtctttcccgagaccgtcgatgtcaacattcgtcagcttgaccccattcccgcgccgcgtgccttcctcagggagcagccgctcaccgatgagatgagcgagctcgtgctccactcgcggcaggaaatccgcgatgtgctcaacggccgcgacgaccgactgctcgtcatcgtgggcccctgctcaatccacgacccgaaggccgcgcacgagtacgcagaaaagctggctgccgtcaagcgcgagctggaagaccgactcgtgatcgtgatgcgcgtgtacttcgagaagccacgcaccaccatcggctggaaaggcctcatcaacgaccccgatctggacggtcgcttcaatattcgtaagggcatgtggctggcccgcaaggtgctcaccgacgtgctgagcctcggcctgcccgccgccaccgaatggcttgaccccatcaccccgcagtacatctgcgacgcgatcagctggggtgccatcggcgcgcgtaacaccgaatcccaagtccaccgcgaactggccagtggcctgtccatgccggtgggcttcaagaactccaccgacggctccatcaaggccgccgccgattcctgcttcgcggccggcttcgagcatcacttcctgtccattaacttggacggtcgcgtgatttccgccgaaaccaaaggcaacccggattgccatctggttctgcgcggttccagccacggcccgaactacgatgccgaatccgtgcgtcaagctctggaagacctcaaggtttccaaagcgtccggcccgagccagcatggcctcgtcattgatgccgcccacggcaactgcggcaaagacgaaaaccgcgaagccgaagtcatcgaagagatcgctgagcgtctggcgcacggcgaacaaggcatcaccggcgtaatgatggaaagcttcttggtcggcggtcaccaaaagccggccccgctcgaccagttggtctacggtcagtccgtcaccgactcttgcgtgccgtgggaacgcaccaacgagctgctgcacaccctagccgacgccgtcaccgctcgcagctcggctaaatagctttgtctttgtaaaaatgctcactgagacccactcagtgagcattttttgccaataacggtggtcatgtcagtttgttcccgtgacaccttatccttgggaaagatactgatccaaggagagatgttatgcagcagcaggaggaagcagcacattcgctgcatccgttgcaagtcggtccgcagccgttgaacaccccggaagagcttcgcgccattcgtcaggcgatgggggaggggaagaacccgctcgttgccactgatgtgccgcgctgggaagatcaggtgggtgtcagtcgcatcatcaaccgccgcgtattggagctggagccgctgcccacgcccgcgcaagtgctcgctgaactcccgctgaccgatcaggctcaggaaatcgtcgcctactcgcgtgatgagattcgcgcgtgcctgtacggccaagacgacaggttgttggccatcgtcggcccctgttcggttcatgacccgaaggccgcgctggactacgcgcaccgattggccaagctgaaggacgagctcggtgagcagctgctcatcgtcatgcgcgtgtacttcgagaagccgcgcaccaccatcggctggaagggcctgatcaacgacccggatattgatggcagccacaatattcgcaaaggcctgttgcttgctcgcaaaaccttgcttggtgtgctgaaggaaggattggcggccgccacggaatttctggagcccaccagcccgcagtttatctcggacgcggtgagttggggcgccattggtgcgcgcaacacggaaagccagatccaccgccaattggccagcgggctttccatgccggtcggcttcaagaacgccactgacggctcggtgaaggcagcggtcaacggttgcttcgccgctgctcagcagcacacgttcttcggcattgaccatctggggcgtgcctgcgcagtcgagacccttggcaacccggactgccatgtggtgttgcgcggctcgattcacggcccgaactacgatgccgagtccgtggccaaagccatggaagacgtacgcgccgaaatgcccgccgaatccgcagcctcgcacggtctgattgttgattgctcgcacggtaactccggcaaggacgagcatcgtcaggccgaagtcgtgcgcaatattgccagcagaattgcagctggcgaacagggtattaccggcatcatgatggaaagctttattgaagggggcaatcagaaggccgcgccgcttgatcagctggtctatggcaagtcgattaccgacaagtgcatcagctgggaagaaaccgaggccttgctgcgcgagcttgcggaagccgtggccacgcggcgttggcactgagttgcgtcatcggctctctcggggggagcaatgtgacgaaacgtctgactacccctcagcccgccattcggcggccagctcccctgacaagggagtcgaaagcgttgtgaaaggaacttacgtatgggtatgaaaactgtagctattattggcgcattggatgaagaagtggcactgatcgccaaatcgctcacgcatgtgacgcacaccgccaagggcagccttgacatcgtgtccggcacggtcgactccttcggttctgacgtcatcaaggttgccgcaacggtaggcggcatgggactggtcaatgcggccgccaccacgcagctgctgattgacgagttcgccccggacgccgtgattttcagcggcatcgccggcaacctcaacacccacctgcacatcaacgacgtggtgctcggcggcaccctgcgctacctcgacactgacatgcggctcgtaggccagtggaagcccggcactgcggacgctccggtggaggaattccactctgatgaccgtctgctggaagttgccgacgaggcgcttgccaatgcgggcattacccacatcaccggcatcatcgcctctggcaactacttcgtggacacgccccaaaaggtcgaggaggtcatccgactcaccggggctgacgccgtggagatggaaggcgccgccgtggcacaggtcgccgcccgcaatgacgtgccggcactggtgattcgtgccctttccgacaacgccgacaccgattacgaggtattcaaggagttcgacatctccgagtacgccgataccgccgcccgtctggctgtcgacatcgtcaagcgcctgtagtcggcgggctggcccatctcaccatccacgttttgggtatgatgaccacaatatgagcgttttcaaactattgcttataacctgagccatactcggtgttcggcacagcgatgtgcggggttcatcgctggggccacaagccgtaccagttcttctcccgcatgccggtcgctgtgctcaattcgttaagcgacgacaacaccgtcgcgaagcattgaatacacaatgcgcacgctgcactggggtttatctgcagcatgaggagagaaaaaatgactgcaagcgcaaccgcggctgtgaccaaaccggtgaagaaggattcggttcctgagatcatcgccgcttccatggtcggtacggccatcgaattctacgataactactgctattccattgccgctgctagctacttcggcatgatcttcttcacggacgtcgccaagtccaaccagaccctcgccacgctgatggccttcgtgaccttcgccgtttcgttcctcgcccgtccgttcggctccatgctgttcggccacttcggtgacaagctcggccgtaagaagacgctggttatcgccctgatgaccatgggtatcgccaccttcctggtcggctgcctgcccggttatgagcagattggcgcatggtccgtcgtgattctgtgcatctgccgtgcctgccagggcgtgggcctcgccggcgaatggtccggtgccgcgctggtcgccactgaaaacgctccggccgacaagcgcgccctgtacggttccttcccgaaccttggcgccccgattggcttcttctgcgcttacggcctgaacctgctactcgaatccaacctgagcaaggaacagatgattgccttcggctggcgtatcccgttcctgtgctccgccgtgctggtgatcattggcctgtacgtgcgtgcccgcatgtctgagaccccagtgttccagaaggccactgaagagaagcgcacctccaagcacccgctgcgcgacctgctgccgtactggaaggaagtcgtgctcggcaccgtagccatgggtatcacctataccctgttctacgtactcggcacttggtcgctggcctacggcgtcaagggcttgggcttccagcagggcgagtacctgctcatgcagatgtgctccgtggtgttcttcgccatcttcatcgtggtctcctgcgtgtacgccgacaaggtgggccgcaagaaggtcatgattgccgtgaccgccgccgccttggtgttcagcttcttcgtgccgatgctgctcgtgcactccgccgcccatatcatgatcttcctgtgcgtcggcttcatgatcatgggtggtttgttcggcccctgcggcgcctacctgcctgagctgttcccggtgcacgtgcgttactccggcgccggcctgagctacaacctcgccgccatcctcggtggcgcattcgctccgaccatcgcccaggccctggtcgcctccaagttcggcgttgccggtgtgggctggtacatggccatcatggccgccctcgctctactcgctctgttcctgattaaggaaagcaaggacaaggactacgagctgtaaatagagctccccatattatgctcccgctggcgggagctgtccacgaaagcggactgagggtggccaatgggatttcggttctttgaccaccctcagtctcactgcgttcgacagctcccgccagcgggagcattttgttatgtcgtcccaccaaaaatgaacaatagacgaacttacgtagtttgggcatctcactacgccttgcacgttttactctggaaatcatggatatctggcagatcgtcgtgattgtggtgctcgccgcgctgatactggcgtgggttgccgtcatcgcctacaacaaaggccgcgtttcaggtcggctcgccgccgaacaggacctgtccggcgacgaggatacgcgttctctattcggtgatgatgcgcccgtgcgccccaccgagcgtcgcctgattgaagtcctgcccgaagccctgattgttaccgaccgcaacggcttggtccaatattcaagccccggctcagtgccattcggcctggtctccggcgaccgactcaactcgcgcgaagtcgaggacatcctcactcaggccgccgccgacggtggcgtgcgtgagcgtgaggttcagctgccggtcaatcgcaattcctatccgtcctctaatggccgaggactggaggccggccagtcacgcccgtccaacatgctgtatttgcgtgtgcgcattggcgatatcggcgatgacctgtacgccatcttcatcaacgacatgtccgagcagcgccgtttcgaggccgttcgccgtgactttgtgaccaacgtttcgcacgaactcaagactccggccggtgccatctcgctactggccgaaaccgtgaccgacgccgccgatgatccggacgccgtacggtatttttccggccgtatctccaaggaatccgcgcgcctgaccgaactggtacatcatcttatcgacttgcagaaagcccaaagcccgcaaagtgtgattgatgcgcggcgcatttccgcgctggatgtggcacgcgctgccatcgccgccaatcagacccaagccgactcccgccatgtggatattcgactgagtgtcaacggacagtcagtgcccacgaaggtcgaggagctggccgatggcgaaggttccttggaagaatcaggcagccctgccacgagcggtccgatgatcaaggccgacaaagaggccatgcaaaccgccgtcaagaacctcgtagagaacgccatccattactcgcccgaacacaccactgtggcggtcggcgtgggggagcgcgatggcaaagtcaccattcgcgtggtcgatcagggcatcggcatccccgccaaatcactggaccgcattttcgagcggttctaccgggtcgacccggcccgttcgcgcgagaccggcggttcgggactcggcttggccatcaccaagcactgcgtgcaggagaacggcggtcggatttcggtctggtcgcgtacgggggaggggtcgacgttcaccatcgagctgccggccgccccggatgaggatgacgacgaggcccggccggacgagtcgacacaagcgtagggccttggttggtgcccgatatggtgccattccattgccgcacaatcacacagtgggcgaggtgcgcacaccgtgcgtagcacaattacgcaattacgtactttcaggaaacagcaggctaacggagaacaaatggttacgatagtatcggaaaactttgcgcctatgcgcacgggaacatacccaagaaaggctactatggcacgcattcttatcgtcgaagacgaggaatcctatcgcgagccgttggtataccagctcacacgcgaggggtacgacgtgtccgccgccgccactggcgaggaaggtctggaactgttcaccaagggcggcatcgatttggtgctgcttgacttgatgctgccgggcattgacggcactgcactgtgccgtcgcattcgtgagcagagccgtgtgccgattattatgctcaccgccaagagcgccgaaatcgataaggtcgttggccttgagattggtgcggacgattatgtgaccaagccgtactctttccgtgagctgctggcccgcatccgtgccgtgatgcgtcgcaatcaggccacggcccaggcttccggcactgtggatgacgacattccgctggtgtgcggcgatatcgccatgcaggtaggccagcatcaggtcaccgtacgcggcgaaaccgtgttcttcccgctcaaggaattcgaactgctcgaatacctgatgcagaacaagggccgtgtgatgacgcgtcaccagctgatcgaccgcatctggggttcggattatgtgggcgacaccaagacgctcgacgtgcatgtcaagcgcgtgcgctccaagatcgaggaagatccggcgcaccccaagtatctgactaccgtgcgcggtctcggatacaagatcgatactcccgcggagtaaatggaaggcggccttcgggccgccttttttgttgtggattgtgggctcgccgcaggcgagtccactccaaaaactacgtagcctcaacgtagcccacaaacatccaagtgttcatcttctgtttactgatttcggttttgggcccttgaaaccaccaatacgcttgtagttgtcatgaattgaccgggcagcgctgagccgcccgcgaatagttgatagagggattaagtaataatcatgcagaagaacatcctcattcgctccattgccgctctgtccggcattgtgatgctcgcttccgtggccgcctgcggcgataacaccgccaccacgaccgacaacagctcctcctccgattccacttccaagtccaccccggtctccggcaacttctcgggcgccggcgcctcctctcagcaggccgccgttgaagcctggatcgccggcttccagggcaccaaccctgaagccaagatcgcctacaacccgtccggttccggcgctggcgtgcagaccttcctgaccggtgccaccgcttgggccggctccgataaggcccttgccgatgacgaagttgagcagtccaagtccgtgtgcactgaaggcaccgccttcgatgtcccggtctacatctccccgatcgccgtggtcttcaacctcaagggcgtttccgatgccggcaagcacatcaacatggacgctgccaccatcgccaagatcttcgacggcaagatcaccaagtggaacgatccggccatcgccgatcagaacaaggacctgaagctgcccgacaccgccatcaccgtcgtgcaccgctccgataagtccggcaccacccagaacttcgtctcctacttcaaggacgtcacccctgacaactggacctacgacctctctgagaactggccgaacgaggttggccagggcgccaagggcacttccggcgtgatctccaccgtcaagcaggccgacggcaccatcggctacgctgacttctcccaggtcggcgacctgggcaccgtggccgtcaaggtcggcgacaagtacaacgagatttccgccgaggccggctccaaggtcatcgaggactccaagcaggacgacaccgttaagggcgacaaccgcatcgtcatcaagatcaaccacgccaccgaggccgagggtgcctacccgatcgtcttggtctcctacgacatcgtctgcccggcctacaaggacaccaagcaggctgagttcgccaaggcttggctgacctacgtgacctccgacgagggccagaaggccgctcaggatgccgccggcaccgctccgctgccctcctccctgaagtctaagatcaccaagtccatcgaggccatcaagaccaagtgatgacgtcggcccgcaagggtcgtgtggactggacctgacaactgaacgatagactgtagtagtaagagcagtcgccgccaactttaagccgcagtcgtaaaccatacggctgcggcttaaagcgggtcaggacccgaacggtttggcaaagtcacagacgaaaaccgcaccacttgaatacttgataaccaccctatataaggagaatccgtgagttcgcaagacaaaacggctgtgcagccagttggaggcaagaccgccgacaaggtgtttcgcggtgtggcatacgcctgcggcatcctgatcctggttgtacttgccgctgtgttcctgttcctgtttttccgcgcctggccactcatcggtggcgatcaggccgccaacagcgacaccgtgtccagctttaccggcggcaaggccagcagcttctggggctacgtgctcccgctgttgttcggtactgtgctcgtgtctttgctggcactgctgattgccttcttcgtgtccatcggcattgcgctgttcatttcgcactatgcacctaagaagctcgccaccgcgctgagctatgtggtcgatctgctggctgccatcccgtccgttatctacggtttgtggggcggcctgattctggtgccggccatctacccgttctggaactgggttgccaaccacttgggcttcattccactgttcgagggcccggccgccaacccgtcgcgcaccgtcgccaccgtggctgtggtgctcgccgttatgattttgccgattatcacctccatgtcccgcgatatcttcatgcagaccccgcgcctgcacgaagaggccgcgctggcgctcggcgccaccaagtgggagatgattcgtctggccgtgctgcctttcggcaagtccggtattgtgtccgcctccatgctggctctcggccgcgcgcttggtgagacgatggccgtgttgatgatcctgtccccgggcctcaactactccatcaagctgctgcaggcctcgcagaaccagaccatcgccgcgaatattgccgcacagtaccctgaagccaacgatctgggcgtctccacgctgattggaaccggtctgattctgttcctgatcacgttcgtggtcaacttcatcgcccgtaagcttaccgagaaagcgactgcgtgatgactgctgctgagaacactgaaaagactccgatggacggcacgcccgaaatcgacttcgatcgtttccgcccgacccgttccgccatccagcgccgtaatatcatggaccgcttcatgtgggccctgatcgcggtggcgtttgtgatcgcctgcatcccgctgatctccctgctgtggaccactatcgtcaacggcatcaagcgcctgaacctgaacttcctgagctacaacatgaccggtgtggtcggtggtagccagaccccgtccggtggttacggcggtgtgctgcacgccatcatcggtactctcgaaatcaccgctggcgctatggttatctccattccgatcggtttgatgtgcgccgtgtacctggtcgaatactcgaaccgcggcaagctcgccaccacgatctccctgctcgtcgacgtgatgagcggcatcccgtccatcgtggccggcctgttcgccttctcgatgttcacgattctgctgggccccggtaccatcaacggtttcgaaggctccgtggctctctccctgctgatgctgcccaccgtggtcaagtccagcgaggaaatgctgaagatcgtgccgaacgatttgcgtgaggcctccttggctctgggcgttaccaagcagcgcacgattaccaagatcgtgctgcgcaccgctctgccgggcatcgtctccggtgccattctggccatcgcccgcgtgattggtgagaccgcaccgttgctgatgaccgccggctacatctccagcaccaacgtgaacctgttctccggccagatgaccaccctgccggtgttcgtctaccaggagtactcgaagctcagcgcgaactgcccgcccaacgccgacgccacctgcgtgaccacgattccgatggaacgtgcgtgggctgcggctctcgtgctgatcgtcatcgtgctgctgctgaacctcattggccgaatcgtggcgaaggtcttcgccgtcaagaccgagcgctaagccagtcgctaagcctaagccttaagaacacaaggaaatataaggaaacatcatgggacaacgtattgacgtcaaccacgagaacatctattacggcgactttctggccgtggaagatgtgaacatcaacatcgagccgaacaaggtcaccgccttcatcggcccgtccggctgcggcaagtccaccgtgctgcgcaccttggaccgtatgcacgagatcatccccggcgctcacgtcgagggcgaggtgctgctcgaaggcaagaacctgtatgacaaggacgtggatccggtggccgtgcgccgcgacgtcggcatggtcttccagcgcccgaacccgttcccgaccatgtccatccgtgagaacgtgctggccggtgtgcgcctgaacaaccaccacctggccaagtccgacgccgacgatctggtcgagtgggctctgcgcggtgccaacctctgggaagaggtcaaggaccgtcttgacaaccctggcatcggcttgtccggtggccagcagcagcgtctgtgcatcgcccgcgccgtggccgtccacccgcaggtgctgctcatggatgagccctgctccgccttggacccgatttcgaccttggctgtcgaggatctgatcaacgagctcaagagcgactacaccatcgtgatcgtgacccacaacatgcagcaggccgcccgtatcgccgactacaccgccttcttcaacctgaaggcagtgggccagcccggtcacctcgagtacttcgcggacaccatcacgatgttcaacaacccgcaaaacgaagaagccgagcgctacatctccggtcgcttcggctgatcgtttcctgcgcgcggcgtaatgatttgtgcgtaggagaaacggcaaagcccgccgcaaggcgggctttcgcatattcaacgcgagtattgccgagtattatcgttctcgcaacggagcgagctggaatactttgtcggactgggcggcgacttcccgcttcggtcgatcgacgggagaacggcgggtaaagcggtacaagacaagtccgcacgatgaatactctgtgatgaatcttctgtttacggtgcgagtgtggaagaatggtcacagcaaggtccagcaaaggagcataggtgagtactggtctgatcgtcggcattgtcgttgtcgttattatcgttgtcttgattggttggggcgtcagcgcctataacaacctggtgacgctgaagaaccgtgtgaagaacggttgggcgcaaatcgacgtgcagttgaagcagcgcgccgacctcatcccgaac

SEQ ID NO: 3940 - DNA, 28875 bp, Unknown
  R22_24m  MAG No. k141_23585
cggcacgaacacatcgaacatggtgatatgactggcggcggtgatgaacggtccggtttccggcacctgttccaggccccaggccttggtcttggagctggcgctggaggggccaaggttccagcagtatttcgggaagaatcggatggtttaggggaagcagccaagtacgctcgcgcgctcctctcagtcatctacgcctgacagctcccctcaaagaggggagccaaaaccaatcagtacatgagggtggctaggcgacggcggacgcgagccagacgcgggtcggtgggttcggggatggcgaagtattcgagcagacgcttgcgaacctgctcgatatcggccttgtgcccggcggccaaaaagtccagcaaacggtcgaaagcgtcttgaatctggccaccgatcatgtcgatatcagccacagccaactgcgcttccacgtcgtccggcgctgcggcggcagcggcacgcacgtcacgtacatcagcggacccggagcgggccagcaacagcgccttcgcacgttcgcgggcggccagtgcatcggacgggtcggattcgagcacgcgctcgtattcggcggcggcaccggcgtaatcgccctcctcggccaaacgatgggcttcggcatgctccggcggcacctgctcagcacccacgccggcaccggtggcaccagcgctcttggcggcatcggaatcaggatcacccgagtacggcgcggtaccgttcacaccagactgcgcggcggcctgaatgatcttcggaatcacctcgtcggtaagttgcttgagctcgtcgtcacccggaaggccctgcaacagtggcatcggacggccggcaatcaacgcgaacagtgcgggcgcgccctgcacctgcaacgcttgggcaatcgaaggattggacgagatatcgatacgggagagctgaatctggccgttcagggcgttcaccgcgtcgcccaacgcacgggccatcgggaacaggcggtcatcggtcggtatccacaggagcagcaggatcgggaaggtcgcagaagtctgcaccattgcctggaaggtgttttcggtggtgtcgatcacgtacccaccagcggcaggagcgccacccgcctggccgggctcggccttgacctgatgcttcagcgcctccaaatcgacggcgcccgccaatgagactcccggattgaactgctgctctgccataatgcctcccgattccacgcgattcgcgtacaacaacaatcacatttgctgacattgattgtaatgccgattcccaccacgtagggattcttccactacgcggtgaaattcccaccacgtagcaaaacgcccaccacgatgtgactcaaaacggcaccattgtgcgaaaggtaaaacttaccgacatcgtggtggatgaatcatatcgtggtggggcgttaaccgcacggtgggcggcggcaacaactacagcgcttcgacctttaccggctgacggtcggcgcccacggcggtgatttgctcaccggagcttgccaacggaatgtacaaggccaccacgttcacatacgtgaccttcatggtgctggtgtacttgtcgctattgaacagcgccttctcgtcgtcggaagccggctgcgattcgcggccatcccccgccttgcgagtccattcgccgttaatacggccaaccaccaaatcaccggcaccgtctgcagcacgcatcacccacatctgttcaggcacaacggtgaatttctgctcctgcgtaccgttgttgcgttgcataccttcctgcaccttggccgtggtattggccagttcctggcgcagcaaatcgtctgcgaacttggaagcgtattggctcttggagccgttctgcagcacatcggcgtattgggtcaaggcatcggcgggagtggccaccagcttctcatcctttgcagtgcccatctgcgagccaatagtcggaatctcgaacttcggcagcttggccccctcaaacagtcgagccatggccatcaacttgtaattctgctgggcggattcctgatcgaagaccagcaaacgcttggactgctgatcttcggtggtggtcgtgatggtgaacaccgagcgaggccatccgtcgtccatgggaatcaccgtctgggcgatgtccttgggaatggtcgcgtatttggacataccgccgccgcgctggttgatcgtggtctggctgatgcgaatgtccagctggggcccgcccataacggccgcatatccatcgggattcttggcctgatcggcttcatcgatcgtcttgagaatcttcaggcgaatcttcttctcctgtgcctcggtcaaatccggcgcaaccttggtggaggtatcagcagccggcgtcggcagccggccttcacaggcggtcaacggcacgaccaacgccacgcaggcgagggcggccacacacagtttgttccatcgcttgttcatcagctttcctcctgtccgtcatcggccgagtcgtctccggtattgacctcttgggccaagcgggagaagtaggcctgcagttcgtcaggggtgattaccgaagtcgattcgttatcgccggcgctgaagccggtctcagcgccgctctcggcaccagtctgctggtcggcgaccaggttacgtgaacttgggtcgatgataaccggtgtttcggtggcttcagattgcgaggacgcacggcccgaacgccgatttgtggcgtggcggcgacgattacgtcgacttgcaccatccggcttcccggacactgcgatgctggcgggtgcctcttcctcaattacggcgcttgccgtgccttccaccatgcgcttgcggcgcttatgcggcggcatggcgaacacggaggcgcacaatacggccagcacggccagcaatccaccggacagatagaacggcatcgcaaagtccggcacttcggagcgcacccagtgcagctgcaccttggcgttggtggcattttcacccaaatccacaatggccaccgtcgaggcgccggtcttcttgctctccagcgaaacggacccggtgccgcatttcacggcagtccacatatcggaatccttgaacgccaccgcgtcatcggcactggcaggcgctccctgactcgtgctgcttcccttctgggtgctcagctcgctccatgacgccaatccggtgatacgggtataggacttctcggacgcgacccatccggcaacatccttggacggacccaacgccacgcacgcctcgtcctgagaggatcccgagtccacggttatcgtggcgttctgatccaacaaggtcagcacattcggatcagtgacggcataccgggagccgctcatggttgcggaagcggtgatttcagtggagggcttccatatcgtggtattcatgtaccccaacaccacagccgccacggccaatagaccgaagataggcgtcaccactccacgcatgatcttggcatgacgggatggacgcttggcgcccttatccggtcttgtagtctgttcttcagcactcataacttaaccattctacaatcttcacctgtttattacctaggagcgcagaaaatcaaggttcaccagtagggtggtgtgtcatgcgtaagtctgttaaatctatgttatcccctctcggcaaggccgttgctcttgcctgctcgctggcgatgtgcgtatcgctggctgcctgctccagttcgagctcggactcgaaatcctcttctgactcttctgacaagaaggggcaaattgccggcgtgaccgccaagggcaagctcggcgagaagccgaccatctcctttaatacgccgatgaccgtgtccgacggctcctatgtggtgctgcaaaagggcgatggcgacgtaatcgaggagggcgaccgcgtctgcgcccaaggcatcgcgctcaacgttaaagacggcaccgagctcatggacacctggaccaagaacacgccggattgctcgctgaaggtggattccaagaccctctcctcgacctactacaaccagatcaagggtgccaagatcaacaccacgatcggctttggcgtcaacgctcaggattcgtccggatactcttacattttggcgatgacgtttgtatccaagtccaaggacctgaagaaggccactggcgaggaagtcaaggatgtgccggccaatctgccgaaggtgacgcgagccaagaatggcaagccgtccattgacatgaacggtcagggttcggttgattcgctgatctcgcagacgctgatcaagggtaacggcgccaagctgaccgacaagaacaccgtggtggtcaagtacaccggttggcttacggatggcaagcagttcgattcgtcctgggatcgcgattccacaatcgacgccgatctgttcagcgattccagcggccagcatcaggttatcgagggctggcagaagggtctggtcggccagaccgtcggctctcaggttctgctggtgattccgccggatcaggcctatggagataaggagcaaggttcgattcccgccaactccacgttggtcttcgtaatcgatattctcgccgcgtactaaacaatctcgatggctctccccaagaggggagctggcagcgaaactgactgaggggaggcctcacggaatataccgtgaggcctcccctcagtctctctatgtacgttcgaaaactccccttcaagagggaagccaagaacaatcagaacagcctgagactgtcgtcctcggtgcctttcatatcgtcgtaatcgaggatgaggcaggtgaagccgcggtccttggccaagacctgggcttgcggcgtgatggtttgtgcggcgaagatgccatgcaccggggccagcagcggatcgcgattgagcagttcgcagtagcgagtcaactgctcgacgccatcaatgccgccgtgacgtttgatttccacagccacatgctcgccctcggcattcacggccatgatatccaccggaccaatggcggtagggtattcgcgacgcaccagcttggctcccttgccgatacgctcgatctgctcggccagatagcgttgcagatggtcttccacgccatccttgatgagacccggatcttcgcccagatcataggtttggtcggaatagatgtgttgcagcgtcacttcaagaatgtcagagcccttgtcggcgctgacgcgtagcaccttttccggcccaccagcggcgacactttccggggaatgcgtcgcggaatcaccatccacagccccaccagcgacactttcccgggaatgttgcgcggatttggcggctgggtcgatctcacgaatcgtgcagggcgcggtcatccagttcagcggcttgtaggagcccaattcggagaaaatcaacaggctggaatcagccttgatcagcaatacacgcttggccaggggcagtgaggcgttgaggcggcccgaatactcggccgaacagtcggcaacaataactcgcataggccaccactgtagcgcaacacatggcatacatagcaaaaggggctctctggaaaaccagagagccccttgaggagttggttcagatcactcggcggtgccggagtactggacgtcgtggccgcgctcgaccgccacggtgagtttgttcgagtcgaaggagatgaatccgtcggtcacctcgaacatgtggcgatcgccatcgggctcaaccacggtgagcgtaccctgcttgatcaccgtgagcacaggctcatggtcgggcaggatgcccatgccgccctcagaggcgggaatggtcacgctcgtcgcctcgccgtgccacacagggtggtcagcggcgacgatgttgaccttcatcgtggttttttccgcagccatcacgcacccagttccttctgcatgttgtgccacttctcttcgagatcatcgatgccgccgataccggagaacgcctgctccgggacgtcgtcgtacacgccgtcgcagatgcgggtgaaggcttcgatggtctcgtcggccggcacgtaggagccggggcgaccggtgaacttctcggcaacgtagaagttctggccgaggaactgctcgatcttacgagcgcggttcacggtggtcttgtcctcttcgccgagctcgtcgataccgatcaaggcgatgatgtcctgcagctccttgttacgctgcagaatcgccttgacgcggttggcgcagtcgtagtgagcctggcccacgtaacgcggatcgaggattcgcgaggtggagctcagcgggtccacagccgggtagatacccttggaggcaatgtcacgagacagctcggtggttgcatccaagtgggcgaaggtcgtggccggggccgggtcggtgtaatcatcggccggcacgtagatggcctgcagcgaggtgatcgagtgaccacgggtcgaggtgatgcgctcctggagggaacccatctcatcggccaggttcggctggtaacccacggcggaaggcatacgacccagcagggtggacacctcggaaccggcctgggtgaagcggaagatgttgtcgatgaacagcagcacgtcctggttctgcacgtcacggaagtactctgccatggtcagtgcggtcagcgggacacgcagacgggtacccggctgctcatccatctggccgaagaccagtgcggtcttctcaagcacgccggcctcggccatttcgccgatcagatcgttaccctcacgggtacgctcgccgacgcccgcgaacacggacacgccaccgtggttctgagccacgcgctgaatcatttcctgaatcagcacggtcttgcccacacctgcaccaccgaacagaccgatcttgccgccctgcacgtacggggtcagcaggtcgatgaccttgatgcccgtttcgaacatctgggtcttggactccagctgatcgaaggccggcgggttgcggtggataggccaacgctcggagacggtgatggtctcatccggcttcttgttgaggatgttaccggacacgtcgaagacgtggcccttggtcacgtcgccgaccggcacggagatcggggcgccggtgtcggagacggaggcaccacggaccaggccgtcggtgggcttcagagcgacgcaacggaccgtggaatcaccgaggtgctgttcgacctcgagggtgatctcggtctccttcgcctcgccttcttccttggcgccggtgttgacgatcgttactttcagggcgttgtagatgtcgggcagatgacccaccgggaattcaacgtcgataaccgagccctggacgcgggtgacgcgaccgttggtaggctcggccgcagtggtctggttgtcagccatatgcgttcctactcttccttcttggtcagcgcgtcagcgctgccgatgatttcggtaagttcctgggtgatcgaggcctggcgggaagcgttgagcttgcgcgtaaggtcgtcgatcaggtttcgtgcgttgtcggttgccgtgtgcatggcgttctggcggcttgcggtttccgacgcggccgcggtcagcaggcactcgtggatgcgggactgaatgtacttcggcagaatcgcgtccagtaccttttcgaggctgggctcgaaagtgtacagcggagcgacatccgcagtagccggtgcctcttcatcaggatcgggcaccttggtctcgtttttcacgatttcgaccggcagcatgcgcagcacgcgcaccttttgcaccaccatgttgatgaactcggtgtagacgatgtagagttcggaaactccacctttctcagccggcttcatgtaggcgtccatcaaagtgttggagatcgtttcagcaatttccacgccgggctggtcggtgtcgccttcccacgtcgccgcgatgtcacgattacggtacttgtagtacgtcgaaccgcgacgcccgtacacgaacagctccggctgcttgcctgccgcatcgaggcgggacagcagcgactccgtttcacggataatcgaagaggtgtacgggccggccataccacgatccgaggtgagggcgagaacagccacgcgcgggttcttctcgtccttcaccgcgatcggatgcgtgatatgggtgtgggccaccaacgcttgcacggcatcgaaaatcgcatcggtgtacggcttcgcgttcagggccacatcacgggccttggcgatatgcgaagacgcgatcatctcctgagcgttgaagatcttcgccaacgactcggtggagtggatgcgtgatttcaatgcgagttgcgagcccatggcttacttttctcccgccacgatcttttcctgatcaaccggcgcggccttgtcaacgtccggcttcttctcgaccagcggcttgccggcggaagagacgaacgtcgaacggaactcgtccacggccttatcgagggcagcctcggtgtcggcggtgaattcctcggtctcgcgaatggtcttgaggatatcggtgttgtggtcgatgtagtccagcagtccctgctcgaacggaaggacgtccttcaggtcgaggtcgtcgagcttgccgtgggtgccggtccatacggacacgacttcctgttccggcgagtacgggtggaactgcggctgcttcaacagctcggtcaggtgggcaccacgggtcagctgggccttggaagccgcatccagatcggaggcgaacatggcgaaggattccagcgaacggtactgtgccagggagatcttcagcgtaccggagaccttcttcagagccttggtctgtgcggcgccaccgactcgagagacggagatgccgacgtccacggcggggcgctggttggcgttgaacagatcggactgcaggaagatctggccgtcagtgatggagatcacgttggtcgggatgtaggcggacacatcgttcgccttggtctcaacgatcggcagacccgtcatcgaaccgccgcccaggtcatcggagaccttggcgcaacgttcgagcaggcgggagtgcaggtagaacacatcacccgggtaggcttcacgccccggcgggcggcgcagcagcagggaaatcgaacgataggcctctgcctgcttggacaagtcatcgaagacgatgagcacatgcttgccgttgtacatccagtgctggccgatggccgagccggtgtacggggcgatgtacttgaagccagcggaatcggctgccggggaggccacgatggtggtgtactccatggcgccggcgtcttccaggctctgcttcaccgaggcgatggtggagcccttctggccgatggccacgtagatgcagcggacctgcttcttcgggtcgccggattcccagttggccttctggttgatgatggtatcgatcgcgatggcggtcttaccggtctggcggtcgccgatgatgagctgacgctggccgcggccgatcggggtcatcgcgtcgatggccttgaggccggtggacagcggctcgtcgaccgggtggcggtgcatcacgtcgggggcctgggcttcgaggatacgacgaccctcaatgccctggatctcgccgaggccgtcgatcggcttgcccagcgggtccacgacacggccgagatagccgtcgccgacgggcacggagagcacttcgccggtgcgtcgcacttcctggccttcctcaattcctgcgaaatcgccgaggaccaccacgccgatctcacgggcgtcaaggttgaacgccaggccgagcgtgccgtcttcgaacgtcagcagctcattggccatgcaaccaggcaatcccgtcacgtgcgcaatgccgtcaccggccgtggcgacatagcccacttcctgggtgggggtgtcgctcggcttgtacgacgacacgaagtcgtcgagggccttgcgaatcgaggcgggatcgatggtcagttctgccatgatcactccttctattggttattgttcagtcaagtctttgcttgtgtgtggtgttggacggattggctcggccggtcaggccggagtcgcctccgtctgcaccttgcgatgcaggttctgcagctgtgcgaccacggtgttgtccgtgacttcgtcgcccacctgaatgcgcatgccacccagtacggtcggatcgaccaccgagttgatgtgcacctggcggcccaccttggcggagtagacctcgaccagtcgctcaatctgctccttcttcagcggggtggcggtggtcacggtgaccatcgactcgcccatgtggcgggagaacttgttgatcagccactggatggtctccaagtagcggcggcggcgcaggttgcaggtggcgtgttcggcgagcctcatggtgaccttgttcagggtcttgccggagaacacctcgcggaacagcttcacacgggcctcgctggtggcctggcagtcgtacagcttggagcggacgaccggcaggttcagcagtgcggaatgcagctcggacagctcgatggatacctgcagcgtggcgtcggtggcgtcagcgtagtacatcatggcgtccacgccgaagtcctccaccgcgttggcgatgtcgcgcgcacggctccaacggcgggagaccaagtcggtcatgatctccatggtcataggatgcgcgttgtcaccgagcagtcccttcaggacggccaccttgtcggcgaccgggcgggacgggtcggtcagtgcgcgttccagctgaatgctgtcatcgagcaccttggtgatcgtgaacagttcgttgccgatccgccacgcgtcctcacgggtgtcgcgcagtttcggggccagcgaatcacgcgactcgcggtctgcaatacgtgatgcctctcctcgcatggtcacctccctttctggttacggatggtcacggtcacttcttggcgcccaggtcgtcgatcatcgaatcgatcatcgaggactgcacgtcgctgtcttccagcttggcaccgaggatcttgccggccaaggcggtggcaagtgcgccgacctcgcccttgagcgagacgatggcctgctgctgctgggattcgatcgagcgctgtgcggatgcggtgatctgggccgcatcggactcggcgcgggaacgagcgtcggcgatgatgtgggacgcttccgcacgggcgtcgtcgcgaatcttggcggcgtccacacgggcggtgctcagctgggcctcatacttggccttggcctcgtcggcgtccttcttagcctgctccgccttggcgatgttgccctgaatcttggcggcgcgctcgtcgaagatcgcattgaacttcggcatgaagaacttgtagaagaacaccgcaacgatgacaagaatgatcagggaccacacaatgtcataggtctcgggaatgaacagatcaattccgccttctgcgagcgtcattatgaagtcctcctttcactggtggattcgttttgccttctgtattcgactgagaaaacgttcgatcagtggaacatcagggcggtaacgaagccgatcagtgccagcacctcgatcagagccaggccgatgaacatgatggtctgaatcttgccggacatctcaggctgacgagcggtggattccatggccttgccgaagaggatgcccagaccgatgccagggccaaccgcaccgagaccgtaaccgatgacggacaggttgccggcgaccgctgcgagggtgatgatatccattgtgtttcctttctaacgtacttggcgacgttataaatcttatttcgttcggtcctgcctacctaggcgaggccgggttccgaaagagggggttgaacctcactcctccgggaagcttaggttgatgtacacggtggaaagaatggcgaagacgtaagcctgcaggaaggcgacgaacgcctcgaagcacgtcatggcaagaccgctgacgaaccacatcgcgccgactgggatgccttgcagcttgttggctgcatcgacgatccagtactgtgcgaatgccaggcaggtggcgaccatcaggtggccggaaatcatgttggcgaacagacggatggtcagggaggccggacggatgaccagcaactcaaggatgttaatcggggtcaacaggatgtagaccggccacggcacaccgggggtgaacagctcgtgacgcagataatggccaagaccttgcgaacgtgcggcggcgatccaatactggaccatggtccagatggcgaacaccagcggcatgaccacagtggcggtggccgccatgttcatacccgggatgatgccacacaggttgaagatgaaaatcgtgaagaagatggtggtgatcatcggcacgtagcgcttgccgcgaacctcgcccatcacgtcatagacgaccttgtcacgcacgaagtcaagaccgtattccaccacgccctgccaacggccggggatgagcttggcgcgctttgcggtcacgccgagcaccaccaacagcacgatggttgccacgatacgaatcaaaataatgcggttgatagcaaacggagttccctggaacagaatctccgggggaaggaagtcaccaaccgagggcagatgagcgcctgcctcgtcagccaacagcaatcctgcgccgagcgaaccgaccatatcacgcctcctgctttttcaatgtcaggtgtcagtttaaacccaccgggcaggcaaatgtgacgtgctcgttactttcgtctcctcggtgtggagtctgccgggcgcggacacggagtctgcgctgggcattcggctccgaatgactgaagagtgattatttgcctgcgtctagacaatgtcaatactacaccggcgcgtcttctggaatcggcggcggcgcaaggtttttcggatgttgcgcaagcgttgtgcgctattagtcataatacgaggatgtgcggcatttgcgctaccctctgatcactccgtatccgtcgtgggcgaacggcttgaaatcatcctggcgcggcccgcccggctcatgccgaatcgaacgatcagtaccgagcttcttctcagccctgagctgcggcacctcggtcaggtcgtacggcgtggtctggtacacccagttgagccagttgcgccacagcagattggcgtgggcacgccagacgaacaacggttccagcttcggatcgtcatgcgggaagtagttcttcgggaagggcacgttggtcatgcccttggccatatcgcgctcgtattcctcggcgagcgtgtacttgccgtactcccaatggccgagcgcgaacacttcggagaagtcacgtgtggcgattaggcccgggccggactgcggcccccaagtcaagatctgaaggtcatggttggcacgtacctcgttttcgttcacgccggcgaggcgggagtgcggctgcagatcaatctcgtcgaagccattggtcaggaagcagtattcgtcctgcaggtactgcgggaatacgccgaaaatcttctcggggtaatccaccttgtggatgccgtagcggtagtacagtgcgcccatcgcaccccagcacaggtacatggtagagaacacatgggtggaggcccagtcgagaatcgtcttgaactcgtcccagtagtccacatcttcgaacggcatatgttctacaggcgcgccggtgaccacaaaaccgtcgtaatagttgtctttgagcgcatcgaggttttcgtagaacttgacgagatgatcggcggaaacgtgcgtggcctcatgcgtggaggtcttcatgaagtcgatttcgacctgcagcggcgacttggaaatcagacgcagcagctgcgtttcagtctcgattttcttaggcatcaagttcaggaccaccagtttgagcgggcggacgcgctgacgctccgcctcgggcttctccagagcgaagatgcgctccgaatcgaggatatctctggccggcaggccactggggatcttgataggcatgttcctattatgtcaatattcgggataacggttcagggcattcctataacggccatttatggcgcgttatcaccccgactccggctccgccccaaacccctcgctgcgtgagccgattcacgttttaaagccgtgggaaaatgacacgacacgccgatgttgactttctggaatctgcacctattgtagatagagctgtctgagagacaagccgacgcggggtggagcagctcggtagctcgctgggctcataacccagaggtccatggttcaaatccatgccccgctactgcgggcgaggccgtcacgattattcgtgacggcttttcgtttatccgccgtcgtgccctacggggccgcatatccgatcggggcgatgatgtcctgtgaaaaaacaacatccaagtccgctctgggcagaatcaatcaatctatggctcgactccctcaaggcggcgggctactcccccaacacgatcggcacgcgccgatgccagatgtccgcattgtcgagggcgcttaagggcgatctagggacgtggagggcgacgacctcgccctgctgatccgatccgccaacggctatctgttccccggccggtggagcggccacgcctcggtcgagaccacgcaacggtacatcgccatgcccgacgaccagctgcgcgccgccgtggaagccacgcgcctcgccgcctaggaggatcacgatgttccgtttccccgacttgattgtggtactaaattgattgtggtactaaattatggtaccacaataagcatgatcgaatgcgagccgtcagccttcaagcactggctcacacagccacagatcgactacatattccggcatccggtggccgtgttcgaggtgcagtcgagacacgccggcgacagggtcatggcgatcctcggacacccggacgagttcagggaacgccccgtggagctgctggtatcccagcgcacccgcaaggtgttccacgcgatggactgccgccgcgaatggctctacaagttcgacgactaaaaaacaccaaggaggacatcatgagcaacgaaacagactgggacgagctctcggacgaatacaccgagcacacccccgccatcatcggcgagaccatccgcccgcaaagggcgatcacgatggatgacatcgacgacatcttcgccggccgccccctcgccgaccagccccgccggaaggccgacgtgctctacaaggcatacctcacgcccgacatggacgcacaggtgcgggcacaggccgaacgagagcacatcggcaagagcgctctgatccgcaaggcactggccgcatacctgaccgccaatcaggcacagcccgcgatggcctgacccatatacggcgaaaagcccccgaacctgccgcgtgatacggttcaggttcgggggcttcttgttattcggccttggatgccttggccttgagggcgctggcgccgatgacgacgccgatggtcagggcgacggcgctgatggtcgtcgcggccggatcggcccacgtccagccccatacggggccgagggtctgcacggacggtcacggtacgggacggtggggcgttgctgccggtggcgacgctgccgccgccgttgtaggtgacgacctgaccggggcgatatggatgaaaggcgatcaggcagctacggtgcccagggaagtcggcgatcataaacgtctcgtcgttttcatcgcggaccttcagttgtctaatccacgggaggcgacaggcgtgaagtttctcaacgaagcggaagccgggcacaagtcgtatgtcacaatcgacttcgtgcccagctcccgtccttctgctcagaagcggagtgcggttcaccatccagccgacatcatcggcatcatgccgcagcgggtcaacgtatcggccagcgcatcgtccagtgcttggatcggtcatagcaacgacgccaccgaacgacgatggacagtatggcgcctatcgccagagctgacacggccagaaccgaggcaagcgacacatcgccacccgtgacgggcagtgacgggcgagggttgggcgtggttgcctccgccggcgccggtggcgtctcgggtttctccggttcgcacggtttctccgactcgcatgggggcaacacccgcacacgctcccaggcatcgtcataccggctggacgccggggaaacacggtcatccccctcgaaccgccaaacgaacacgtaccacccatgccgttcggcggtcagatgcatgggagcgccatgcgcgtccaacgccccggcgccgattttgaacgtgccattcatcgcgggaatctcccaggtggccagcaaccggtggttgtcgtcttccgtggggacctctcccccggatggcttgtacgcctcatcgttggaggggttgtcgggatcgccggaccaccatacgctcaccgtcgcatacggctgatccgccgcgaaaccataggtttcatcacccatgaactggccgtggtccgccgggaaccccgatacggtgatggtgtcgctgagttcggcgccgatatccgccgaatgttcggtaaccgtcgacatgacttcgaccttcccgcgccccacgttgctttccgaagcctccatgaacgggctcacccagtcgccggtaaggtattcctgcgcccgtttgctttgctcgctccgccggaacacccacacccaggtgccaaagccgccggtcttcggagtcagataggcggcgtcaccgtccggcttggccatggcccgcacacgaacccgctgccccacaccggtgaaggacgccttgccataagcactcggctcataacccgaggacgccagccgggcgagaaaagcgtccgcgctctcccgtgcgttcggcgcgatgaccttgcccagatcgtccttgccgagcccgtcgaaatagtatccacgcgcctgcagcttcagaccgggcacccaatgactgccctcgtcccccacgccgctggtcacatcatcgaacaccggcgaagccgcatcaagcaccttatcggacacctgcgtggacaccgacggaacgaaatccttgcgcacctggaacgtcgacgacgaaccgccggcggaagccatcgaatcgaaggccagcatgtcctgagtgctgtccatgacgtgcatccgcccatactcgtatgcggtgttcaccgtcacctcgccggcgccggtcgcctcccacgcgatcgaggatccggcgctcgtcgacacccccgagaacgtgttgccgccttggatgaaccgcgccggcccctgcaaggtgacagtgaacggcactcccgcgatcgcgtcaccgtcgcggttcaccactttcaccgagatggaaccgctgcgcaaagcctcggcatcggtgcgttccaccgtcgtgcccgcaggcgtcttgccggccgattgatcccatatccgggccgccttcgccacgatctcgggataccggccttgaatgaccgccatctgtctcgcccactcgtcccgatcgcgcccgaagtgatcctgcacgatgatgccgatcgccgcatgggtggcggcatccgtgtcgcggtaccggtcaaggatccatgccatacgccgggcgttctcatcggaggcaagcaccgtggtggggcctatcacatagtcgctcagtttccccgcttcgatgcagtagtatttgttgcccgaagcgtccagccccgcgacaccgacgtaatattccatatcgttgtatggaaacgtcacgtgatatctttcgtcggcgggcgtcaacgtcgcggcatacgccgtattcgccgagccgaacaccactcccaccattattatcagaccggtcagcatcgctacgatggccatgccccgttgccgccatgtcgttatcatcattcgtcctttcctggtacgttccccgcatactgcactgtgtgcgggtaggccacgatcatggcagattttcattcgctacagccggtctttcgacctatgtggtccgagcttgccgtttgccggcgagttgtggataactcttccgccgagttatccacctcatgcggttgaccgaacgtttacctgaaagttatccacaatgtgcaacatatgttcaaaagcctctagaatagggccttatggcagcagtacaacatcgcgcgaccacgcgcactagtaataccgataacaacaccacgaagacgaagtcaaagacgacttctgcccgaaagagccccgcaaccaagcgcaagagagtcagcgccgaaacggcacgcgccgcagcagcgctgaaaggcctggctgtcgaagcccccgcaccgtccatcgaagcaaacgagcccggccagttcggccgcatcaatgtcatggacatcactcccaccgaggagcgtggcatcttccccgcccgtgtggaactcggcgaaccgtttgagatgaccgcccaagtgttcatcgaaggccgtaccaaggtgggtgccaccgccatcgtgcgcaacccgcgcggcaaggaaaccatgcgccgggccatgacctgcgtaaatcccggcctcgatcgttggaccgtgatggtcaagtgcggcgaacacagcgatctgaagccttgggaggatggctacgcggccgtcaagcgtcagctcggcgaatggaccgtgaccatcgaaggttgggaagacacgtacgtctcctggctgcatgacgcccgtatcaaggtgcgtgtgatggacgacgtggacaacgcgctcaattccggtgccgagctgctggcccgttgggccgcaaccccggacgccggcctgaccgcacgcgatcgcaagaccttggagaaggccgctgagaccatggccgatcagacgctgagcgccgaggatcgcctcgccgccggcgacaaccctaccatcgccgccctgcacgagactcacccgctgcgcgatggcatctcccccagccagccccagcgtttcaaggtggaacgcccgaagtccagcttcgcggcttggtaccagttcttcccacgttccgaaggcgccaccatcgatccgaacaccggcaagatcattcagggtacgctgaagacctcgatggccggcctcgaacgcgccgctgccgaaggcttcgacatcgtctatctgccgccggtcttcccgattggcgtgaccaaccgcaagggccgcaacaacacgctggtcgccggccccgatgacccgggctcgccgttcggcatcggctccgagctgggcggccacgacaccgtggatccgctgctcggcaccatggacgatttcaaggccctgtgccagcgtgcacatgaactgggtctggaaatcgcgcttgatttcgcactgcagtgctcgcccgatcacccgtgggtcaaggcccacccgaactggttccgtcacaagccagacggctccatcgccttcgccgagaacccgccgaagaagtatcaggacatctacccgatcgacttcaacgccgacatgcccggcatcgaaaaagaagtcgaacgcatcatgaatctgtggatcgaggcgggcgtcaccatcttccgcatcgataacccgcacaccaagccggtgcgtttctggcaggacgtgattgccgccgtgaccaagaagcacccggagatcctgttcctggctgaggcattcacccgcccgggcatgatgcgtgccctgagctacgtgggcttcacccagtcccactgctacttcccgtggcgcaacaccaaggacgaactggaagagtatctgccgatcaccaatggcgacgacggctactaccagcacaacaccttctggcccaccacgccggatattctcaccgcttacgtgcgagacaacggcgtagccggccactgcgtgcgtgcggtgctggcagccatgggctcgccgtcctggggtatctacaacggttacgaactcatcgagaacaagcagcgccccggcttcgaagagcagatcgacaacgagaagtacgaggtcaaggttcgcgattggagcaaggccaagcagtacggcgtggccgagatgctcaccgcgctcaacaagattcgtcgcgcccacccggccgcgttgagctaccacaacctcaccgtgctgcctacgtccgacccgaatattctggctttcgcacgccacacgccggccgaactgactggtaccggccaagcggacacgctgattgtggtcgtgaacctcgatggacacaacgcacaccagtcgatgattcacctggaactcggcgagctgggtctgcccaccgaccgcccgctcaacgtgcgcgacgagctgaccggccgcgaattccagtggggttgggacaactacgtgtctctggcgccttgggcggatgtggcccacatcctgtccgtgcagtgatgcggtagtgcaacggtaatgcaacagtgatgccgttgacgtgcatgggtttatcgtgtgcgtaaaccgctagaaatcctccccttgaggggaggatttcgtctgtttagacatagtgtcggcataatctcagcacggtttcttgagttccgcacctgttttgcaggcgcaaacagggtattgtggtgagacgataacgtaactgtcgattttcaaggagaaatgacatggcagaaaccttcaacgtcgttgtggaaattccgcgcggctccaagaacaagtacgaagtcgatcacgagaccggtcgcgtcttcctggaccgtaccctgttcaccgcaatgggttacccggatgactacggctacatcgacggcaccctgggcgaggacggcgatccgctggacgctctcgtgatgattccgaactccgtgttcccgggctgcgtggtcgagtgccgcgccgtgggcctgtaccacatggtcgacgaggccggcggcgacgacaaggtgctgtgcgtgcccgccgacgttcgtttcgatgacatcaaggacatcgacgacgtcaacgagtaccacaaggccgaaatcaagcacttcttcgagcagtacaaggctctggagccgggcaaggaagtcctgccgggcgactactggaccggtgctgacgccgccgagaaggaaatcatcgcggcacgcgaacgcctcgccaacgaaggcaagtgattcgattccgaatcgtcggcgggagacctctccggaggcctcccgcctttttgattcgacgtgcatcgcgtgatatagtgctggtgtatttttcagctaggcgtaggcggcgtgtaggaacgctggtcgaggcccatcgcacggtaatccggcgatgaaccttctgtcgcaccatgattccgataatcattcaaatcctgcttatttctgtttccgtagctatggatgcattcgccgtatccattggcaaaggtctggccgtatcccgcgtacgagtgcaagacgccgcgaaaagcgccctctggctcggcggattccagatgctgttccccattctcggctatttcgcggcatctacattcagcaaatacgtaacccaattcgatcattggatcatcttcgccctgttggtgttcatcggcggcaacatggttcacgaagccttcgaagaagatgaggaaaactccaaggagaccgcccagttcgattggaagcatatgcttcccctggccgtggcctgcagcatcgatgcgttcgccgtgggcgtgagcctgaccttcatgttcaccaaagcccatatggcattcgccatcctcagcatcggtgtggtcaccggactgttctccgctgcgggcctgtacattggccgcgcgttcggctcccgctggcaggagccggcgcagatcgccggcggcgtggtgctgattctacttggcgtcaaagtgctgttggagcatttgggcgttatcgcgttctgatttagtgtcataagccccttcaccagaaagggctattttgtttgatttcaccgttccaatgcccgacgtaggattgggatggaaattcgattatctgagaggcgtatcatgaccgagatcacccaggagggttggaagaacaaagccctgagcatgttgttggcccaactgacgtcctatgtactgctcatcgcagccacggtcattccctcccctggcaccgtccccatcatccctttgattatcgccgctctgacgttggccgcatttgtcgtgttctggccgttccgcggcagcatgctggatcgtatcgtcactttggtgtttggcgcgatttctctgattttcgtcatcgtacctttcccgaccggcaaggttccgccggatcagaccgctgcggatggctcggtacttccttggtattcatgggcactggccatgggcctgctgctggtggtgctggtggtcttctccttcgggcgccagatggctcgtgagaagcgcgaacatcttatccgcgcactctctcacgccgtgacttcaggtgtggcggctctcgccgtggccggctggtgcttcctgcctgatttgggcgcgatgctcgccaagggcaccgttgcgggaaccgttgccctgatcatcctcatcgttttgggactggccttggccgtggcctccacgttgtgggtgcgtgacgccgatccggacccggatatccgctatccgtggatcggtaccggcctgatgccggtaatgctgatgggcgtgaccatcgccgcaaccgcactggtgctcggccgtgtcatcggttgatggacgtctgccgttccatattccgcaaacttgtaacccatgtgtccactacaagcgcgtagaataatgaaaaaccgcgcgaaagcggcataacgccgctgacgactcgtacagccacaccaagcaattgcgtaacacattgcaggataaagggggattagcgtgacggatcttacgttgatgactttcgccagcgaccccgccaccgttttgccatcactcgccctgctttctcatcgcgtccgcgtgctgccgatggatgcagccagcttggtgaagatgccggagaacaccattctgtttctggatgcacgcgatgatctggcgaccgccaaaaccttgtgccgtctcatccacgcttccggcctgtccacgccaatcgtgctggtgctgaccgaaggcggcttcaccgtggtcaactcccagtggggcattgcggatgtggtggtcgccaccgcttccccggctgaagtcgagggccgattgcgattggtctccgagcgcggcaacgctcccgcagccgcagcagccggttctcccgccgaatccaccaccacggtggaagatggccagattcgctccggcgacctcattgtggacaccaacggctataccgcctccctgcatggacgccccatcgatctggcatacaaggagttcgaactcctcaagtacttggtccagcaccccggccgcgtgttcacgcgcgcccagttgctgcaggaagtatggggctacgactactacggtggcactcgtacggtcgacgtgcatatccgtcgtctgcgcgccaagcttggcggcgaatacgaacacctcatcggcaccgtgcgcaacgtgggctaccgattcgacccgccggagacggataaggaaactgccgccgcacagcaggccgccaaagcatcctctgccgccatcggcaccgatgacgatacccccgatctcaacaccgccgcctgacagaccagcagcgccacaaaccatcaatcatcgacattacgccgcttaggtccatacgatgagagaaaccaaatccgcgcgtctcacgcgcatgcatgacgaatacgacattctgcgccaggtgattccggcacccgcttgcgcactgcatttctcgaatccgctcgaattgctgatcgccaccgtgctcagcgcccagaccaccgacaagcgtgtcaacacggtcaccccggaactgttcgccacctaccccaccgcccgtgacttggcggccgcgaacccggcccaagtcgaagacatcattcatccgctgggattctaccgttcgaaaacccagcatctcatcggactggccacggcactggacgaatggttcggcggcgtggtgccgcgcacgatggatgaactgaccagcttgccgggggtcggccgcaaaaccgcgaacgtcgtgctcggcaacgcgttcgatatccccggattcccggtcgatacgcatgtgatgcgcgtaaccggacgactgcgttggcggtcggattggcggtccgcacaccctgatcccgtgaaaatcgagaaggaaatcaccgcctgttttccgcccgaagagtggacgaatctcagccaccgactgattctgttcggccgggccacctgccacgcacgtacccccgactgcgccaactgcccgctgtccgacacctgccctagctatgcgccgcccgccggcaagagcacgtccaagcgctaactcatacctcatcatggtgaattgcggattctaggctgaatccaccgctagactgaaaaccatgcagcacagcaagcggaacaatacatggtccaagtgggggatttttctcggagtcgccgtggcactcggcgcactcgtggttgcgggatggacgttcatgcaaaaccggttccagccgggatcatccctcgatgccgatgtgaccattggcatcgacgatatgccgcaatccttggatattcggtccgattcctctgcggcagccgagcgcctgctcgtcgacaatgtgtatgagacattagtgaccgtcgatcaagacaacaagattcagccgggactggcgacaagctggaagacttccgatgacggactgaccgtcaccctgacactgcaatcgggcgtcaccttctcgaacggtcatacgttggacgcctcggacgccgtgtggtcgttgcaacagaacgtgaccaacaaggtggcggacgtcgacgaattgggcgatctgacgtcggtcgccaatccgaacgccaccacggtggtcattacgcttgccaagcccaatccgacgctgctgcgagcgctgtccggcaaactcggcattgtctacgattccgagtcgtccagtgccgattatcaacgcaaggccataggttccggaccattcaccgtggccgatttccagcctggccattccctgaagctggcgcgcagcgatacctaccatggcaccaaagcggccagcaatatcgttgaatttatgcaatactccgacgccgatgcgctcagcaaggccctgaccgacggcagtctcgatatggcggcaccggtttcggcttcgacggccaccggtttgaacggcaaggatggcctgaccgtcaaggagggggccactacggataaggtgctgctggcctacaacaacggcatcgattcgctgctctccgacgaacaggcgcgtaaagccttccgctatcaaatcgacgcagccggcatcgcctccgcccaacccgacgcagccggagcattgggcggccccatcagcccgctggaacccggatacgaagatttgaccggactgtatccgcatgacgaaaaccaagctgggcagatgttctcctacttcggtgcgcaatatctgactacggtgaatctggtggttcccgaagaataccggtcgttggccgaaaccatcaagcagcagatcgagcggcagccgcgccccacggtgaaccttgaagtgctctccgatgaggattatgccaaacgaatcaaggacggcaaatgggaactgaccgtgatgagcatggacggcacggatgatgccggcatattcgccgaccccgattccatgttccattacgaccataccgaagcgcaacaggcctatgcggatgctcgcgccgccactaatgacgccgattatgaggcacgaatgaaggcgtacgcccggctgatcagcgaggatgcggccagtgattggctgtatacccgcaaatgcttcactgtggcgtccaccaaggtctccggctacccgacctcgatgatcaatcgtcgcatgccgctggccgggttgacggtgaagtaggcaaccttcagtcacggacgggctacgcccgatagtccttggctcactatcgttcgatcgttcgtatctcgcctgcgaacagcctactgggctgtttactgtacagttcggcttgtcatgcaacgtgcataaactttggctttatgactgaaggcaaatccatcatcaacgccaacctcaccccgctgcccgacaaggtcggtgtggacggacttgaggacaagtggcgcgccgtctgggatgaagacggcacctacaaattccgcaatacccgcgaccgcaaggccgtctactccatcgacaccccgccgcccaccgtctccggttcgctgcacgtgggtcacgtgttctcttacacgcacaccgatgtgattgcgcgttacaagcgcatgcgcggctacgacgtgttctacccgatgggttgggatgacaacggcctgcccaccgagcgccgcgtgcagaactactacggcgtgcgcgtggacgtgtctctgccttacgacccggacttcaagccgccgttcgagggcaccgatggcaagaagatcgacgccaaggatcaggtgccgatttcccgcaagaacttcatcgagctgtgcgagcgtctgactgctcaggatgagaagctgtttgaggccctgtggcgcaagctgggtctgtccattgactggtcgcagacctaccacaccatcggccagcacccgcggcgcgtggctcagaaggccttcctgcgcaaccttgcccgcggcgaggcctaccagcaggacgcccccggcctgtgggacgtgaccttccagaccgcagtggctcaggccgagcttgagtcccgcgaatacccgggcttctaccacaaggtggctttccgctttgaggacggcaccccaatctacatcgagaccacccgccccgagctgctggccgcttgcacctcgctgatcgccaacccgaatgacgaacgttacaagcagtacttcggccaggaagtctactccccgctgttcaaggtcaaggtgccgattctggctcacccggccgccgaaatggacaagggtgccggcatcgccatgtgctgtacgttcggtgatgtgaccgacgttgagtggtggcgcgatctgaagctgcccacccgcccgatcattcagcgcaacggccgtatcgtgatggacaccccggattggatcaccgacccggccggccgtgaggtctttgccgaaaccgctggcaagaccacgttctccgcccgcaagatcatcgtcgacaagctgcgcgagtccggcgatctggacggcgagccgaccccgaccaagcgtatgacgaacttctacgagaagggcgacaagccgctcgagatcgtcacctcccgccagtggtacctgaagaacggcggtaccgacgagaaactgaacgccgagctcatcgagcgcggcaaggaactgaacttccaccccgacttcatgcgcgtgcgctacgagaactgggtgcacggcctgaacggcgactggctgatttcccgccagcgcttcttcggtgtaccgttcccgctgtggtacccggtgaacgcttccggcgagccggattacgatcgcccgatcaccccgagcgaggatcgtctgccgatcgacccgaccatcgatgtgccggaaggctacgacgagtcccagcgtgatgtgcccggcggcttcaccgccgaaaaggacatcatggatacctgggccacctcttcggtgaccccgcagatcgtgacccactgggctgagccggacgaggcctccaaggccctgttcgcttccaccttcccgatggaccttcgcccgcagggtcaggacatcatccgcacctggctgttctcgactgtggaccgcgcgcacttggagaacaagtgtctgccgtgggcccatgccacgctgtccggctggattctggaccccgaccacaagaagatgtcgaagtccaagggcaacgtcgtggtgccgaacgagccgatcgagaagttcggcgcggacgccgtgcgttactgggccgccgccgctcgcctgggcctcgatgccacgtacgacatcggccagatgaagattggccgtcgactggccatcaagctgctgaacgccaccaagttcgcgctggccatcggccgtgaggacgagaaccatcacgtgggcgctgccgccgagacctcgtggaacccggccgatgtgaccgaaccgctggatcgcgccgctatggccaagctggctttggtggtgagtcaggccaccgaggcgctggaatcctacgagcattccaaggcgctggaagtcatcgaatcctacttctggcagttctgcgacgactacatcgagctggtcaagaaccgcgcctatggcactccggacgagcacggcaatgtgccgtccgagaaggctgtgaagtccgcccgcaccgctctgggtctgggcttggacgccttcgcacgtctgctggccccgtacctgccgtacgccaccgaggaagtgtggagctggatgcacgccggttccggttccgtgcatcgcgccgcctggccggtcgtggacccgtatgtcgaggccgccaccggtgcttcccccgagctgctgacttgggccggcaaggccgtggagcagctgcgtaagatcaagtccgaggccaaggtctccatgaagaccccaatcctgtctgtggcactgtccgctgcttcggaaggtgtgaacgcgattcacgccgccttgggcgatatcgcgcaggccggtcgcgtggtcggcaagttcgacttggtggccaagcacgccgaggaatccgccgccgaagacgcgcccgaaaccgaggtcgccgtcgaagccagcgagctcggtgagccgccagccaagaagccaaagcactgagcgttgcgcacaacaacagtaggtctcacggcaatgccgctcgttccgagcctacgggaagcccaccgggcttcccgcttaacggctcggccagccaagaagccaaagcactgagc

SEQ ID NO: 3941 - DNA, 3232 bp, Unknown
  R22_24m  MAG No. k141_24090
cggttcgacacgcgcatttcactgcgcgactggacattgacgtccctttcgaggtaatatcgaaccggttcgatacatacgtgagtatgcaaatacgtaaacaacaaacaggcagatgcgcacgcaaattgcacccgcgcccatgagccaagggaggtcccatgaaaaacaaagtgcaactcatcacatacgccgatcgtctcggcgatggcactcttagctcgatgaccgacatcctgcgcacccgcttcgacggcgtgtatgacggcgtgcatatcctgccgttcttcactccgttcgatggtgcggatgcaggctttgacccgatcgaccacaccaaagtcgacccgcgtctcggcagctgggacgacgtcgctgaactttccaagacccacggcatcatggtcgatgccatcgtcaaccacatgagctgggaatccaagcagttccaagacgtgcttgaaaaaggtgaggaatccgagtattacccgatgtttctgaccatgagctccgtcttcccgaacggcgccaccgaagaggaactggccggcatctaccgcccgcgcccgggcctgccgttcacccactacaagttcgccggcaagacccgcctggtctgggtcagcttcactccgcagcaggttgatattgacaccgattccgacaagggctgggaatacctcatgtccatcttcgatcagatggccgcatcccacgtcagctacatccgtctcgacgccgtgggctacggcgccaaggaggccggcaccagctgcttcatgacccccaagacctttaagctcatctcacgcctacgcgaggaaggcgtcaagcgaggcctcgaaattctcattgaggtgcatagctactacaagaagcaggttgaaatcgcctccaaggtggaccgcgtctacgacttcgccctgcctccgctgctcctgcactcgctgttcaccggtcacgtggaacccgtggtccactggaccgaaatccgcccgaacaacgccgtcaccgtgctcgatacgcacgacggcatcggcgtgatcgacatcggctccgatcagctcgaccgcagcctcaagggcctcgtgcccgacgaggacgtcgataatctggtcaacaccatccacgccaacacccacggcgaatcccaggccgccaccggtgccgccgccagcaacctcgacctctatcaggtcaacagcacgtactactccgcgctcggctgcaacgaccagcactatctggccgcccgcgcagtccagttcttcctgcccggagtgccgcaggtctactacgtgggcgcgctcgccggccgcaacgacatggaactgctgcgcaagaccaacaacggccgtgacatcaatcgccattactactccaccgccgaaatcgacgaaaacctcgagcgcccggtggtgaaggccctgaacgccctggccaagttccgcaacgaactgcctgcattcaatggcgagttcagctacgaagccgacggcgacacatccatcaccttccgctggatcgctgccgacggcaagaccaaggccgccctcatcttcgagcccggccgcggactcggcacggataacaccactccggtcgccagcctcgcctggaccgatgccgccggtgaccacgagactgatgatctgctgagcaacccgccgattgccgatatcgactaaccgttggcctataaacgccactccgctgtgcgcgctccaagtagtgcgtccggcgtaagctgggtccatggaaaacaaaccgcccgcagtgcactgaagctagtgcgctcgggcggttttgcatgtgccggggttgcgggtcatgctcagtcggagctggccggtacctcccgccggtgatgagagcaaagaaagagcagcaacatgttggaaccgtacgtgcgaccgggtattgacgaccgcccggatctcgacaaggcattgagtcccgaagacaaggatgccgtggcccgactggccatcaaagatcgtcggcgtcctcccgaggcatccgccgatcagcccgaggcccaggccgtgcgtctggcggccgccggttcgtcggctgctgccgctgccgcggccagcgtggatgcccctgcgcctgatctgtcgtctgcatatctcgatatgcgcgatccgatggtcgccgccaatggtcagcgacccaccacgggccaggtatcccgtctcaactgggggttcttcgccgcttccattctggtcggcgcaccttggatagcattgaataccatcgccatgcccaacgcggtggctcgtctgttcggctacgacaccgcttctgccatatcggtcaccatcaatccgtccaccagccgtccgctgcccgtcgccactgacttggtggtgcctctggccgtgctggtggtcgttggcgtggtggcctccatgttcgcgatgcccttggtctccgcgctgtccgaccgcacacgtattcctctgggccgccgtaccccgtggatggtggcgggtggcgtgctgtgcgcgctgatcacgctggttctggggcggaacacaggcctcgtagtgctgtgtttcttctgggcgctcatgcagtttgcctatgcgatgatttccgtgccgttggccagcgccatcagcgaacgggttccggacaaattccgtccgcgcattgagcgctggcacggtatcggcgtgatgcttggccaagcgcttggtgtatgcatgggtgcgctcggcgtgatgttcgactccttcacgccgtttgcctacaccgccgtgctgtttgcggtttccggcatcctgaccgtgatcatgctgcccaaggagccttccagccaggagcagccacatcaacgattcgagtcgagccaggtgtttgaccagctgcgtccgccggcacatgcgcctgcattcgcccgtgtgttcgccgctcgcgtgtgcatgatgacgggcgttggactgaccggggtctttctgtggtatctcgtgcgcttttgggtgtatggcaaggctgtggtgttcacttccgcgccattgaccattcccgcgggcctcctcatcgccggcatggccgtggcaacgctcatcggtgctgcgctcgcgtcctgggccgctgggccgatctccgagaagatcgaggaacggaacatcgccaccactgcagtggtggcggcatcctgcctgctgtatgccatcggcgtggcggtggcatgggggctcggcgtctggtccaccggcac

SEQ ID NO: 3942 - DNA, 24939 bp, Unknown
  R22_24m  MAG No. k141_24325
gggccagtaccaggacacgggcgcgaagatgattcacctcgccccgcacaccagctccaccatcgtcgccaagtccatctcgcgcggcggcggccgctccgcctaccgcggtctggtcaaaatcgtcaagggcgcgtacgggtcgtccaactcgaccgtgtgcgatgccctgctggtcgacgacttctcccgctccgatacctacccgcacgtcgacgttcgcgaagacgatgtttcgatggcccacgaagccaccgtttccaagatttccgaagaccagctcttctacctgatgagccgaggactcacggaggaagaggcgcgaggcatgatcgtgcgcggcttcgtcgaaccgatcagccgcgagctgccgatggaatacgcactcgaactcaacagacttgtggaacttcagatggaaggatcggtgggctgattccgatgaccgacaacacaacacccgtcaaggaaatcaagattccggtcgccgaccccaacgacccgtacgcgattccggctgccatgccgtcctccgtggaccatgccgtgcgctcgttcaacgcaggcgactacccggagcccagccgcaagcaggacgaatggcgctacacgcctatcgagcgcatcaacgagttcttcaccgtgttcaagccttccggcgaaacgcagatcgaagtctccatgattgacggctcgccgttggccgaaggcgtgaagctcagccagatcaagctcggtgagggcctgtccggcactgtgtccaagcccaacgaccgcgtctccgcagtcgaatgggaatccggccacaccgcaaccattctggaactgtccggtgagatcgcccagcccgtgctcgtcaaggtgcacggcgcgggggaggaccttgacgccttccatctggtgatcgccgccgccgacaaggctcatgcggacgtcgtcgtggaacacgacggtgacgcacgactggccgaaggcgtggaaatcaccaccggcaaggactcgcacgtctccaccacgttcgttcaggaatgggccaaaaccgccaagcatgtggccaaccaccgcatccacgtcggcgaaggcgcatccctgcgccactccgtcgtgaccttgggcggcgacatcgtccgcatccgcatggatcaggacttcggcggcgaacagggcgacctcaacatgctcggcatctacttcgtggaccccggcgagcacatcgaacaccgcacgatggtggtacacaaccaccccgactgcaagtcccgcgtggtctacaagggcgcgcttgacggcaagggcgcgcactccacttgggtgggcaacgcgctcatccagcccaccgcccccggcaccgactcctacgagctcaaccgcaacctggtcctgaccccgggtgccatcgccgattccgagccgaacctcgaaatcgaaaacggcaacatcatcggtgccggtcacgcctcttcggtgggccgcttcgacgacgaggaactgttctacctcgaatcccgcggcatccccgaaaccgacgcccgcaagctcgttgtgcgcggcttcttcggcgaactcgtcgaggagatcggcattcctgccatctccgaacatctgatgaccgtgattgaccgccgactggcccgtggcgaaaacgacgccatggcacaggtcctcgaagacaagtaagaacagcatttttaggagcacaacaatgtcaacactcgaaatcaaggacctgcacgtccacgtcgaaaccaaggaaggcatcaagccgatcctgaagggtgccaccctgaccgtccactccggcgaaacccacgccatcatgggccccaacggttccggcaagtccactctcgcctacacgttggccggccaccccaagtacgtggtcgactccggcgaggccctcctcgacggcaaggacatcctcaagatgactccggacgagcgcgccaaggccggcctgttccttgccatgcaatacccggtcgaagtaccgggcgtgtccatgaccaacttcttgcgtaccgccaagaccgaaatcgacggcgaggctcccggtattcgccagtgggccaaggacctgtccgcagccatgaagcgcctcaagatggacccgaagttcgcctcccgttccgtgaacgaaggcttctccggcggtgaaaagaagcgcgccgaagtgctgcagctcgaactgctgaagccgaagttcgccatccttgacgaaaccgactccggcttggatgtggacgccctgcgcatcgtgtccgaaggcgtgaaccgtgccaaggaagccaaccagttcggcatcctcatggtcacgcactacacccgtatcttgaagtacatcaagccggacatcgtgcacgtgttcgccgacggccacttcgtcaagaccggcggccctgagctggccgacgaactcgaagagaacggctacgaccagtacctgcccgaaggcgccgactccgagtccgcgctggcctgagtccgtgaccgtgggagcctgacatgccctattctcgacacgctccgggccgctcaggccaagtcgttacggtcgcgaacaggccatgtccgactcccacttgtttcgtacaattgttacgtaagtaggggaacataatggttgattttaaggagattcggggcgagttcccgattctgaatcaggagattcacgggcacccgctcgtgtacctggattctgcggccacctcgcagaagccgaatgcggtgatcgacgccgaggcgaacttctaccgtacgatcaacgccggcgtgcaccgcggtgcccacgagctggcggcccgtagtaccatggctttcgaagaggcccgtgccaaggtcgccaagctggtcggcgcgaatgcagcggaaggcgaagaagagatcgtcgtcaccggtggtgccacggccggactgaacctgctcgccaccgcattcggcaatgcgtcgctgggtcgtgggggagaagccgccaagcgttttgccctgaagccgggcgatgagatcgtcgtctcgcgtgcggaacatcattcagtgctgttgccattccaggagctggcctaccgtaccggtgccaccttcaagtggatcgacctgaccgaggacggccgtgtgcgtacggacaacctcgacgaagtcatcaccgaacgcaccaaggtcgtggccgtcacccacgtgggcaacaccacgggtgccatcaccaacatcgcccctatcatcaagcgtgcgcatgaagtaggttcgatcttcatcttggacgcgtgccagtccgtaccgcacctcaaggtcgatttccatgcgcttgatgtggatttcgctgcctggagcgcgcacaagatgtacggtcctaccggcgtcggcttcctgtacggtaagcgcgaactgctcgaagccctgccgccggccaacttcggcggctccatggtcgaactcgcctacatggaccacgaggcccaatacatggcccctccggcccgcttcgaggccggcacccagccggtcgcccaagtggtggccgcaggcgtcgccgccgaatggatgatgaacatcgggctcgagaacatcgaggcccatgagaagaccatcgccgccgaactgctgaagctcggcgacatcgatggcattcgtatcctcggaccgcgcgaaaacgtggaccgcatcggcaccgtggcgttcgacgtggccggcgtgcacccgcacgatgtgggccagttcatcgacgcccagggcatcgcgattcgcgtggggcaccactgcgcccagccggtacaccgccacttcggcctatacgcatccaaccgtgcctcctccggtgtctataattcggtcgaagatgcccaagcattggtcgaagcggccaagggcatccgtaagttctttggagtggagtaaaacagaacaccatgaacgaattcggtatgagcggggatgacctcgaacagatgtaccaagaggtcatcctcgaggcgtcgaaacatccgcatggcaaggaatcctttgcgcccaacgcggcggtcgaacagtccgcggacgcggcggccaatgtcaccgtgcaagccagccacgaatactgcacgcccggtgaatcgcaccagttcaacccgacctgcggcgacgaggcgaccatccatgtcgaagtctccgatgacgaaccgcacaccatcaagcgattggtgtgggacggccacggctgctccatttcgcaggccagcctgtcggtgatggtcgatctggtggacggcaaaaccgtggacgaggccatggatctggaacagacattccacaagctgatggaatcgcgcggtgccggtctggacgacgagaacctggaagaaaagctcggcgacgccgtggtattccaaggcgtgtcgaaataccctatgcgcatcaaatgcgctctgctaggctgggaagggctgaaggactccatcgccaaagccctcgctgcaaagaactgaggaaatatgtccaacgataatttggttcccgaaccacagccgtccgttttcgatgccgtcaacggcgtcctgcaggacgaggaggccgctcgccgcgtgatggccaacccggccttggccaagggcttcccgaacggacgcccgatcgagcactctgctgcgtccggcgatgacacctgtgcgtgtggcggtcaccatggcaaatgcggttgccgggatgacgaacagtccgatggcagcgagattccgatcaaggcgattgacgatatcggccgcgccactgccgaagacgtgcgcgaggcactgcatcaggtgattgatccggagcttggcatcgacgtgatcgatttgggtctggtctacggcattgagatcgatgagctaggccgcgccattattacgatgacgctgaccacgccggcctgcccgctgaccgaccttatcgaggacgaatgcgcatccacgctggccggtctggtcgaggagttccgcatcgactggacgtgggacccgcgctggaccatggagcgcatcacgcccgaaggccgcgaccagctcgccgcccttggcttcaacttcgacaacatgccaaagtactgatagcgcttagtaagctccctctgatgagggagctctatacgagaaaagccccgcatgatgcggggcttttccaagtctggactggtcaatcagtcatcgacgatggtgttcttcgggacaaccgtaatgccgtccggcgtgacggtgaagccacgggccagatcgtgctcggtatcgatgccgacagtggagttttcggtcaggaccacgttcttgtcgagaatcgccttgtacacgcgggcgcggcggttgatgatcacaccgtcgaacagcacagaatcgacgatctgtgcccacgagtggatacgcacattgggggagagcacggagtggtgcacttcaccgccggagacgatcacaccgggggagacgatcgaatcggtggcgtggcccagacggtcgcggccggcgtgcacgaacttggccggcggcaggttgccggacatcgtgtaaatcggccaatcctggttgtacaggttgaactcgggcacataggcgatcagatccatgtgcgcatcgtagaactgcttaatcgtaccgacgtcgcgccagtaggcgtgatcagtgaccgtggaacccggaatctcgttcgagttgaagtcgtagacgccggcctcgttgcgggaagcgaagtacggggcgatgtcgccgcccatgtcatgcttggtgtcggcagccttctcatcgagagccagagcctcgaacagggccttggtgttggcaacgtagttacccatggaagccagaatctggttcggattgtccggcagaccggtggtggtggccggcttctcctggaagttcttgatcatgttcgggtgatcgggatcgacctcaatcacaccgaactggttcgattcctcgatgggctggcggataccggccacggtgaactcggcgccggactcgatgtgctgctgtaccatctgctcgaagtccatgcggtagacgtgatcggcgcccacgatcaccacgatgtccggctggacgtcctcgatgatgttaatggtctggtagatggcgtcggcggagccgaggtaccagtgcttgccgagacgctgctgcgcgggcacaggggagacgtacgagccaagcagcggggagaaacgccagacctgggagatgtggcggtcaagcgagtgagacttgtactgggtgagcaccacgacctgacggtacccggagttcaccagattgctcaacgggaaatcgatcagacgatacacaccaccgaagggaacggcgggcttcgcgcgatcgcgggttaacggcatcaggcgggtcccctcaccacctgcaagcacaatcgacagaatcttgggattcttggccatcgtaactgtcctctctgttactgagcgtctttcgacaccgcactgctgggccggatgcttccttgcattcggtttacatagttaataattgcagaaaaattcgaacatgcaaggctttccccccgcgtgccgtgaacttgcgatgaacagtttcgtagatttgtttaaggatccggccttttcggagcgcgtgcgattccttagcgtgtcgcgtagaacgccactgcgctggatgccgccacgttcagactatccacgccgtggctcatcggaatcttcacggtcaaatcggcgcgggcaatcgtatggtgggacaggccgtcgccctcggtgccgaagatcagcgcgagcttgtcgatatgcgtcggatcttcgtcaggcgcgtgcagacggcgtgtcagttcgtccaacgaaatcgaacgatcctccaatgccatggccacggtggtgaagcccagcgacttcaactcgtcgatgccctggaacggccagtaatgcttgttttcggtaccgtcgtcgttgaacccggtgatacgggtccacggaatctggaatacggtgcccatcgacacacgagcggctcgtcggtacagcggatcaccgcaggagggcgtgaccagcacggcatccacatcgagcgcggctgccgaacgcatcagtgcgcccacattggtgtggtccacgatgttttccattactgccacgcggcgggcgctcctgcagacctcggctacggagggcagcggccagcgtcgcatcgcgcatagggcgccgcgatgcagacgatagccggtcagtcgcttgagctgctcaggtgaggccacgtagacgggaatgtccgtgccccagcgcccgtcgatgaagtcgaaggtgtctttcatgccctccagccaaggttcctcgaccagcagtgacagcggttcgcggtcagcggccagcgcgcggtcgataaccttgggggactcggcgatgaacacgcccttggctggttccaagcgattgcgcaactgcatttcggtgaggctcacatacgcttcgacgcgcgggtcgtcaacggtgtccagcgtgatgaactgcattggtggcctttcgtgtgtgcagataacgaaaaaccccttgcaatgcaaggggtttatctgtgcccgagacgggacttgaacccgtacgcccgtataaaataggcactagcacctcaagctagcgcgtctaccattccgccacccgggcaggtgtcgtttggacaacgagtaaatagcttagcatgaaattacagggatgcaattcgcgcgtgtgcccggcgtgtcgcgtgtagccttgaagtcatgactgatgccctttttcttttcgacccgcaggtcgacgatgtcccggtgaacagcgacgaacttcacgccggctggaagctaaccctgcccgcgcacatcaagcgccatgctgtgcaggctatgcgactcaaggcgggggacagcctgcaactttccgacggcaacggcttgagaatccaggcagtgatggccgatcctgaagccggacttgctgaagttgtggaagtggggcgcgaacccgagccgctcacccgtttggcgctgattcaggcattggcgaaaaccggccatgatgagcaggccatcgatatggctacgcagattggcgtcgaccaagtggtgccatggcaggcggaccgatccattgccaagtggaaggtcggccgtacggacaagaagtggaattcggtactggatgccgccaccgagcagtcgcggcgcgcttttaagccgcaactggaggcgtgcgcgtccagcaaggaggtcgtggccatctgccgcagggcctgcgtgcatggcgatgtggtgattgtgctgcatcaggatgctaccgatacgtggtccggcgtggaggagaaggttacgcagttggtggaacgcacgctccaggacggccggccgcggactgtcagtgtggtggtcgggcctgagggcggcatcagtgagcaggaggtagctgatttcgtcaaggccggagcggtgagctgcgtactggggcacaatattctgagagccgcgacggccggtcctgtagcgttgtcgctgttgtctcgggtgttgggacgttacgagtaacgcccacgcgctaagctggtgcgtagcaacatcaaaccaaggagcatgatgagcgaatccgacgattgcctgttctgcaagatcatcgcagggcagattcccagcagcaaggtctacgaggacgagacgacctacgcattcaacgacatcaaccccaaggccaaggtccacgtgctcgtggtgcccaagaagcactacgccaacgtcgccgaacttgccgccgacgacccgaccgagctggcccacatcgtctccatcgcgcagaacatcgccgacaaggaatttcacggcgcctaccgactggtgttcaacaccggtctcgacgccggccagaccgtcttccacgtgcacgcgcacgtgatgaccggcgaaaagctcgacgagtagtaggggaatatccgcttcgtggcaacgactacacgtaccatcaccatcccgccccaacttgaccccgtcgccgtgctcggcccggttgacgaggtcattcgcgaggtggagcgcgcctttccggacctgacgattatcgtgcgcggcaaccgcgtggcgatcgtctcccgctccaagcagaccgaagcccaggccgcacaggccgaggatttggtcaacaccatcatccaagccgcctacaccgcgcctatggacgccgacaccgtgcgtcgcatgctcgaccagaacgtgctcaagaaccacgtgcgcctcgaacatccaggtcacggctcggtgcatgacaaactggcgcaatcgacctcaaacgaacgcgcccatgcacgttctgccggctcccacgacccgacgtaccgcaagcccacggttcccggcgtcatcacctttgccgccggcgtgccggtccgtgcgaaaaccgccggacaagtggcctacgtgaacgccatcgaatcgcacaccatcaccttcggcattggtcccgcaggcaccggcaagacgtatctggccgtggccaaggctgtgcgtgccttccaggacaagcagattcgccgcatcatccttacgcgcccggccgtggaggccggcgaaagcctcggctttctgcccggcacgctgaacgacaaggttgacccgtatctgcgcccgctgtacgacgcgcttggcgacatgctcggcgccgaccagctcaagcggtacatggacgacggctccatcgaagtggcgccgctcgcctacatgcgcggccgtacgctgaacgacgcgttcgtgatcctcgacgaggctcagaacaccaccgaacagcagatgaagatgttcctgacccgtctgggcttcaacaccacgatggtcatcaccggcgatatctcgcaggtggacctgaccgtgccgcgctcgggactggccaccatcgaacgcatcctgggcggcatcaacgacatcgcattcgtgcatctcaaaaccgaggacgtggtacgtcaccagctggtcggccagatcgtggccgcctacgaccgtcactccgccatcgccggcgaccaccgcgacatcgagcgcaagggccgccgcaaccataccgacttcgatgcccgccagcaaacggattcaaccaaccaaagtgagacagacgatgagcgttgacgtcaccaatgaaacccagtgggtcatcgaccccaaggtcttctccgatttgggtatttgggtactcgaccagatgcgcgtgagcacccagtccgacctgaccatcatgttcgtggatcccgatcccatcgccgaattgcacatgcgttggatgaacctcgaaggcccgaccgacgtgatgagcttcccgatggacgagctgcgcccaggcgacggcaaaaccgtgatggaaggagtgctcggcgacatcgtcatctgcccgtgggtcgctgcccaacaggctgccgcagccgggcacagcaccatgcaggagatgctattgctcaccatccacggcatcctgcacctgctcggctacgaccacgtgacccccgagcaggagcgccagatgttcggcctgcagcgacagctgctgctcaccttcttcgccctgcgccacgatgccaacatgcaggccacgctgcccgccggcacacccgacgcgctggccctgtacgacgccgcgcacggtgctggccgcgacctcgattccaaataaacttccaaatcaatcacaccaaattcggattattctataccgttcaaggacattcaaggacaccgaaaaaacattatggagtattccagtaccacgctgatcgccgtcaccgtcattctcgtacttgtggcggccctgttcgtctggctttcgctgaccatggccgccgctgaaggcgccgtggcccgcgtaacgcgagccagcctcaacaatctcattctcgaggtgcagaccgactccgaagcaagccagttcctcaagatgaagaagatcgacaagattcatcgcgtgcaacggctcatcgccgaccgttacgccaccgccggcagctgtgcgttcttccgcatcgcctgcaatgtgctcgacggcgtactggtgtcttccatcgcatccctgtggggtgcggaactgtgggttgaactgctcgccggattcctgttcgcgattatcgtagccgtggtctccgtactggtccgcccgcgcaccgccggcatgaccaagccggtcgacatcatgatttccaactcgcgcatcgtgtcgttggccaccaagctcacgccgttcgcacgcatcggtggcgacaagtccggttccaaggggccgggccgccgctccaaggactccgatctgtccgatgacgaggagcttgagaagattcagctcgagcagggcaaggccgccatcgaccgactggtggagtccaacgacttcgatccggaagtctccgaaatgttgcgcaacgtgctcaccctgtctgatacgttgactcgcgagatcatggtgccgcgcaccgatatgatctgcatggagcgcgactccacactgtcttccgcgctgaaactgttctcccgctccggtttctcccgcgtgccggtgatcggtgaggatgtggatgacctgatcggcgtggcctatttgaaggacgccgtgcgcgccaccgccttcaacccggcggccatggagcgcacggtcgaatccatcgtccggcagccgctgcttgttcccgaatccaagccggtggacgacctgttccatgagatgcagcgttcccgccaacatgtggccgtggtggtcgatgagtatggcggcatcgccggcatggtgactatcgaggatgccatcgaacagatcgtcggcgagctggaagacgagcacgaccgcacccagcgtaccgagccggagaaaatcggcgacaacaagtggaagatgcccgcccgtacgccgattgccgatctggaggagatcttcgagatcgacattgatgaggacgatgtcgataccgtgtacggcctgctgaccaagattctgggccgcgtgccgattgtcggtgcttcggccgtgacgcgcggtctgcgactgaccgccgtggactccgccggacgccgcaagaaggtgtccaccatcgtcgtcgaaccggcgcacgtcgagggcggcgaggaaaatagcaggacccatgaggaaactgacggcgagcccgtcgaaggcgatgataccgccagcaaggagtgatatgaccgaccagaacaacagcacgaacgacgtcgatgacattgacgtcaccgatgcttccgatgttgccggcgttgccgaagtcgacgcgaccggtgaaacggagaatgtgaccaagcaggacgtaccgtatcgctccggattcgtggccgtggtgggccgcccgaacgtcggcaaatccacgttgatcaacgcgttgatcggcaagcagatcgccatcgcatcctctcgcccggaaaccacccgtaaggcgattcgcggcatcctgaccgccgaccacgcgcagctcgtgctcgtggacacgcccggtatccaccgcccgcgtacgttgcttggccagcgtctgaacgacgtggtcgacgaatccttggccgatgtggacgtggtggccttcctgctgcccgccgaccaggaaatcggccccggcgacaagcgtattctttcccgactgcgtaccgacttcgccaccaagcgtgaggacggtacgttcaagtggcgcatcccgctgattgccatcgtcaccaagatcgacgagcttggccgtcagcaactcatcaacaagctcatcgaaatcaacgatttcgccgatttctcggacatcgtgccggtgagcgccctgaagcacgacaatctggctgaagtgaagaacgtgctcattgagcacacgcccgagggcccgcagatgtacccggacgatcagatcagcgaggagcgtccggaagacaccatcgccgaactcgtgcgcggtgcgttccttgagaccctggacgacgagctgccgcattcgctggccgtggtggtcgattccatcgactatccggaagacaacgagaccggtcagggctatgacggcaaggcgcaggtcaacgtgtccatttacgtggagcgtgactcacagaagccgatcatcatcggcaagggcgcctcgaacctcacctacgtcaagaagaagctacgcaccccggtcaaccgcatcgtcggccaaaaagccaagctcgacctccacgtcaaggtagccaaaggctggcagtccgaccccaagcaactagaacgcctcggcttctaggaatcggccttcggccggttataacaaagggagattccaatggaatctcccttttgctgtactcgagtcctccttacttccgcttggtgtacatctgggtgttgaggagggtggagtagcgcttgatgaccttggggcgaatcaccttcatggaagcggtcatgaggccgttctcctgagtgaactcctcgggcaggatgatgaacttgcgtacggattcggcgcgggagacgccctcgttggcccgatcgacccactgctgcacttcggcgcgcacggcggcgttccttgccgcgtcctcgagggacatgttctcgtcaagccccttggcggcgagccacgggcgcaacgacttctcgtccaacgtcaccagggcggagataaacgggcgtttgtcgcccagcaccaacgcctgggagatgatctcgcaacgctggatgacctcctcgatcgggccgggggagacgttcttgccgccggcagtgatgatcagatccttcttgcgcccggtgatgtacaggaagccatcgttgtcgatacggcccaagtcgccggtggcataccagccatcttcggtgaacgacagctcagtggcctcgtcgttcttgtgatagcgcgggaacacggcacgacccttgacctgaatttcgccgtcctcggcgatgcgcagggagaatccggggaatgcgatgcccacggaaccagcgtggaacggcgtacccagcgggttgaacgcgcacggcgcggtggtttcggtcagaccatacccctcgtatacaggcacacccgcgccacggaagaaagccaacagttccgggtcaagcggggcaccgccggccacaatccacttggcgcgaccgccgagcacttcgcgcagcgaagagtagacaatcggatcgaaggcagcgcggcgagtgcgggtcagtgcacctgccttgccattggcggagacttccttcatatagttctgcgcagccaccacggcggaggcgaacaccacgcccttggggccgtggccggccttctgggacgcggcgttgtacaccttctctagcacgcgcggcaccacgatcatgagagtgggcttggccacctgcagatcgctgatcagcgtcttgatgccggtggcgatgtagatgcggacgttcgaggagacgacgatgtagttgatggcgcgggcgaaggaatgggcctgcggcaggaacagcaggatggtgttcctcttgtcgtgcagcagatcgggcatgtaggccggcagattcagcgcggtctggcagtagtgctcatgggtcatttccacgcccttcggcgcggccgtggaaccggaggtgtacacgatggagcacaggtcggtcttcttgaccgaatcgatgcgctcgtccagctcctcgtccgagaccgtggtgccgtaggccttgatttcgtccaagccaccggtctcgatggtgatgatgtgctccagggacgggcactcttcgacggccccatccgccttcttacgcatgtccgtgtcctgcacgatcagcagtcgggcatcggagttgttgacgatattgcgaatctgctcggcggaatcggtgtcgtagatggtggcgagcacgccgccgcacgccatgatcgccgcgtcggtcaggtcccagtcgtaggaagttcggcacatgaatgccacggcatcgcccttcttcaggccataatgaatcaggcccttggccacggcacgcacgtcagccaggaactcgttggcggtgacggtcacccaatcgttgccggacttgtaggtgtacagcggctcatcgcccatacgttcggcgcggtccgcatacaggtcgtagatggacgtaccttcgtccagcggcggattgccttcggtggaggtggtgagcaggccggtgatggggtcgatgtcggtgacggtcaggtggccgtcgtcccaatcgtcgctgtgaggcaaagcgatattggtctcgaccggcacgtcggcgttggacaggtaatcgggctcgtccggggtgtcgtcgtggaccgggtggacgaagtcggatcccaacctgagcgccttacgggtgagattgatagtgtgctgcgtgaaggaattgataaccgacaagtcttgctcctgtaaacctttcagtgtcgtccagccatgaggcgaacgcttctcaaagctcaaattgtaatcgcccaaaccgaactcgtcaccttacgcaaccgtaggattctggcgggttaggggagtgcgtggcaaaatattgcacaggtcccgatattgttgagtaaccgtgagctacgaaacggtgattgtcgataattactgagcggttggttgctaatcggtgccgggtgattgttggacgacttccgagcaattcatccgcaatgcacatggacacattcgtatttctcactaatttcaggttcgtttctgtttcgattggcggaatctcaagtcatggtctttaccttccgactacactttctatgcggataaccatgtccattttgaagtagaacaagaaagggctctcatggcgcaaaacccagaagccaccgtggtgttcggcgttttgaacgaaacgtccgaaacggaatcccgcgtcgcgctgacgccggatatcgtcacccggctgaagaggagcggtgtctcttcactgattgaagcaggtgccggcattgctgccgactacaccgatgaggattacgaaaaggccggtgcgaaggtgaccagccgtgacgaggtgctcgccgaagccgacgcgctcggttttgtggaccgaccgtccgccgagaccgtggccaagctcagggccggccagtgggtcattggcatgctcggttccttcaccgatgccgattacatggccgcgctcgagaaggccggtctggtgggcatcgccatcgaaaagttgccccgtaagctttccagcgcccagtccatggatgagatgacctctcagaactccgtgatgggctacaaggcagccatcaccgccgccgatgcttacggttccttcctgccgatgatgaccaccgccgccggcacgattcgcccggctaaggcgctggtgctcggtgccggcatcgccggcctgcaggccattggtacgctgaagcgtctaggcgcggtcgtcaccgcgtacgacgtgcgtcccgcctcccagggcgaggtcgagtccctcggcgcgaagttccttgatctgggacttgacttctccaagggccagggcgagggcggttatgcccgcgcgctgagcgccgaagagcaggctcagcagcaggctgccgtcgatgagaaggccgccggctttgacatcatcatcaccaccgccaaggtcccgggccgcaagcccccggtgctgctcaccgcagccggcgtcaagggtctcaagcgtggtgccgtgatcgtggactgcgcagcatccgacctcggcggcaacgtcgagggctccgccgtcggcgagcaggtcaccgagggcggtgtcaagctgatcggcgctccctacctggcctccggcgtcgccaccaccgcatccaacctgctttcgcgcaatgtggccgacatcctcgtgcacttcgtgcgtgacggcaagctcggccaggatctcaccgaagaacttgatgacgcgctggtggttgccggccgcgccgccgccccggcagctgctgccgatgccgagaagtccgagaagtaaggaagaaggaataccatgcctactctcgtcgtttccattaccctgttcgtcctcgcgctgctcatcggtatcgaggtcatcggcaaggtgcccgccaccctgcacacgccgcttatgtccggcgcgaactccatccacggcatcgtcatcgtcggcgttgtgatcgtggcagccgaagccaatagcccactggcctacgtgttcatcttcctggccgccgtgctgggcaccatgaacgtcgttggtggctacgtggtcaccgaccgcatgcttgagatgttcaagtccagcaagaacgagaagaagggggagtcgaagtaatgacctccgcaaccgttggcgccatcgacatcgtcgcatggttcgtctacctgttctctgccgtcctgtttgtggtcggtctgcatttcatgaattcgccgaagaccgcccgcaagggtaaccagatctccgcgttcggcatggtcgtggccgtgctcatggcgttcatcgtgcttttcgccaagggcttcgtgaacattgtcgccgtggtggtgctggtcgtcggcatcctgatcggtgccgtggccggtgtcgtctccgccaagaaggtgaagatgaccgacatgccgcagctggtttccgtgttcaacaccgtgggtggtggcgctgccgcactcgtggccctgaacgacatcctgaccaaggaaggcaccccggacatcgtggtgctcatcaccgctggtctcggtatcctcatcggttctgtgaccttcaccggttcgctcatcgccgccggcaagctgcagggcatcaagtgggtcaagaagctgaacctgccgggcaagggcgtatggaacattctgttcgccgtgctgtccgtcgcttcgctggttatgctgtgcgtccagcccgaacagcgcctgctgtggtcgattctgaccaccgtgttcgccctgtgctacggcttggtcttcgtgattccaatcggcggcgccgatatgcccgtcgtcatctctgtgctcaacgcctgcaccggtacggctgtggctatgtccggtctggcgattgacaacgttgccctgatcgtggccggcgcactcgtcggttccgcaggtgtgaccctgtccatcctcatggctcaggccatgaaccgtccgctgctctccgtcttggccggtggcttcggcggtggtgctgacgccgccgctgctggcgacggtccggaaggcaccatgaaggagaccacgccggacgatctggccgttcagctcgtctacgcgcagaaggtcatcttcgtgcccggcttcggtctggctcaggctcaggcccagcgcgagctcgctgacctcggcgaactgctcaagggtcatggcgtggaagtctcctacgccattcacccggtcgcaggccgtatgcctggccacatgaacgtgctgctggccgaggccaacgtgccctacgaggagctcgtggatctcgatgagatcaacccgcagttcccgcaggccaacgtggctctggtcgtcggcgccaacgatgtgaccaacccggccgctcgccgtcctggcaccccggtttccggtatgccgattctcgacgtcgacaagtcccagaacgtcgtggtcatgaagcgtggccgcggcatgggctacgccggtatccagaacgagctctacttcgaggacaacacccagatgctgttcggtgacgcgaagaagagtctgcagtccgtcatcgccgccgtcaaggaactgctcgcgtaaccattcttggctcccctcacagaggggagccaagctctatatctactacaacccaaacacccgcttaacaaagctgttaacgcgacgccaatagcggtccggatcggtgctggcgctcatcgtgtggtcggcgccgggaatcagcagcttctcgcggtcgatgctggcgcaggcgttgtaattgatgtccagatacttcggattgacaaaagtatccgctccgccgtgaatgaacatcatcggaatagtcgcgtgccgtaatgccttcacacaggaggcgtcctcaaaccggtatccagccttgcgtttagacacatgactggccactttgaccagcagcacggccaacgagtgcggcaaatggaacatcgcctcggcattatccgtaaactgtgagaccacggaactgtatccgcaatcggaaatcgcggcgacgacgttgcgggggattcgcgcatcgccggccgccatcatcaccgtggcggcgcccatcgaattgccatgcagcagaatgcgtgcatccggatcagctgcggtgatcagcgaaacccagcccaacagatcgtcgctttccagcaatcccatacccacgtaacgcccttcgctcaactcatgggcgcgctgcgcgggtagcaggaccgtaaaaccgagttgcgaatagcgatgcgcccatttggccatttccgcgggctctccggtatagccatggcagcagatcgcgtatagatgcggctgtgggtcggaacaatccgggtccaacagccagccgtggagtttccatccatcatggctgcgcagcgtgaccgattgcttggcctcctcgaaccaccggccggcctcaagctgctcggacatgtcgaattcgatgcctttcggcgtctcctcgtgcggcatgttgaacatcgaacgtttggccttggtgtccagcgcgaacatgaacatgacgttggcggccgcggctgtgacgccggctcctgtggcggctatcgcggcaagtgccgcagccatgcccctgacaacgcgagtgtgtgcggcgatgacgtcatggccatcctcattgatgacgtcgtccgaacgagtcatatcaacctcccgatacggtactcaccatcgtacgttatttttcgaaatcatccccaacttcgtgaaagaccgtacactgagtgtcgctgagcgtacgtttttcacgaaatggcgaacgatttcgtgaaaaccgtatgatgagaacgggtaagcgtacgttcttcacaaagttagggattatttcgcggaaaccgtacgttgacgtagctgggacggcctatatgcagtgtcatcgaagcatcattacgcaaagtccggggttggcgtatacttgacaattgttgctttggcgagggaagtgtgcatgctgacacatgacacagattccgttatcgactcggcgtatttcactccttgtagggtgtctttcggcgcgtcgtggcgtctgagcgagacagtacgaaacgaagatacaaggagtatccattatggctaccaccattaagcttgagggcgaggcccgttccgagttcggcaagggcgttgctcgtcgtctgcgcgttgccaacaagattccggccaccatctacgccggcggcgaagagcccgccttcgtgaccttgccgatgcgcgagaccaccctggccctgcgtcacaccaacgccctgttcaccatcgccttcgacggcaacaccaagatggccgtcgtcaaggacgtgcagaagaacccggtcaagcgcatcatcgagcacatcgacttcctcgaggtcaaggccggcgagaagatcgacgtcgaggtgccggtgttcgtggaaggcaccccgaagggtgctgccgtggcgttcgtcgacattcaggagctcaaggtccgcgccgacgtcaccaacctgcccgagaagatcgtggtcagcgtcgaaggcctgaccgacggcaccaaggtgttcgccaaggatgtcgtcctgcctgagggcgtcgagctggacgtcgaggatccggaagagtccgtcgtcaccgtcgaggtgccggaggatgccaccgagtccaccaccgctccggaagctgctgccgccccggctgacgccgccgctgctccggctgccgacgccaagtgagtcggtcgcttcgatagcgaacaattcagaacataactgaaacgtggaagcccgcagccgttgagaacggtgtgggcttcttcgttttttcaccatgtgaactctgccacacgagtaacacatgggtgtgcaaaagtatgcaacagagttcgcgccacaagcgcacagcacacaccccatatggtggctttcgggccgccaaagtcaagaagaagtagctagtgatgactgaaaacacgcaccacgatccggcagcactcgacaagctcaccgaaccgttcaccgtactgccgaacgacaaccccgcatccgatgagaagcgccagtccctcatcgacaagccggctttcggccaggtgttctccgacaacatgacccacatgacttggaccaagggcgaaggctggtccgaccgccgcgtcgaaccgtacgcaccgctcaagatggacccgggtgcttccgtgctgcactacgcacaggagtgcttcgagggcctcaaggcttaccgtcatgccgacggctccacctggctgttccgcccggatgcgaacgccgagcgtttccagaactccgccaagcgtctgtacctgcctgagctgccgattgacgacttcctcggttccgtggccgcgctggtcaagcgcgacgccaactgggtgccgtcccgccgcgagtacacgctgtacatgcgtccgttcatgttcgcttccgagccgttcctcggcgtgcgcgccccgcaggaggtcgactactgcgtgatcgcctctccgtccggcccgtacttcccgggcggcgtcaagccggtgagcatctgggttgaagacaagtggttccgcaccggccctggcggcactggtttcgccaagtgcggcggcaactacgccgcctccctgctcggcgagtacaagggtgttgagaatggctgcgagcaggtgtgctttgtggacgccgccaccaagacctaccttgaagagctcggtggcatgaacatgatggccgtgcacaaggatggccacgtggagaccccgtccctgaccggcaacattctgccgggcgtgacccgtcgctctctgattcagctgctgcaggacaagggccacgacgtggtcgagaccatgatcgccctcgaccagctgctcgaggacatcaagtccggtgaagtcaccgaggtgttcgcttgcggtaccgccgccatcatcaccccgatcggtcgcttcaagtccgagaagttcgacgtcaccgtcgccgacggcggctccggcaagctcacctgcgaactgcgcgacgagctgctcggcatccagctcggcgaagtcgaggacccgcacaactggatgtggaaggtgtgctgaactagcaccttttgtttccgactaagaccccttagaatgtcaacaattccaaggggtcttggcgtattggaaatgttcctggctagagaggtacagatggatttagcaacatttcgcaacaaataatatgatttaggtcttctgcacgttgcgggggttggttatggttcatccagatgagaacaggagcaaacctatgagcaagatgagtgacatgacggaatactatgcttcagcctactgtttgccgtcaggcttcgagcattgctcgaaactgaagccggtggcagaggcagcgacggcgttgcgtcggtggtgagacaagacatgagcttctggcgacgctgggggatgttcaatgtcagtaatggttcaaggtttggactgctgacgtcgctgagacaccttagcgtcgttaacgggtcaggttctggcgatcaaacgacggtaaaaaggggcttagcgtcgttagctgtacataagttggcacggcaacgacactggagcgcgtgatcgtcggtgccgtgccaaactttggccaacctccgacaaatgagaaggactaacgtcggtggctgctcaaagtttggcgcgctggcgacgctgtaagaaaaaagtgtggagtcgaaccggcaatagcatttattcggtttgttctctagtccaattgcgtcaggcaaggcctgttgtaggctcgggtacgacgggctgtagcgccgaataaggatgaacgggaacagaacgaagacggactgagacgaaccgaagcggtaccagaggggagcggctcatgcaggtggtgttggagaacaacatcgtttttgtggtcatcgagtatttagcaatcctgtgttggggattgtcgggcggacttgccgccattcgcaagagctacgacatcttcaccatcatgctgtgcggatggcttaccgcactcggcggcggtcttgtgcgcgacgtgatgctcggtgccctgccgccggtcggcatcaccgacaaaggctatgtgctcaccacgctgttttccggcattatcgtggtggtggcccacccggagatcaccaaactcaaatggacgatgactgtcatcgatgctctgggcctcggactattcgcagtcagcggcaccgcaaaggctctggcctacggttcctcaggcatgacagccgtattccttggcatgttcacagcactggccggcggcctcattcgtgacatcttcatcggcgatgtgccaatgattattcgagacaaacacctctatgccgtgccctcgttcatcggttgcattctgaccgtgcttgtatggcgtggtgtgcactacggttggttcgacatgtgctcggaaatgctgctcgacgtgctgatcgtcatcatcgtggtggcgctgcgcctgctctcggtcggcttcaacgtcaccttgcccggagccgtcgagcgtcatcgcgtctacctgcccagcgaaagccgatatctcaagcgcccggtcatctatccgcacgccgataccgtcgatcccggcgataccaccaaggacgaagaagacaagcctcaggatgattcaagaccgcctcagggctaactgccttcaaagaggtacatttggccttctgcaaaatgacaactgctttcaaagaggtacctgaagcacgaaacgtcgagtataagcgttgcaatgacggcgtttatacttgggctttctcggattcggtacctttctgaacggagatgtcatttcgcaagaccgccaatgtacctctttgaacggagatataaaaagtcccgcaagccagatgacttgcgggacttgctaaaaccttaagaggcttatgctcacagagcgttgatcgcaacagcgaggccggacttgcggttggcggcctggttcttgtggatcacgccagcgccagcagccttgtcgagcttctgggcggcaaccttgtaggcggcctcggcggcagccttgtcaccggcggcgatggcttcgcgggtggcgcggatggcggtcttcaggccggacttcacagccacgttgcgaaggtgcgccttctcattggtgagcacgcgcttcttctgcgacttaatgtttgccacgtttactccaaacgatgtgtgttataaggacatacaaaaggtagaggatagcatgagccccggaaaaacccgcgcaatgccacgccgaatacagtccctcggctacactaggtgaagtttgagtatatgccaagaggaggaatgcgttggtcgtccaacacaatcagccgggttccacggatcagtcggtgattcgcaacttctgtatcatcgcgcacatcgaccacggcaagtcgaccgtggccgaccgcatcctgcagttaagcggcattgtgcccgagcgcgagatgcgcgatcgcttcctcgaccgtatggatatcgagcaggagcgcggcatcaccatcaaatcccaggccgtgcgcgtgccatggacctttgacggcaccgaatacacgctcggtatgatcgacacccccggccacgtggacttcacctatgaggtgtcccgcgcactggccgcctgcgaaggcgcggtgctgctcgtcgacgctacccagggcatcgaggcgcagaccctgtctaacctgtacatggccatcgaccatgatctggccatcattcccgtgctcaacaagatcgacctgccgtccgccgagccggacaagcatgccgaggagatcgcaggtctgatcggctgcgagccgagcgacgtgctgcgcgtctccggcaaaaccggcgaaggcgtggccgacctgctcgaccagatcgtcatggac

SEQ ID NO: 3943 - DNA, 66051 bp, Unknown
  R22_24m  MAG No. k141_24731
atcgatctcggcccaggtggcgccggaggtggtgggcacaatgtccagcgtctctttgccctgagccttgagagtggaggtgaccagttcgacattgcgcatcagattcaccgtatcggggaagatgctggtgttcatctgctggaggatgtagcgggggccgtccgtggtcaccagataggtggtgttgatgtggccgtctccgtaaggttcgataccggtcacggcaccttccagcgcaaaatgcgaggcgatgccgaataaaacttcattgctttcggtcatgatgggtccgttctccaaaacgtgggatcaagcttcacgccaggcgatgccgctgtcaggcaggtcgaagtcctcggtggtgccgtcggccaaagtcaccgtggtcttctgcggctgatcggtgttgttgattacgcaatacagcccttgctcggggaagtgtgccacttcgcattccggattggacgagctccaggccgcatacttgtcttcgttgtgggaagcgtagaacagcacgcgttccagcagtcgggcgttggccgccgaatagggcaggccggcgatgtacacgccgcggcccttgccataatcgttggtcgcgagctgtacctggccgccgtccgcgcgcagcagggtcacgttttcattgaccggatacgtgttgagcacgggttcgccgaaatcgatgccgcccaacggcttgatggactggccgccgccgcagccgctcagcgggatgcggtagccggcctgctcccaagcctcgcgggccgccgggtcgaccggcacatcggcggtgatgaagtggtccggcaccaccggcgggaaatacttgtccaccgaaagggtctgatagcgctcctcgtccacgccaatcacgtcggccagctggaagaaccggcccgtttggaagcgcggtgccgagctcggctcgcccacgcccacgaacgcgccgccgccacgcacccaggcgcgcacggtttccacgagcttcgggttggtccacacatcgccgccggtgaatgcggtgtcgaccgggccgccgttgatgattacgtcgatatcgctatcgatgccatgcgcgagtacgtcgtcgaagctgatgaaccgcacgttcacgcgcatgccggacagggattccagaatgccgtagtaggagtaggtctgcttgttgggcagggcgtgtgccacggtgaacgccatccaggagcgcatcttgccccaggaattcagaatcgccacgttgagctcaccttcggcggccaccccaccggtgcggtcgtggatgtcgcggaattcgttggcgatatgggtcaccgtgtccacgaacttcgggaacttggcggccagggagaggtagccgccgtagcccatgcggctgatcggcgagcgcaggatcgcgcggcgggccttgcgccagttgtcgaggccttcgatgctcggatcgttgccctcgtagaacgtgtcggggaagaagtacggcaggaagcggccctccgtgtatttgacgccgggaatgtccgcgatcatgcgggtggtggtgccgtcgccgatcgaacccaccaccgcatccaagcccagctcgtcgaacccgtccttgtagggttcagtgccgatccactggtcgccgaggaacatcatggcttccttgcctgccgcgtgcgacatgtcggcaagccgcttgacgttctcgcgcacgaatccggagaggaagtcaatccagtcgcgttgcgacttgcggggcacgcgccacgcggagttgtaggcaccgccatccacgaaatcctccggacgcagacggtaaccgtactccttctcgaaatcgtccaatgcgcgcgggctcacggtgcaggcgcaaccgaaccagtcgaccaccttttcgcgacgcttggcatcgaacaggagcgtgaactggtagaagaacgtggtgaaacgcaccacatccacctgcgggctgtccttcagccactgctcgaacgtatcgaacacgaacttgcgggtggccggatggtagatgtcgaacggaatctcgtgttccttgtctccccaatcattggtcaggtggttgtacatctcgaccgggtcccagatgatgtaggccaggaaactcaccgtgtattcgtgcatcggcacggcagcggtcacgtgcacggtgtcctcgcccgggtcgagcgtccagccggacgggtccacgacctcgcccgtggtgcggtccacgacttcccagtacttatgagggtcggcgtcacggttaggcttgagctgttcctcgaagaaaccgtccatcagcggcacatccaccgcgttggactcggccaggatacgggcggtcagcaggtagacctgcggggtctcgtccatgtgcagggtgatccactcgttgtgggcgcgggtcgggaagtaggcgctgtagattttcttgccaagagcgagcactgcctcgtccagatgcgtgccgtcggagttgcggatggcgtccgcaccccacaattcggcgagttccttggtcttttcggcaaaattctcttcactgggcagcgtgaagcggccggtgctggtcatgagtgctcctttgtggggttggtcatcaaaaaactacaaagcgacgaattcgtcgcatacaaaatgaccggcgtcatcgcgggccctgggaccctgactgcgtagatccttgacgcttacggtgacgccggacgattggaatcgtgtcactgaatatgggagggacgttgcccggcaccggaaggagtgacacgacatgccgggcagcggattggttagcccttgacggcaccggcggcgaggccggactgccagtagcgctggaggccgaggaacagcacgatcacgggcagcacgccgagcaacgcacccatcatcagggcgccgcgatcggtgaacgtggccagcgagaccatgccgtacagaccgagggtcacgggcttcaaggtgtcggaagacaccatcatcaacggcagcaggaagttgttccacgtggccacgaacaggaacaggaaaatcgtcaccatggccggggccaggagcctcagcacgatggtgaagaagatcctcgcctcgctcgcgccgtcgatgcgggcggcttcaagcagttcgtccggcaccgaactctgtgcgtacgtgcggcccaggaagaagccgaacggcgaaacgcagcacgggatgatgatcgagagcatagtgttggtcaggtgcaacgtgtggaagatcgagtacatcgggatggtcagcagggcggacggcatgagcatgcaggccataatgatgccgatggccgcgttcttgccgcggaagttgaattttgcggtggcgtagccagccatcacagacacgatggtgccgatcaatgccgagacgcccgagtagatcagggagttcagcacccagcgccagaagttgccacgagtccagccaagcagcttggaatagttagtggcgatggcattgggcagctggtcaagcggcacagcaaaccacatgccgttgctaccggtcatctgggccggcgtcttggtggacgcgatgatggcccagtaaatcgggaacaggaagtagatcaacaccagtaccagcagcaccacggtgagggtcttcacggccgcggacggtcgcatggagcgaggcaaatcgtgttgcgcagcctgacgctgcttttcgagcttgcgctcggcctttttgcgggcgcgttcttcaacggttgcggagctcattactcgttcaccttcctttcggccaaggtgtacagcacggcaagcacacctgcgatcagagccatgacaatggcgatggccgaggccggaccgtcaccagacggggtaatggtgccctgagaagtgttcatggccatcatcatcggtgtatacgacttggaaatacccggatcagccgtagacatgatctgcggttcgttgaacagctgaatggtgccgacgatggaaagcagcatggccagcagggccgcgccacgcacgttcggcagcttgatcttcgtggcaatctgccaaccattggcgccgtcgatacgggcggcctcatagaggtcatgcgggatggcctgcagtgcggcaaggaaaatcagcatgttgtagccggtgaaggtccatgtggtgatgttggccatcgagccgagcacgatgttcttgttgaagaagtccacattgacgccgatggcggcaagtcccttgacgatcggcgagatttggccgttgtacaggtagacccagataatcgaggccacgacgccggggatggcgtagggcaggaagtagcccagacggaaaccggtgacatgcttgaccacgaacgagtcgatgacgatggccaacgccagtgcggcgatgatcatgatcggcacctgaatcagggtgtagagcagcaccctgccgacgccggaccagaagttgccggaagtaatagcatactggaagttctggaatcctacgaatttattgaccagctcgccaccgccgtatgcgccaccgccctcggtgacctgacggaagaagctggaatagatggcccagatgatgggcaagatgaacacgaaagtgaacaggacggcgaacggtgccatgaacgcccagccggtgcggttctcgcgcttctgagcgccggaccgcttcggcttggcggcggcacgcctaggtgctttgcccttcgcctgagtagtggatgcagtcataatacaaaacctgtcttcgcaaagaacagtaaaacaaatgacaagggccacagcgcccctgcagcaatacccccaaacaatacggaaggccggagtatgtgccccggcctttcgctatggtgatgcgaggcatcggaggtcttggacggccggctatttcaagccggcccgttgacaagacctagtgaggtcactccttgacggacagaccgaggttcttcagcgtatccaccgaggtcttctgagcggtgtcgaacacatccgaaaccttggcagaaccatcggcagccttggcggcggtctgtttcattgcagcgccgactgcggagaagccaggcatgtaggtgaagtcacccatgttgtcgttcgcggtcttgaactcagccatgacatcctgtccgctgaagtagtcggaccacttctgcggggtcttggcatccgcggtggtggcggccacgacaaggccctgggagacaaggtcatcaacctgggtgttgaaccagtcaaggaactccatggcttcggccgggtgcttggaacccttgagcacggccacaccggaaccaccatcggcgccggtcttggtgccattgccgaaccagtcaccgagctgggtgaccttccactcaccagcaccagtgccaccggcggaatcgatgaacagtggggcttcccaagcggcggccacggtgccgatcagctgaccggactggatggagttatcaaacgatgcatcccaacgcgggttggtgagggcggccttgttgtcgatcagctgctggtagacatcggccacggccttggagcccttagtctgggtgttgacaacccaggagttgccgtcgaccttgtaccacggaccggaagcgccggcctggccggacatcatcatcatggcctcatcaggttggaaggtcatgatgtacttgccttgggcagcggtcttcttggcggtctcaatgagctcgtcagcggtcttcggcacggtgatgccgagcttctcaaattcagcggcgttgtagaagtaagtcagcgggccggtgtcctgcggcagaccgtaggtcttgccgtccacctgcatcagtgcgaacgggccggaagcgaaatcgtccttgtacttggcggcctcatcggtgacatcctgcagaaggcccttggtgaagacctcaggaacctcggagtaaccgacctgagccagatccggcgcattgccagccttgacgtcggtctcgagcttcttgatcatgtcggcggcattgccatcgaacttggtggccttgacctgaatgttcgggtgctccttgttccacttggccacaatgtcgttgaccaaggtcatgccttcggaatcgggcagacgatgcatataggtgatgttgaccacaccgccatcgctgccggacttcgtgtcgccggcagtgtcgctgccgccgcaaccggccaaaccaatacccattgctgctaccgcggcaagagcagccacgatgcgcttgttgtgcgataccatatctctactccttcctagtgaaatcatcacctcagcgtgatgactgattgctaatttaggcctttgctcttttattgtcaacttagctaacaattaccgcgcgtcccgttgaggtgagtggcgttaaaccgattcgatgctcgattgtgcgggtttgttcatttcattaactccccttacaaagcaacgtacttttggtccaccggtagacctaatgagatattggatagcggcaacaatccaagacgttagcttgcaatcgtccaccacaaattgcaagcacttgccaacattatcggttttcaggttgccggcgcaatacccgactaggggggcaccgcgccttaatgagacgctacacgagcagtctcagcaactggtagagctgccacaggctacgcacgttgaagcgcgtgccgtcaaccgtggcgttcgcctcgccatcgcccacatggacgatcacggtgcgcccgttcacggtcagattaccgtgcatcgtgatatgattcatcttgcaaccttgttgattaaaggcgcaagccggtaatcaacgcaaaggcccgatgccgcaaacgtcgggccttttcttatcggctcacgccgattggcccgtcatatcaacggggacaccgcatgttacggcatcacaaaccaatatatcagcaccccggtggcgatcaagaagacaggttccagaaaaagaaaaagggcctgggcatgttgcccaggcctcggttcgcggacagggcgagattcgaactcgcggagggttgcccctcaacggttttcaagaccgtctctttaggccgctcagacacctgtcctgatgcgcgttcacacgcgcaagtattcattatacagaagggagggatgttgatattcggcagtgcggtcggtcttggattcgcctgctggctattagcgatctctccctcagtcagctacactgacagctcccccattaaagggagctaaagcacgatgagactcaggcctcccacttagtgggctcgatgacttccttgccgcccatgtaggcgcgcatggcctgcggaatctcgatggagccgtccttctgctggtggttctccatgatggcgaccagccaacgggtggtggccagcgtgccgttgagcgtggagaccggacgggtgccgccatcttccatacgctcgcggatgttcagacggcgagcctggtactcggtgcagttcgaggtggaggtgagctcgcggtagcggccctgggtcgggacccaggcctcgcagtcgaacttgcgggcggcggaggagccgaggtcgccggctgcggtgtcgatgatgcggtagggcacttcgaccttggcgagcatctcctgctccatggccagcaggtgctcgtgctccttgtaggagtcctcctgcttggcgtagacgaacatctccaccttgtcgaactggtggacgcggatgatgccggaagtgtccttgcctgcggcgccggcctcgcggcggtagcaggaggaccaaccgcagtagcgcagcgggccgttgccgaggtcgaggatctcgttctcgtgcatgccggcgagcgccacttcggaagtgccgaccaggtactggtcgtcgggctcgcgcagacggtagatctcgtcggcgtgggagttcaggaagccggtgccgcgcatgacctcggggcgcaccagcgtcggggtgatggccagcgtgaagccgtgctcctcggcctggtccacggccatggtgagcatggcgatctgcatacgggccacctggccacgcaggaagtagaagcgggagccgccgaccttgacgccgcggcgcatgtcgatgccggccacgccggtgccgagggtcaggtggtccttgggctcgaagccttcggccgcgaagtcgcgaatctggccaaccttcttgacgaccacgtagtcgtcctcgccgccttcgggagcttcgggctccacgatgttggagagcttccacatggcggtggtgtattcctcggcggcggaatcggccttggacttgtattcggagaccttctgggacagttccttggtctcggcgatgagcttggccttctcgtccgccggggcggaggcgaccttcttgccgatttccttctgctgggcgcgagcctcttcgaaggccttcagcgcctcacgacgtgcggtgtcggaggagagcacttcgtcgacgagttccacggactcgccgcgcttgcgctgggattccttgacgatatcggtgtgttcacggatgaattgaatatcaagcatgggcaccagactagccgcgtaagcagacaccgacaatggccgaatgcgcgggagtcacgcggaaatcacagggaagcccgggaaagtccgcggacgggtccacccggccaatttcgtcagatgagacgcgattgaaccataatcgcgccccacggggctgttgcgtgcaggaaatgttcacgtacggcgcaccatggccgcaaacgacctccccaccgataacaataggagccatgcctcagcctgccctcaccgtgtttctgatcatcgccgcaatcgccattgtggtggtgctcatcgccgtcatcgtcatcgccctgcgcgcgcagcgccgccgcaagctggctcagacgctggagaagcgccgggacgacgaggtgcagtacgccttcatcgtgaatccgtccaaaccgcaggccgaagcccgccggctgcatatccagaggttctgcgaggccaaggggctcaatcgcatccgcttctacgacacccagcttgacaaggacggcagggtctgcgcgcttgaggcgctggaggacggcgccgacgtggtgatcgcggtcggcggcgacggcacggtgcgcacggtggcgagcgccgtctccggcaccggccatgcgctgggcatcatccccatcggcaccggcaacctgtttgcccgcaatatgggcgttcccgtggacgatatcgacgccgcgctgaccgtggccacctcccacggctcccgcctggtggacatgggccgtctcaccctgctcgaccacccggaggacgaccacggccacgccttcctcatcatcgccggcatcggcttcgatgcggccatgatcgacgacaccaaccccgagctcaaggcgaacatcagctggctcgcctacttcgtgggcggcgtgaagaacctgttcgcgccgaagttccgcggcacgctgacagtcaccagcgccgacggttcgactcacaccatcaagaatctcgatttccgcacggtgatggccggcaactgcggccagattcccatgttctcgctgatgccggcggcatcctatgacgatggtctgctggacttcgaaatcatcgacaccaccggcggcatcctcggctgggccaacctgttcggcgacgtggtgcaccagacgatcatcggcaagcccgaacagaacccgctgtccacgaactcgaccatcgaacaggtccagggtgtcagtgccgaaatcacattggaaaagccggccaaagcgcaggtggacggtgacatgctgccggaaacccgccacatccgtttctcggtggatcaccgcgcgctgatcgtgcgcgtgcccgacgcctccgcgctggaaaagaccgcgcaggccgctgcttcaaatgccacctcgaatttcgccgaaatgaccggtacactcgagccgattcgctgattcgccaatccgctaatccgttactacgatgcgtggccggtgactcgggcgacatgcatcgccaaataagcgatttcgtcgtcgctgatatccgtgtcgaggcgcagttcgagcagggaggcgatggttcgcgcgcatcgtagcgcagcggggtaggactcacgaatcaccttcatcaccggtgccggctcgtccgtcagttgctggtgctggtggatgcgtacgaacaggtagcgcaggtgggtgatgaaccggcccacgttcacggaactgcggtccaacgtgatgccgtagctgtggtcgatgatgtcaagcagttgctggatcacgcccgtcatcgtgtacgtataggacaggtcgccggtggcgaagccggcgttgaccagatgcatggcaagcgcggtggcctcgccgtccggcagcgtgacgtcgagccgtgcattgagcgatgcgagcatcgcacgcccctgcgcgtattcctgcgggtacaggttgctcacctcgccgagcagcgggtaggtgatgtcgatgccgcgccgcacccgctccaccgcattcgccacgtggtccgacagggccatgaccagcgtggtgctgccggtctcgcgctcccccagtccggtctcctgcatggattcgacgaccacgcggatgatttcgggcggaatgtccgccagcatctgcgccagatggtcagggtcgcgcccgtccgatggcacgaaggtgcgcacaactttcgactcgtcgaccgtctgccccggcttggcctggaaccccagtccgcggccggtgagaatcacctcaccgccgtcgccgcctttggcgagcacgacgttgttgttgaacactcgcagtatttccatggcatcctttcgcaacgtcattgttccacatcgatgatcgggctgccggctgatacggttttgcagtcgccgccgttgtcgtcgctgctaccgtcgccgatcaacggcgtgaccacggtcagttcagcggcgttgaccaccgtcaccaccaccacaacgctgtgcccggccgccgcgactttgccgaaatccacggtggccagtggctctcccgccgcgatccgctcgcctttgcccacggccacgacgaatccctcgccatccatattgacggtgtcaatgccgacatgaaccagcacttcgatgccgtcatcggttttaatgccgaaggcatggccggtccgggccacggttttcagcgtgccactgaccggtgccagcacggccgtctcgccggccgtctccggcacgacgcctacaccctcccccagcgcgcgggaggcgaacaccggatcgccagtcgcttccagattcatcaaccggccggcgaccggcgacaggatggcgttggagtcaggagtccgatcggaggcaggccgcgatggggaatcttccgcagactccgcatccgacgatgtcgcgccaatccctctcaccgcatcctgcgagcgtacgttctcgcccgccgagaccatctgcgcctccgtggcgcgcggcggcgtacggtacccgaacagcaccgtcagcaccatcgccattacaaacgcaacggcgatggacagcgcgtacacccacattctgtcaaacaccgaaatcgtcagcaacgaggagaaggcgaacgccgtggtcgtgacgccccggaccatctgaccggatggcagcacggacgggaacagccagccaagcaccgcgctggtcacgccgccggccgcgcagccggcgagcagccagcggtagacgcggcggtgatgcagatggatgccgtacaggctcagttccgaaacgccacccagcaatcccgcgagcaacgcccccaccgcggtctgccgcatggccgaatccttgccgcgtacggccagcacgagcacgccggcggtggcaccgaagcaggcaaagttccatacacccatcggaccttggacgaaatcgtagccgagcgcctgaatgttcatcagcatcagggcattcaacggccagtgcagaccgagcggcacgagaaacgggtagagcatcgggatgatgagcgcgaataggaacggcacgtgcgcgttaagccatgctgtggccgctcccagcccaccgccgagccatattcccagaggcccgatgaccagtatggtgagcgcaaaaacgacgaccagtgagaggaatggcacgaacaccagctgtacgctgtcgggaatgacgcgcttcaacccgtggtagaccacggcgagcacggcagccatgagcaacggcacgaagacgttgccgccgtagtcgttgagttgaatcggtatgccgaacgccgacacggtgcaggtttcggcgccgaatacggcgttggccgagcattgaatcgccccggagagggcgctggatacggacgtcccggacattccggacattccggacatcacgccagtaaactgcggggtcatcagcgcggccataatcgcgccgccgagccaggggtcgacgtccagtttcttggccgcattgtaggcgatcataatcggcagaacggtgaacacaccctcccaaatcgccttgagtagtatccagccggcggaggtctcgccgtcaggcacgatgccgagtgcaacgatcacgttgacgatggcgatgaccagcgaggcaccgagcagtacacccagaatcgggcggaacgagtcagacaggtagtcgaaaaacgcggcagcccaagcgcgggcggcactgccccactcgcggacggtacgaggcgtgaagtgacgggatgtattggatgggccgcaactttgttcggcgtcggtggcagtatcgcgcgatggtgcggcatcgtcggaaaggtacggcgcggactgcgcgggttgcgtgggctgtgtggattgcgctgactgcgcgggctgcgctggctgagtgggctgcattggctgagtgggctgcattggctgagtgggctgcattgactgagtgggttgcgttgactgcgacgctgactgcatcactgccgatggcaattgcgctgccggcatcaatcgcgccgtccgcagccgaacgatctgctcgtacaccgaggcgaccgctccgccgatgatgacctgataacgattgccggatcgcgggaatgcaccgaggactccggggatggattcaagaccgtgctggttgacatggccggcatcggccagttcgaagtgcagtcgcgtggcgcaatgggtcaggctggtaatgttcgcggggccgccgacggcatcgacgatgcgcgccgcaatcactgcaggcgttgcgttcgatgcgttcgccacggttcctccttgctgccgtatgccactgtgttccattatcggcgctgggtgccccaaaagcacggcaatgccggcaaagcatcgcgaaacggcaactatgcgctacggtgctccgcgatggtgtcccgccataatgttccgcgatgatgcttcgccacacccgttctccgtatttgccgcagcgcccattccgacatcattccaccatgcagaatcctgcaatcgttgtcaaaaatcatcgttttttgccgcctattcggagtgtcgcgactgcggaagtcgtattctatctttcacacacgttgcgtagcagggttgttactcaaaacgaggcaagacctggagcgacgtggaatttgcgtatcgtaatatgcgaattccacgttgttccaggtctttttttgttttcgggcgacttcagacaatcgaagcctgaccttgcacgcggcagaggggccacgcaacaggcgcggtccgtcaacggcgaaaggacaaggcaatgacgacgacaacggcatcacccgtatcgaaacagacggcatccgcggcgcaggaaaccagcgcaaccggtgcggcggccaccgcaatcgaaaccatcgaaaccggcgtggccggagtggcgggcgcggccacaaacgcggcagccaacgcaatcgaggacctcgaagccgccgaatcgcacggcttctccacgcgcttcccgctcaacagcgcattcatcttcaccttcggcgcgctcggcggcatgctgttcggtttcgacaccggcatcatctccggcgcctccccgcttatcgaatcggacttcggcctgagcgtctctcagaccggcttcatcacctcctcggtgctgatcggctcgtgcgcaggcgcgctgtcgatcggtgcactgtctgaccggttcggccgcaagaagctgctcatcgtctccgcgctgctgttcctgctcggctcaggcctgtgcgcctcctccaccggattcgcgatgatggtgtgcgcccgcatcatcctgggtctcgccgtcggcgcggcctccgccctgaccccggcgtacttggccgaactggcgccgaaggagcgtcgcggctcactgtccacgctgttccagctcatggtcaccttcggcattctgctggcctacgcctccaacctcggattcctgaaccacaacctcttcggcatccgcgactggcgctggatgctcggttcggcgctggtgccggccgccttgttgctgctcggcggcctgttgctgcccgaatccccgcgttatctggtgaacaagggcgacacccgcaacgccttcaaagtgcttacgctgattcgcaaggacgtggatcagacccaggtgcagattgagctggacgaaatcaaggccgtggccgcacaggacaccaagggtggtgtgcgcgaactgttccgtatcgctcgtccggcgctggtggccgccatcggtatcatgctgttccagcagctcgtgggcatcaactcggtgatctacttcctgccgcaggtgttcatcaagggcttcggcttccctgaaggcgacgcgatctgggtgtcggtgggcatcggcgtggtgaacttcgtgagcaccatcgtggccacgcttatcatggatcgtttcccgcgcaagggcatgctgatcttcggttccaccgtgatgaccgtttcgctcgcggtgctcgccgtgatgaacttcgtgggcgacgtggccatgctggcagtgccgacgatgattctcatcgctttctatatcctcggctttgcggtctcgtggggcccgatcgcctgggtgcttatcggcgagatcttcccgctgagcgtgcgcggcatcggctcatccttcggctcggcggcgaactggctgggcaacttcatcgtctcccagttcttcctcgtgctgctcgatgcgttcggcaacaatgtgggcggcccgttcgcgattttcggcgtgttctcggccctgtccatcccgttcgtgctgcgcttggtgcccgagaccaagggcaagtcgctggaggaaatcgagaaggaaatgaccaagcgctagacaaccggcacacgattcgcacaaaagttgacaactcttaacataagagtacccaaagtggcgaaaaacgtggcagaatagggaacatggtagcaaacaatgcgggtcagcccgccaccccagcagatctgattaatgtcgatgaggttatcggcaagtactatgacctcgtccccgatcccgaagtccccgagcagcgtgtcatcttcggcacctccggtcaccgcggatcgtccctgaagacctcgttcaacgaggcccacatcatcgccatctcccaggccatcgccgaataccgcaagaaggccggcgtcaccggcccgctgtacctcggctccgacacccacgcgctgtccggcccggccaagaagaccgccatcgaggtgctcgtcgccaacggcgtgcacgtgcgcgtcgactcccgtgacgacttcgtgcccaccccggtggtctcccaggccatcctgacccacaaccgtgcggtcgacggcacccagcgcttcgagggcgagggcctcgccgacggcatcgtcgtcacgccgtcccacaacccgcccaccgacggtggctttaagtacgaccccgtcaccggcggcccggccccggccgagaccaccaacgccatcgccgctcgcgccaacgagctgctcggcgacttcaagtccatcaagcgtgtgccctacgaggaggccatcaagtccgagtacgtcgagggcttcgacttccgcgagcactacgtggacgacctggagaacgtcatcgacttcgacgtgatccgcaactccggcgtgcgtctgggcatcgatccgctcggcggcgcttccgtgaactactggccgctcatcaacgagaagtacggcctgaacatcggcgtggtgcgtcctgaggtcgacccgacctggcgcttcatgaccatcgaccacgacggcaagattcgcatggacccgtcttccccgtacgccatgaagggcctggtcgacgagctcaacgccggcgcttgggacaagtacgatctggtcggcggcaccgacccggacgccgaccgtcacggcatcgtctgcccgaactggggcgtgatgaacccgaaccactacatcgccgtgtgcgtggagtacctgttcggcggcaaccgtccgggctggcctgagggcgcagccgtgggcaagacgctggtctcctcttccctgatcgaccgcgtggccgcatcgatcaacgcgaaggtcatcgaagtgccggtgggcttcaagtggttcgtggacccgctgttcagcggcgaagtcgccttcggcggcgaggagagctccggcatgagcttcctgcgcaaggatggccgcgtgtggaccaccgataaggatggtctgatccccgacctgctggccgccgagatcactgccaagaccggcaagaacccggcccagcttcaccaggagcaggtcgagcgcttcggcgagtcttggtacaagcgcgtcgacaccccgaccacactggagcagaaggccaagttcgcggcactgtccggcgacgacgtgaccgcctccaccctggctggcgaagacatcaccgccaagctgaccgaggcaccgggcaaccacgccaagatcggcggtctgaaggtcaccaccaaggacaactggttcgccgcccgcccctccggcaccgagaacatctacaaggtgtacgccgagtccttcgtctcccccgaggctctggacaaggtgctcgacgaggccaccgtcgtggtcgacaaggccctgagcgagtgaaatcactgcgttagtcgcgttcaccgcaaccaataaggctctgcattggattcatacaatccactgcagagcttttttagcgcatatgcagttcgcgaccactgaaacacgcaggtcaacggttctcctcatgcaccgtgactgcattttctcaacatcactgcagggcaggacggccagatgaccgcgaaacgttcgcctgcctaccatcatcattgtggggtcacagcggccagatgaccgccgaagcgttcggtcggcttgcatcatggtcgagttttaacatcgttgtgggacgccacgacgaatttgcccattccagagctgccatcccacaaaagcgtgggacaacagctaagtcaatcgttttacatttccccccatcccacacactcaaactggaaaccccggaaagacgccattcctgccacacccgtcacagccattacccgaggggccgtgggacgccacgcaaaaatcggcaaaacatgcgtagcgtcccacacccattggcgcaaatccacgcccaatgcaccgacaacacccccaatcgaccactatgacacatttccctccacaatcgaacactagtcattcacgaaatccatcactacgaggcatcgcaatcgaacggcatgcaatatcaagcacacaccacaacaacaggtcgcacaaatattgcctttacatcagtccgtttcggacatcatggtcacagcaggctctgcgccaactcttcaagagacatggctactacatgaaactcgaatacggcaccgcgcgaagcaagcgccctcgccacgttgaaagcgaattcagcacgagcatcctcgttagcgatacttgctgccgtggcgacgaagaccagccatctccgcccgaccagcacaccccttttctcttggtcacggcgccattgagtcttactcgtacgatgatgatcgccatcatattcaacagcgaccttgaactccggccacgctaagtccaacgttatgggagctccagatgcaaaagccgcgtccggcaccacatagttcgcaaccggccgtggaatcccatgcgctaccagagagagtcgttcttctgattctttgggcgaatcagcaccaggtgatatcagaggcaatgctcgaacgcaggacgggcgccctctgaatcgggtaaattgctccacgaacttcaccagatcctgatagattgcagcagcatcacgatccttggccaatactggctgtttgctcgtagcagcgatgacggcatccccgagcacaatcagggactcaaaagaaacatacggggcaagttgagcccatacgtgaaacaggtccagcgcaaacacgtgttggttcatttccacattgtcggctttagccgcatgtttccaaatatgcgtttgcagtggtgcatggcgtgtacgaaaccgcctgctcttaacgctggatacagtgtgcagcttggccgagtcgaggtcgcaatcggcgggaatcggtacggattgcagagcgagggaagtggtcatgccgaaaagcagcttcttgcccgcccgtttcgcttcctcagtgcagcgtgcgaccatgtcgcgtctgcgctgggcgaggctttcgctcatggtcggtgtcgctgcagaatcatgtgcaccactgttcggcgatgacgagtcgcgagaagtcgggtatttcgagtcagtagaaaatgatcccgcaaattcgggcggaacaaaaactgcctccgattcttccggaggctgatcgtatatagagcctggcagagctccatagttggtgatgccgtcggtcatcctgttcatgacaccaccatatgggtagtgggtgcggaaacggaagccgatccgaggtatgtggtcctagcttcacttacgcacattcattgtggataaccatgtggacacctcacttatacacatagtcatccacctcttcaaccccgatttgacacactaactgtatctgatatgattacagtatcataactgtacacatcatagttacagtatcgactcggtaaggaggtcgtttcatgaacggcgaccattcactggcagtgcacgcattggtctaccttgaccatcgcgccacacacctgcccagtcagatcctggccgagaacatatgtaccaatgcggcgcgcgtgcgcaaagtaatgcgaccgctcgcctcagccggactcatcgccactaaagagggtgctgaaggcgggtacgctctggcccggcccgccgccgaaatcactttgcgcgcggtagcggaagccaccggcaccacttttgtgaaagtgaactggacaccgggcgacgtacacgaggactgtctggtgtcatcttcaatgggcgcagtgatgaacgacatctatgccgggctcaaccgcacttgcctcgaacaactcgaacacaccaccatccacgacatcaccgaacagatattcagcgagcgcaaaggctaataatcccgcgcgtttcccctagccagcatcagtcgataacgcttcggcagtcaaagaagaaaacagacgccgcacggcacacaacacatcagcacaacgcactcttatcactcgaatacgtaaggaagtaaccatgtccatcagcacacccaatgccatcagcacacccagcacctcccccactatcaccaccgacgccctgatcattggattcggcaagggcggcaaaaccttggctgccaagctcagtgcagccggccgcaaggtcgtcgtcgccgaggcaagcgccgacatgtacggcggcacctgcatcaatatcggatgcttgccgtccaagtcactgattttgtccgccgaacaggcgcggcgggatggcgcgaacagtactcccgaaacccgcgaagcagcgttcgaggctgctatcaaggagaagcgccgcgtcacttcgatgctgcgcgacaagaactatcacaagctcgccgaccaagacaacatcaccgtaatcaccggccgcgctcacttcaccggccctcatagcgtggaaatcgccaccgctgagggcccggtcgccgtgaccgccagcaagatcttcatcaataccggtgccacgccgcgcattccggatattcccggtatccacactacgcccggcgtctacaccagcactggactgatggatctcgacgatatgccgcagcgactggtgattatcggttcaggattcattggacttgagtttgcctcgatgtttgccgatttcggcacggcggttaccgtgctgcagcacaatgccgagttcctgccgcgcgaggatgcggatgtggcggccgcgattcgcgcacagttggaagcgcagggcgtcaagttcctgttcaacgcggataccaaggccatcgcgcctgctgctgacggcggcgtcaggttgtccgttgcggtgaagggtatggctcgcggcgcatcgcaagcttgcgattccacccccgccggcaccgggaacgctcataccgatatcaccggtgccaccgacgccaccggcgccaccgacactacaacaaccaccagccccactagcaacccgaccgatcacgccacgatgtcacacgttcaaacgaaaccatcagacgatggcgagccgcggttcgccgagccggctgaagcccgattctgcctgaccaccgacgcggtactggtggccaccggacgtacgccgaacgtcgagggactgcatcttgaggcagctggcgtggagctcaccgaacgcggtgccgtgaaagtcgacgagcttctgcgcaccacagcagccgacatttgggctctgggcgatgtgaacggcggcccgcagcacacgtacatttcgctggatgactatcgcgtggtgtggtcgcagctcaatggttccgaccgtccgtacacggtgaaggaccgcaagcatgtgccgtcgagcacattcctcgccacgccttactcgcgcgtgggattgaatgagcgcgaggcgaaggcggctggattggattatgtggtcaagcgattgccggtggccgctgtgccgaaggcccaggtaatgcggcgaccggatggtctgatgaaggcgattgtggaacgcaatactggccgcattctgggtgcgatgctgctttccgtcgagtcgcacgaggtgatcaatatcgtcaagttggcgatggatcttgacgcgccggccagcacgttgcgcgatatggtgttcacgcatccgacgattgccgaggcactgaacgacttgttcgcgtagtttgtccgcatagcacgcccgcgcagcatgacccgcgtagcgcagcccgcaacagactcccctaatgcgcgcgaaggtcctcatcgacgtaaaccgatgaggaccttcgcgctgtcgtcatgatccgtacgtgacagcaatcacgtccgaaccagccgttacttcaagccgagcttacggtccagaatgtcggaggcatccaatcccaagcggcgtcggatgaaccagccaagaccgagcggcaggccgggagccaaggccatgccgcctggaccgagtgccacggttttggagttgcctgcgataagcatggtgcccttggatgcggccgtggccgtcgaaccatcgctgtccgcctctggtttgaggatttcgatgttgccgtcactggttttgtacagtcccttattctcattccagataccggatgcgccattgttgccggcctcacccgcagagaggaaatgtcttgtttttcttgtgagcgctcacctattcacgcgcgatggcatgtttttcaagcaaagtcaataggtgtgatgttattcacactcttcactacgttgttttgcctcgcactgggcaaccccacttcagcaagagattgcacaacttgcgttagggtggagaacatgactatcacagtatccacagatgggtccgcattagggaatccaaacgggccaatgggctgggcctgggccgatcatgagcagaacgccggcggcaagcccggccataagcacgacgaccatggttatgatgcgggcggcgcgaccaacggcaccaatcagattggtgagctgtgcgcagtgctggaagctttgcgagcgcacccgggccctgagccattgctcatcgaatcggattcgcagtacgccatcaattgctcgaccaagtgggtcaaaggctggaagaagaacggctggaaaaattcgcagaaaaagcctgtgaagaacaaagagcttattcaggcgatcgaccgtgagatctcacaacgccctggcccggtggatttccgatgggtcaaaggtcacgccggcaacgagggcaatgagttggtcgatgaactggcacgcacctatgcgggcgattgccgttcgggtgcgcgcgacggctatctgccgattgaaggctggcagtcgctactgggctccgaatacgcacatggcaccgatgtgcctccagacgtgcagttggtgctggatggcaaggcggatgcggcaagtttgcgcaagccggctgcggcgacggattcgacggatgccacaaggccagagaccaagtcttcgtcacccttagcgacacaatcagcgcaacctgtacaatcagcgcaccccgtacaccccgcaaagccaagcggactgacggtatccggtacgctgaccttctcccccgcgccgaaaacgagcccgtatttcaacgggcagccgatgccgatcaaaggcagcatcgaaatcgaaggctatgtggacggcgacggcaacctgaccatcgccaacgcaccattcgtacgacactaacacccaaacacacgaatatgtaccgcaatcggacacgatgacacaaaatcgctcattcgcgttaggataggagataaggcttcacgccgttgatccatgcggcggaggcaaggatggcaaaggagaaaccatggataaggcacagcaggatgcgctgaagaaggcggccggcatcgaagccgccaagctcgttgaaaacggcatgatcgcaggcctcggcactggttcgaccgtgaagttcctggtggacgagctcggccgccgtcatcaggaggaaggtcttgagttcactggcgtaaccacgtctcgccgcacgcaggtccaggctgaaagctacggcatcaagatcgtggacatcgacgacgtggaccacatcgacgtgaccattgacggcgccgacgaagtcgacaagaacttcaacggtatcaagggcggtggcgctgctctgctgtgggagaagatcgtggccaccaactccaaccagatcgtgtggattgtggacgagtccaaggttgtggacaccatcggcaagttcccgctgccggtcgaggtcattccgttcggcgctggccacgtcatcaagaagttcgaggaccgcggctacaagccggtgcttcgtcttgacgccgatggcaaggaagtgcgcaccgacgagaacaacttcgtggtggacctgcacctggagcgcatcgatcacccgcaggagctggccgaagacctcatcaacacggtcggcgtggtggagcacggcctgttcctcaacatggtcgacaaggtcatcgtcggcgacccgaacggcccgcgcgtgttgaccaacgccaacaagtgatcgtctcacatcactgaacttttccaagcccgcatctgtacatcgcaggtgcgggctttactgttgcccgaacaaggcaaaggagccaaaaagagaaaccccgcgaccataacgatcacggggtttctaatgccttgattgcaggtaagactacttacgctggtggcgggtcttacgcagcagtttgcggtgcttcttcttgctcatccgcttgcggcgcttcttgatgacagaacccatctgaagcctccatttcgattaatcgtaaaagttgcaacttgcaccataatacacgtgttgccagacagaggaaaccagtatgttgtcgatagtccgcatatgccctgaacgcagttggggcatccacatcagcaatgtggatgccccaatgttcataagtttgtgcagcagctgacagccgatactagatactacatcgggaacttctggtagaagcgatcgaccgcttccttggtgccggtagcttggaagaccacggtatcgttctgccagatggcagcggcgttcttgctgttggaggcatcggccttcaccacgtacgcgcccgtgacgttgccggaaaccttgacgttgccggatgccgactcatcgccggtctgcgcagcgaccaacgcatcgtactgggtcttggcattgtccgccgacgaccactgcgcggcgaccagcgtgacatccttggcggcatcaccagtggagtaggtcagagtgtactcctcgagcggcgatgcggaattccacgtcgtggaggcatccgccttggtacgcgcgtaattcagcacgctgtccggcatggccttcaacagctcactggcatcatccggcaaagctgtggcgtcgatggtcggcttgatcggctcggatgattcggttttctgctggctgttttgggtggtagtggaggtgccatcattcttctggatggcccaacccggccacacaaaggccgaaagcactgccaggataatcacaacagctgcggcaaccaccactgcaatcaacttgccatgggattgtgtggtcgaggagttctcactattagtcataccccgattctctcacagccgcgtgacgctagacggccgtaatcttagtcgttgtgcgcaagccgcgtgaaactcttgtgaacggtaaaaatttaccgtccgctggtgtttgggttagggtgagaccatggcgaaatcaagtgtgcagtatgtatgttccgaatgcggttggaacgggccgaagtggtacggccgttgccccgagtgtggtcagtggggcacggtcgaggaatttcacgaggctcggccggcggcaggctctcgcacggccgctcccggccgaacatcacgcacgcagtcggttacggttgccgacaacgccagatctgcagcccgtccgattaccgaagtgggcacggaaagcgtcgagcggctcggtaccgggttttccgaattcgaccgtgtgctcggcggtggcgtggtgccgggttcagtgacgctgatagcgggcgaaccgggtatcggcaagtcgacattgctgttgcagacggccggcaatatcgcgcgcgttgtggcgggagacagtacattccgaggagccggtcagcggtctgcccaacagtcgggccgggcgcagggcggcacatcaaacacggtgtcagtacagggcaacgcaccgtcggtacatgccaataccgtgctgtacatttccggcgaggaatcacaggcgcaggttcgtttgcgcgcttcccgcatcaacgcggtggagccgaacttgttactggcctccaccaccgatctgtccacagtattggggctgatcgaacagaacaagccggccttggccattgtggattcggcgcagaccatcgtctcgcaggaggtcgatggcatttccggcggttcgactcaggtgcgcgaagtggcaagcgcgctgatagataccgctaagacgcttgacattccggtatttctggttggtcatgtgaccaaggacggttcgattgcaggcccgcgcacattggagcatctggtcgatgtggtctgccaattcgaaggcgacagcgagaccgcgctgagaatgttgcgagcggtgaagaatcgttttggtccgaccgatgaagtcggctgtttcgacatgagcggtgagggcatcgaagaggtcaccgatcccgccggattgttcctgtctggagacggccctgatgcggccaacgcggcacccatggaaggcacctgtgtgacgttcacattggatgggcatcgcagtctgcctatcgaagtacaggctctggtcaccacgtcggtgctgcccacacctcgacgtgcggtcaatggcgtggaccccagccgtatcgccatgctggtcgcggtgctctaccgtcacagcaagctcaacctgctgtccaacgacctgtatatctccactattgccgggggccaggccaaggagcccggttccgatttggcgatagtggcggcactggcgagcgccgccacgtcaaaacccattgcgcgagccacgtgcgccattggcgagatttccctgaccggtcaggtgcgcccggtaccgcgtatggaatatcgccttcgcgaggccgcgcgccttggctttacgacggcagtcattcctccgctgcgcaagccggtgcatgtcgagggacttcggctggtggagtccaacacattgtccgacgccttagatgccttgggagtgcgtaaatagccctgagatatgcctcaggcggtaagacgcttggtctcttcgacgttacgcttgagttcgtcaacgagttggtcgggaccatcaaacttgacctgcgggcgcaggaaaccgacgaattcaacgcgaaccttatggtcgtacagatcaatccactcatcggtgatgcaataggcctccaccacgcgttcgttgagtcctgttttctcgctgaaggtgggtttggtgccaatggagatggcggcaggccagcggttctcaccatctaccagccaaccggcatagacgccgtcgaccggaatgtagcctgcaatgtcggagccaagattggcggtgggaaatccgatggtgcggccgcgctcctcaccgtgtaccacttcgccttcgatggcgtgcggagcacccagaatggcgttggcatcctggattcggccatgagccagcaggtagcgcacattggtggagctccaggcgcgcattgccttggcctggttcttcttgctccatgcgcggcgctcggccttggtggcattggccagcgggtcgacgggctctccccattcgctcggggcttccggcttgaaatcgcgcggaatgcgcacttcacccgggccacggtcatcgaccacatcaagttcgaatacaccggtggcggcggcaagattggcgatatgcttcacatcaccttctcgccccttgcccatggcggcatcctgcccgaggaccagcgtacgcatgcccagcttgccggtgagtctgccaaggaagaaaatgtatgacatggctgcgaaggccagcgtgtagtgcaccaccaacacatggtccacgccgaactgttccatgcggtgcagtcgatcatccacactggtcaaggcttcggcatccacgttctgcaccgcgggttcctcgccatggtgcgaggcggcccagccgtgcacgaatgcggggcgcgggtcaaacagaatcaccacggaaaaagcatcatgctggtgcgcgagttccaccacacgcttgatcaccgcctgatgtcccaagtgcatgccatcaaatgcgcccaatgtcaccacggccttcttgtcgttactgaacgagggccattcaatcgaaccttcggcgtcaggggtcaggtgcgtgatatccatcagtgtgctgttccttttatccgtgcgatgttattcatgcaatataggcgttgttgtgcgcggcctgtatcaagctgcacttttcaccgcgtctactttacgcgagggggaatacggtgaccggcttggcctgatgagcgttggcacgctcgataatcgccgccacatcatgcgtttgcggcacaatggcggcagtgggctcgctgattgtacgctcgatacggcggccgaagcgcaattcgctggcttcctcaggtgtgatgtcaagcgccggcatcgcgcctcgagcggcctgttccatggtgagggcatggtcaagcagccagttgcggcgctcgtcaccggcaagaccttcaggagtgttcaatacgcacttgttgcgcgtgacggtttgcccttcccgattagtgaacgtcttctgatcggtatgtgcggtgacggtatgggttcgcgtgtcaagcatcgcctcagaggcgataagtccgctggtatcgtccggcaacgcgaatcggccgactcgcgtacggcgcaaacgggtcaggtatccgccgacgccaagttcattgccgaggtcgcgggcgagcgcgcggatataggtgcccgatgaacagctgacccgcacgtcaatatcaagtgcgggaatcgttcccgtgttcgcgtcttcccgcaatggttcagcggcctgctcccctgctacgaatccgctgcggatatccagcacggtgaattcgctgatggtcaccaggcggggtttgagttccacatccttgccttcgcgagccaagtcgtaggcacgctggccgttgattttgatggcggagaacgtattgggtacttgttcgatatcgccggtgaaattggtggcgatggtgcgagtgagcaggttttgccatgaggcagttggtgacgccgttggttcgccgctctggccgccctcagtcagctgcgctgacagcgtttgccagcgggagcgggcttcatcatcgacaagcgcctcgccttcggcatcgtcggtagtggtgcgcaggccgaggcgtatggtggcctcgtaggttttgtcatgcgccacgatggcgttgagcagtcgcgtggcgtggccgaaggcgatgaccagcgtgccagtggccatggggtcaagggtgccggcgtgaccgaccttcttgatgtgcaacgcgccgcgcacggcggcgacggcgtcgaaactggtcacgccttgcggcttgtcgatgatgagtaggccgctgggtgttgtatgaagcacactactcctcgtcggactcgaactcatcgccctcggcttcggcctcgtcgtcgtgcttgtacggatcggcgtcgccggcgtactgggcggtggcgcgggcgcgggcgagttcttcgtcacgcttcttggccacggcgagaatgtcttcgatctcgtgagcctcgccgggcacttcatcgaacacgaattggagctgcggagtcaggcgcaggccagccttgtggcccaccagagaacgcaggtgacccttggcctgatcgagcgcctgctgggcgcgcttgcgttcgccttcctcgtggccttcgtggccgagctgggtccagtagaccttggcgatctgcagatcgttggtcacacgaacttcggtgacggtgatgctggcgagtcgcttgtcatgcagttcgcgctcaatggaggaggcgacgacacgctgaatcaaggccgcaatacgtgcggcgcgcgggttggttcctgccataggaatttccttttctagacttgagccccctctgacgaggggctgccgaacgcagtgaggctgggggagagaaaatcatggaactaccatgtctctcccccagtcagcctgcggctgacagcccactcgtcagagagggcttaacaatgactacttgcgctcgacttcctgcatctcgaaggtctcgatgatgtcgccgagttcaatgtcgttgaaggtgccgaggttgataccagcctcgtagccttccttgacggactgaacgtcgtccttgaagcgacgcagcgaggagatctcgaggtcgttgaccgtggccacgccgttgcgcaggatacggcacttcgtaccacgcttgacctcgccgtcctgcaccatgacgccggcgatgttgccgaacttggaggagcggaagatctcgcggatctcggagtgagaggtgacgacctcttcgtattccggcttgagcatgcccttgagggatgcctcgatgtcttcgatcgcacggtagatgaccgagtagtacttgatctccacgccctcgcgctcggcgaggtccgccacctgacggttcgggcgcacgttgaagccgatgataacggccttgtcgaccgtggccaggttgacatcattctgggtgatcgcaccgacgccgcggtggatgacctggatgccgacctcgtcggatacctcgatcttcatcaaggaatcctcgagcgcctcgaccgaaccggacgaatcgcccttgatgacaatattgagcatgtcgatctcggactcggcgaacttcttcttgaagtcctcgagggagacgaccttgcgacgcttggccagctgggcggcacgctcggtggcctgacgcttctcggcgatctggcgagcggcacgatcatcggaggcgaccaggaagaggtcaccggcggtcggcacggaggtcaagcccagcacctgaacaggagtggacggaccggccgcttccatcggctgaccgttctcgtcgagcatggcacgcacgcggccgtacgaagtgccggccacgatggcatcgcccacgtggagcgtaccctgctgaaccagcacggtggccacggcaccacgacccttgtcgagtcgggcttcgacggtggcaccacgggcgtccatgtcggggttggcgcggaggtccagctcagcgtcagccgtgagcagcacggcttcgagcagcttgtcgacgtgcaggttctgcttggcggagatgtcgacgaacatggtgtcgccaccatactcttcagggaccaggccgaactcggtgagctggccgcggaccttctccgggttggcaccgggcacatcgatcttgttgacggccacgacgatcggcaccttggcggcctgagcgtggttgatggcctcaacggtctggggcatcacaccatcgtcggcggcgaccacgaggatcgcgacgtcggtgagctcggcaccacgggcacgcatggcggtgaacgcctcgtggccaggggtatcgaggaaggtgatcttgcgcggttcgccttcaaggttcacggtgacctggtaggcaccgatacgctgggtaatgccgccggcctcacgtgcgatgacgttggtcttgcggatggtatccagcagtcgtgtcttaccgtggtcgacgtggcccatgacggtgacgaccggcgggcgaggcttgagatcctcgtcatcctgcagttcttcctcgtcaaggttgatgtcgaactgctggagcagttccttgtcttcctcttctgcggagacgagctggatgttccagccgatctcttcgcccagaatctggaaggtctcctcatccaaggactgggtggcggtagccatctgacccaggtggaagagcacggtgaccagcgcggcctggttgacgttgatcttctccgccagatcggccagggaagcgccctgacgcagacggatggtctgaccgttgccgttggggatgcgaacgccgccgatggtcggtgccttcagctcctcatactcatggcgctttgccaggcggttcttacgggccttcgaggacttaccgccctgacgtccgaatgcacctgcggcaccgccgcgtccgccgcgaccgccgccacgtgcgggaccgttgctcggtgcgccgccgccctggaagttattgccgccgccttggcccccacggaagccgccgcgtgcgccgccctgaccggcaccctgggagccgccgccctgacccggacggttgtggccccactggccgggacgaggaccgccctgaccaccttggcccggacgaccgccacggaagccgcggccctgcccctggccttggccgggacggcccggacgaccgccacgaccgctatcagcagtcggacgagccatcggatgcggacgcggaatatcacccggcgtcggggtgtgcataccctgcttgcgggagaacgggttgttgcccgggcgcgggccctgagcgtgcgggcgcggaatcgcgtttgaagcggcattgccgccattggcaccggcgccgccctgagcgtgcgggcgcggagccgaagcattgtcgcggttgttctgatgctgccccggctggccattgttcggacggccctggttgttacgacgatcgttgttacggcgatcgttcgggcgactctgacgaccgttctcgcggccttcgcgattatcgcgaccattctcacggttgtcgtgctgaccgtggcggccgggggtcggcatgccggggcgtgcgccgccctgcggacgcggtgtcggtgcgcccggagtcggagcctgctgatgtgccgaggcgggcgatgcctgacgtgcgggagcggccggagtcggtgcggaagatgaagtggaagccggggccgaaggtgcggccgggcggcgctgctgcacgggcttggcagcaggcttttgtacggaagatgcgggcttggaatcgcccttggcgttgtccttggcgaactctgccttcagacgccgggctaccggcggttcaatcgtagaagaagcggacttgacgaattctcccatgtccttaagcttctcaagcacggttttgctatcgacattcaaaaccttagccagttcgtatacgcgtggtttcgccactaattactcctattctgtgaccacgcgcgtgcatgggcgtggtcagttggtgatgacggcaagcctaccctgtctcatcgtgcgaccatgatcgtgttacctcgtctctggtgtgggcgatttcgcgcacactgcaccagcccacatacgccaatcaagcatactcatagcgctggatagcgtagacgcagcgagccgcgccattgctgacgcggctcgtatcaggaaataatgcgccctgaagatcattcgccttcgagcccggcggcctattcggcttccggagcagcagcctcggccgcagcctgggcggccttttcggcggcgaccttcttggcatgggcctcggcggattcgatgccgatcttccagccggtcagcttggctgccagtcgtgcgttctggccttccttgccgatggccagggatagctggtcgtcgtggatgaaggcgatggcggtcttgttcttctcgctgatcacctgtacgccggtggccacagccggggacagcgcggctgccacgaacttggccggatcgtcggagtagtcgacgatgtcgatcttctccgggccaaggttctccataacggcacgcacgcgagcgccgccggggccgatcagcgcgcccttcgggttcacgccatcggtgttggccttgaccgcgatcttggtgcgggcgccggcctcacgagcgatggccatgatggacacggcaccggagaccagttccggcacttcacgctcgaacagcttgcggaccagctccgggtgggagcgggacaccacgatttccgggcccttgatgccacgggccacgttcaccacgtacacgcggatgcgttcgccgtggcggtaacgctcgccgggcacctgctcacggcgaggcagaatggcttcgacatcgcccatcgcgacatgcacgttggaggggtcggaagcatcctgctggatgatgccggtgatgagcttgcccttctgaccggagaacgcgccgaataccttctcatcttcggcgcggcggaacagctgggtgatgacctggcgtgcagtggcggcggcgagacggccgaagtcacgcggggtgtcgtcgtattcctcgcccagcttgggagcggggtgcgggtcgtcctcggtgggctcgaccgggatttcgtcggcggcccagacggtgaagttgccggaacgttcgtcaagctccacacgcgcgtgcctggcggcgtgcggggtcttgaggtaggcgaggcgcagggcctctgccagcgcatcatccagggttccggggtcgattccttgctcggcggcgagcttgtgtattcctgtcaggtccagttccatcgatccgtacctcctatgaagttatgtggcgcatggcctatgagtggtcacagttagctattagtgtaggtttccatgcagacacgcttctcttcaggacggtttacccggcgcttggcatccgcactatgcgcgagcgcgatgctgtgttcgctttcggcgtgttcgatgccgcgactggccggacgggccgaggcggaagctcaaatgagcccttgcgagaaagcgatgacgttggcgaactacgccacccatccggctgaaggcacgccgttattagagcagtatgccaccggcctggccgctcccctgacttggattgacgttgccgggtattgttcgggtcgttttgccgagggaacgttacgtgacgcgcagaccaagcaatggctggcttttctggccgataaattcgggcagtccgcgcctgaggtgacgccggcgcgtcttgatggcgtcacgtccgccaacgttgaccgaccggtattggatgcgatggccgtggccgaggatcgcgccggattcgctatcgaggtcttggccgcacgaggagcgaccgctggggctacgttggcgttgagcgatatgcataagaccgccgggcagcagctggtgtcgctggcgaacggcaattttgatgattccggcgcacagtccagttcttccggccagagcgacccccgccaaaaggtctatgccatcgaccaactactggccaaccccaccaccatcgccgacaaggcaagcggccagaccgtaccgaccgccgccgccatcgaaatggactgcgcccgcgcgcagatcaaggccgtgaccgaatcgaaatcttccaccgagagcgatacgctgctcatcctcgccgcactggccgccaagcacgcctacaccgcgttccaacttggctacccagcgactgacgccgcattgttcgagtagacacacactcctcacgaagccgatgcgaacttgttggaggctagtgggcaagtcgagttgaggcacgttccaccaatgtgaaatcggtggtgtacgtacgggccgggcctgagtatccttcgatgcggtcgataagtatgtcaacggcatgcttggcataatcgtcgtcggtacattggatatcttgcagttcgatgaggagcgggaatcaggagccgaataatgacgatgccggtggccccgacgggaaagaggaggaaaaccgtcggaaccaccggcatacgggtgctcagagcctatcgttcaacgttcacgacaccgaatcgggactcatcggcgcgatcacgccacccgttcccatacggaccataaatcgtcctgatgttgactccgacaggcaatgccgggcattcgttttcgccgttcgtaccccagttgacccagccggattgaggcctctgcacgatctggaacgccgaggacgcctccgaggtgatccagatcatgcaccggttggtattggtgtcgtattcggcgctgcaggcagacggcccggggaagatggtctcctcctcctgtgccgacacatcgaccgccccctcggggaactgccaaggacgggaggtctcatcagctgcgcggtgggcaagcgcccgcacatgcccgagcctctcatcgagccccttgggggtaagggcattttcccatcgcgagaacaaacgccagtagagatcccagtgagcgttctccagatccctgtcaagcagagtggagaaataggcgaaccttgatgtcgtttccgtccgctccgatagcacgttccgcacttcatccttgaggaagccggcgtaggggtcccctccgcggaaaggaacaggctggtaggtgtcgaatcggttgaagacaaggtttccttcgccgctttcgaactcgtcaccgaccgtgatacggttcacgacgcttctgccatcgacctccgtcacaaacgaatccacatggtagacacgatcgaagaaatcgacgttccagtagaacgtgaactcgatggagaaggtcttgccctgcagttcaggtcgaagaccatcagggatgcgcccctcaagcaggtaacggcgcatgacggggccgaactcgataagacggacatcggcgatggcatgttcgggcgggttgatcagaccgttttccggagtgaagaaagggccgtagaacccgccaatggcgttgttcccgctcttgagcagatcgaatccctcgtccttggtgaggaaatggcggatgccccatttggaggcgccctcgcccttgccggtgccacgacatagttcaatgtcgaaatatcccgtatcaaggtggcagaccgcatcgctttcgagcgtgttgtcgtcggcgacgatgcctccttcaaacgtctcccccgggtccgggtcatgtagggacaggacctctccgtcatgcggcaccagaatgccgatgaacgtcgtcgaggaaccgtcggaatcccccagcaccttctggaacggcgaagactgtcccaaatcggtggtaccgagaatcagatcggcctcaactttttccggcacggtcaccgtgaccggctgtggctttgtaggatggtggtggctattggtgatggtgaatcgtggatattcgtgcgtcattgtcgttctcctgtttcagttcgcagccttggcttgtgtggcacctatgcctttgaggaacccgaacgagaacgagttctccttgagaccatcgatgagcacggcgatgatgatgacgatgcccttgacaagctgctgggtgaagaacgggacattcatgagcacgaggccggtggtgagcacgccgaagatgatggcaccgatcagagtgcccgggatcttgcccttgccgcccatcagggaggtaccgcccaggacggccgctgcgatggcatccatctcataaccgtcgccggcagtcggctgcgcggagaccacacgcgccgcgaagatgcagccggcgagaccggcgcacagtcctgcaatcacatagacggatagcagtacgcccttgacattgatgccggcaagccttgcggcttcggcattgccgcccacggcgtagacatgcgagccatacttggttttgtcgagaacgatccacatgactacataaacgattatcatcacgatgaacggaatcggcacatggaacaggtatccgttgccgagggcgcggaagttcaaaccgttgtctacgatcggcagaccgccggtgatggtgtatgccaatcctcgcatgaaggtcatggtgccgagggtgacgatgaacgcggcgagattgcagtaggcgatcaggaatccgttgatcaagccgatgagcgcaccgatcaccatgccgagaaggatggcgagcagggggttgagcccctgctgggcggccagaacggcgatgcaaccgctgacggcgatggtcgaaccaacggacagatcgatgccggtggtaatgatgacgaatgtcatgcccgcggcaagaatcgcgctgatggagatggacctcgccacgttgaacaggttgctcaccgtgccgaagttcggggccttgatcagcatgaatacgaccagcaccagcaatacgaacggcatgccgaccttctcccaggtcgccgccaggttcatctttttcttttctttcattggaagctcctctttatcgttgcgctccgtcgcgcgtttcggaatcctcggattgcgccttcagcacgcccgttgcgtaccccatgactttctcctcggtagcttcatcctcggggatacaggcagcgatgcccccctgcctgacaacgaggattctgtcgctgatgcccagcacctcgggcagatcggaggagattacgagaatcgccttgccttgcgctgcctgggaactgatcagctcgtagatctcctgcttcgcgccaacgtcgacgccacgggtcggctcgtcaagaatcagcacgtcggagttcttcatcatccatcgggcgaacacggccttctgttggttgccgccggacaggttgatgatggaagtggtcaacagacgttgcgcgatgttgaccagtttcatcgattcctgcacatccttgcggatgcggtgcttctgaagcagacccagcctctcgtattcgcccagcgaagagacggagatgttgtcttcgacgcttctgacagggaagatgctctgcgttttcctgctttcgggaagatacgcgaccccatgaccgatggcggccttcggggatttgaacgacaccgccttgccacggagccggatctcaccggaatcatgcttgtctgctccgatgatcgctctggcgatttcggttctgccggcgcccaccagcccggacatgcccagcacctcgcccgcatgcacggtgaaggataccggcggagagtccggcgaaagcctgagattcttgatctcgagcacgccctcccccggatgacgcttgccatggtcgtaaagtttctcgactttgcgtcccaccatcttggcgacgatgtcattctggtcggcatgctcgatgtcggtggtcatcaccgtatgcccgtccctgagcacggtgattctgtcggcgagccgccacacctcctccatgcggtgggagatgtaaatcaggcccgtgcccttctcccgcagcatgttcaccagcgtgaagaggtgctccgattcggctcgggacagcgatgccgtgggttcgtcgaggatgaggatcctcgcgtcctgcgcgatggccttggcgatttcgaccatctgctgctcaccggtgcccagatcaccgaggaatgtgtccgggtcgatgtccgccttgatgacatcgagtttacgtacggcgtcctcccgcatgcgcttcttgtccagcagccccgacttctgcaacggttcgttgccgagtgcgaggttctgcgccaccgtcatggtgggcaccacattgagttcctgatggatgatggcgatgccgaggtcgtcggcctgcttcggcgtggagacgtctacctctttgccatcaatgagaatgcgtccggagtcccttttcagattgcccgaaaggatgttcatcatcgtcgattttccggcaccgttctcacccatgagggcaagcacctcatgttcataaaggtttaggttaatgttgtcgagtacgaccactccggaaaagctcttgacaatgttctcgagctgcaataggggcagcaactgaggcatgctcaccatcccttgtaatcgttgacgttctcacgagtgaccatgacactcggaatgagaatcgtggacttcttgggggtatcgcccttggcgaccttctgggcgtaggcgacggcctgcttgaccatctcgccggggttctgcgtggaggtccccacgaacggggagccggcgcgcttcagctcgtcgacgccttcgggacttccgtcgatgccggtcacgatgatttcatcggtcctgccggcctgctcgacggcgagcgcggcgcccagagcggacggatcgttcataccgaagatgccctgcacgtccttattggcggtgagcatgtcggtggtcacggacaggccggtggcacgatcgttcttggaggattgctgtccgacgaccttgatgtcgggatagtccttctccagggccgccttgcaacccttgatacggtcggtgatggtctggatcggggttccgtccacgataaggatgttgcccttgccgccgagctgctcggccaggtaagagcacgacagttcacccgcctgcacgccatcggtcgttacgaccgcatcagcgcccttcgcaggagtgtccacggcgaccacgatgatgccggcggccttggcacgctcgattgcgggcttcaaaccactctcatcgacggcggagacgatgatcagatcgaccttctgctgaatgaacgaggagatctggttgtcctgggtggccaaatcgagctgggcgtcctggacattgagcgttgcaccgatcttcttggcttgagccttggcttctttgtccatggcggtgaagaacgggttggacatatcctgcaccatcaggccgatgctcttgatttccgtgggcttggagacctcggcggcatcgttgtcgccattactcaccgcgctgcagccggacagcagcagcgacgctgcgagcagggtggaagcggcggaagcgatcttcttgatgttcatggttgttttctccattggaaatagctgtcttgcgttcggatgcggcctattgcccaccgcatccgcatgactccctgatcttcagggatgtctcgatcatgtcgtggatgggattcggcctcatcgtcgccccatccgggtttttattcacctcctcctttccttccatctgtccaagcaggtagttcgccgccttggcaccgatgaatcggctgtcttcggcgacaagtgttatcttcggcgataccaggtccgaccaggcgaagtcatcgaacgcgaccagcgccatatccccgggaatgtcgacggatttccgattaagagccgacatgacgcccaacaggatgggattgttgccggcgatgatcacatccggataataatcgttctggtcaagaaaacggatgacttcggtgcacgcttccacatcgttgttaccgcattccagcacgcgaatctccgccccacactcctcggcggcggccctcaggccgctctcgcgagcgaacctgctgttccaggtgtccggatagatggcaagcagccaacgatggaaatgatggagtttcagatgacgcccaagcttggcggcggcatccacgttgtcggtggctacatacgagaaaccatcttttatttcctcatcatcaccgtatccgggagtggaatcgacgaatacgacgggaatgttccagttcttcagctggttcctgctgtattcgctgagtcccaaggtggagatgatgccgccaggacggttctccacgacctgacgcaacagatacgcctcgttctccttgctgtaccggccgttgacggccatatcggcaatgaacaggctctccttcttgtcctgcaggacgctctcgatgccgtcgatcagatcgagataataggagttcgacattcccgcggtgagcagggtgatgaaccggtgcgtgcccgtgcgcaggtcacgcgcattgacgttggggatgtagcccacctcgttggctgtttcgcgcaccgatgcacgggtgctctcggatacaccgctgagaccgttaagagcgcgagaaaccgtataaacggacagtcccatccgctttgcgatatcggtgatagtaacgtcgtgtcgtttcatcattgaagtcctaaacgtttatgttctgatgtattcataatacacacgacccaagacgttgtcaacacaggacatgcagacggactcaaaacgagtttattccaatggttcacaatgaactcggacggatatcccgaatccgtcacttgcctcattctgtctcattccgatgaggcacgaggtatcaggcatacccggacacttcgtatcccatcgggatgaggtgtcgattacaatcgacatccaccggcacggtcccgatatgccggacgcatatccgcgacagtcagatggcccctcacgccgtcacgtactccacgtgcgcgaattcggggactttgtaccacttgaccgggtagccggcgccgtaggcgcagaacacagaatcggacgtgttctccagattggcttccggatcgtacgcggcctcctcgatcacgcgccgttcgtcgtggcagggccggtagccgccgaacgaggcggagaagcgcccacggccgtgcgtatacgcgttcacgtccatcgcgtagtcgcgcatctcgctcaccggtgccccgcctgcgatgacggcgtattcgccgtcgtccgtaggcgggtcgaacgtgccggacattcgttgcacgtcggtcatggcgtgaacgacatgcaccaaaggctcgtcaaggcgcggcgcatgatccgcaggcgcatccgggagggccaaccgttcatgttcctcgacgaggggctcgcggcagccggcccagtgccgtccacgaacaacctcgtcgaatcatggaacgcgcgcctgcgcgacatgccgcgccgccaccgcggactgcggctggtcagacggctgaaggcgatctgctggtggtgccaccagcacacggaacggcccgaaagcgacgcgtggctcgcggccaacgcgatgaccgacgaacgactcgagcgcctctaccggcgggcatgggagagaagcccgcagagcatgcacgagacgttcggcattcccatgagacacggcaccggcatcgactggaacgagttccacaccagggtcgaatggcagtcgaacgactagaccgccggacatacattttggcctataaccccgaatacggacgttcgcatcaaaaacaaaaagggttccgggacaaaccccggaaccctaaaggcggataaggcgagattcgaactcgcggaggctttcacctcacacgctttcgaggcgtgctccttagaccgctcggacacttatccatgctgccaaaatggcaacttgttcattatgccacattctgccgacctggcaaatcggagtttcgctgagcaagtctcgagtgtatgccgcttgagacatgtcagatcacaatcccggaattcgcccgaagcgctggcattgcgtttacgcgccaagcactccgacaggaattacatacactccatcatcgcgttgatacgcgaactcgccgacccccaccaacaccgccaagaactccggttcacgggttcgcgcactcggatttctcagcagcttatctttcagtctgcatagatttgccgatgcctcagggactttatcctcactggacttaatttcgatgccgccccaccgtccatcggacaattcaataatggcatcacactccagaccggaatcgtcacgataataccgaaccggttctatcccaatatcgaggagagatctcgcatacaccaacagatcacggatgcatagattctcaaacagaaacccaaaagtctgccaatcgccgataagagcggcaggactcatgcccaacattgcggccgcaatggaaggatcggcaaaataccgacgcgccttggtctggagtcgctttggatcccgtgccggcgggacccagccctttatcggatcgatgacgaacatgttctcgaacatggccgtatacccggataccgttctctccgaaatgaaatcgtcaaggttttcttcagtaccgtacatatccttacgtaaggttttgaatgtcacagcttgactgatattgcgcgcaagcgaatccagcagacgacgagccacatcaggatccttgccttgcctgggcacactctcagtcagcgtgagtcgcatgtattcccgaatcagaatctgtgcgtcagatacaggcagagccaccgcctccggccatccacctcggcatacggcatccaacaacatttgtgtacttatctctgattttgcagcggcgaacttatgttcaaacagtccactgagacttaccgcacctgtcgagagtccggactcatataaagtcagaggattcatacggatacgtccgattcgtcccgcaccactatggttcggccgattctcattgagaggagtggatgaaccggtcagaatccactgacctttattcgcggaatcatcgtcgacgcgatgacggacttcatcccatatagctggagcgagttgccactcatccacgatacgagggcgataggctttcggcttgatgtcgctcgccagagaatcggccattccgcgcacctcccgttgtttcacgtccgccatcgcaataatccgaatttctcaactaccaaaatccgaatgttgcaacgacgaaaatccgaatattggtggtggtagaagcggtgacgggaccactctgcattgagcggtctctctcagtctcgctacgctcgacagctcgaacgcaatttaaggacagctttccagctgccattttatttgctcactgtcattcgccttcgcctaaaaacgcctccggcgttttcttcacggctcagctcatcagagggggcttgaaattttgtttacgccacctgttcgtggacggaggcattgacccattgggtctgctggacgttgtagccggagaagatgccgatgtcgagcatgcagtcgcggtaatcgcggccgtgggcgatggtgatgtagctgtcgtccaccaatcggttatgcgtgggatccagtccgacccatcggccatcctgatacacctcgacccaagcgtgggtcgcgccctctcccccaagcaaaccggcaatgtagcgcgcggtcaatcccacatgccggcacacggacagcattacatgggcataatcctggcatacgcccttgcgctgggccaaggcctgttcggcggtggtgcgaatcgtggtggaaccgggcgtatacacaaacgccttgtagacctcatccatcacttcggcggcctgctgcaccggagtggcgtcggcaggcaacgcagccaagcgttcgcggcatacgtcgatcatcgcctccacgttcgggccgggaatggtgagcgctgaattgaatcggtacagcggtttataggcttccttatggatatgcgcattgtccacgaaggcgatgccggtcaccgaatagctgaatatgtcgtgcggctcggggatgaatccggtcatcaccacggagccaaaggagtcgatggtggtttcgagttcggtttcgggctgaatcttcacttccacgtcaatcacctgttggcgagggccagtggcgggaatacagcgaagctggaacctgtgatcggtgaccggtgcgctgaaggacagcttcatctcatagtcgaacacgagttttttcacaacgtctcctgcacttacacacgagccggcaaccggcacattctcgggataacgacactacagccatggctgaggtatggtccgcgcgctcacagtccacgcatatattccggcaattcgccgatacgcatcggccggcactcgggcgcacggtttttcgccataccaccatagcatttgaacccgtcagggcgaacgtcgggttaggggcgcttggcatccatgttcatggagctcagtgagcccatgtctttgatggccagggcgctgacacggccggaataatcgtcaaggtacttcttcagcaggtcggcgacttcctgatacccgcgagacggcagctgaccgaccagccagctcagcccatcggcgaagcaactaggcaacggcatgccgtcgaggatcatcgagtaggaggcgagcttcctaagcggggcttccatctcctccatcgtcaggccgaagcgcgtgtacaggtcgatgcgctcaagatacttgccgatgaagatgaacgccttcagcgtggggtcgaccggcgaattctcgatgccgccccagaaggcgagcatgtcatcggtaatatcgcgctgcttgtagatgtcctcggcgtcggccgcgtatttggcggcatcggtgatattggtcatcgccaactccacgtactgcaacagacgcgagctcaattccgggcgcagaatcacggcgttgttgaatgcggaggttacggccgaccgcaccgaatcagggttggacccgtcgtacaggaagctgttcacgaacccgtcgaagtcctcgaaatcttcgggcaggtcgagtgcgtgagcgaacggacggaaggcgtccacatcggtgtccatcacacgatcgtagaacgggaagaactggttcagcgtggtgaaggcgcgctcggtgtaccgacccagccaatacaggttgtctgccttggaagcggtgaccagagacaacgagtggcggcgggactggctcagcaggttcgccacctgcacttcagcaccgtattcatgctccacgccggattcgggtgccaacacccacgtatccttgaatccgccaccctgcgacgagttgacgatcatctggccgggcaccgacgagtatcgagtcaagcccgaataccacacgtgcgtgtttttgccggtgaccacaaaggcacgcaaatcgcatttgcgcggcgacatctcaccggtcttcgggtccaccacatcgatatcgcggaactgaatcacctcttgggcgatgaatcgacgaggctcctccttgatccggttggcaagctcctcacgtgcggcagcatccagcgacgaaccgaacaccacgccgtaaccaccggcttcggccacatccttgatgaccagctcgcccatacgattcaggacttccttacggtcggcctcgaacatcggcatatacgtgggcgcgttgttgagaatcggttcctcgccgagatagtacttgatcatctgcggcacgaagtagtagatggccttgtcatcggccgcgccgttgcccggcgcgttgacgatggccacgttgcccgcgcggtaggcggacaggataccgggcacaccgatcaccgaatcaggattgaaggcaaacggatcgaggaattcgtcggacagacggcggtagaccacgcccacacggtggcgtttgccggcgtagtcgaggaagtagaccttgttgtccaccacttcgaggtcttcggggaaggccagtgcggcgccggttttctccgccagataggcgtgctcgaagaacgcggaattgtagcggccgggggtcagtaccacggcgatgccctcagtggacacaaagtccatggccttgcgcagtaggcgcgggtattcgcgattgtcgcggatgtgcacgtcgcggaacaggcgcggggagatgcggcgctcgatgtcgcgcacgaacagcgggtagctggcgcccgaggggatgcgcaggttgtcttccagcacccaccagcggccatcttcaccctggaccaggtcttcgccggcgatgtgcgcgaagatgccgccgggaggggtcacgccgttgacctgcgggaagtagccggccgaggtgtatacgtattcctccggcacgacgccgtcatggatgatggccttgtcggagtagatgtccttcagataggcgttcagggcgttgacgcgctgcttcaggcccttctccaattcgtcgtattcgtcggattcgataatgcgcggcacgggatcgtacgggaagagccggtcatggtattcgccgttcttgtagatgccgaagcgtacgccgttgcgggacagctcgcggttgatcgcctcgcgacggtttaccagttcatgggccagtctgcgtgctgcggattcgatcatcgtgcctgctccttgctgtggcggcttctgtggcctcaagcggttaggcgtttcgagcgcacgctgacgccgcaagccgtaaccgggtttgatggttacaacctaaggcggccccgtttcagcaaacgcgcgagaatgttacaggcaggtcacttcgccgaccgcactcgtctcgccgaccgcgcgcatctcgccgaccgcactcgttacaatgaatggctatgacacgactgcgcattgacttggcctacgacggcggcggattctatggctgggccaaacagcccaatctgcgtacggtgcaaggcaccattgaagatgcgctgcacaaggtgctgcgggtgccggccgatgatgcggccgaaccgttgcgtctgacggtggctgggcgcaccgacaccggtgtgcacgcctcccaccaagtggcgcatttggatgtatccgatgaggtactgaatcgctgcgtaggtcacatgaccattccggtcaccgaggcgctgactcgcagactcaaggccgtgctgccttcggacatcgtcattcatggcattgccgtggcaccggccggtttcgatgccaggttctccgcattggagcgcacttatgtgtatcgggtcgccgatcgttcgtccgagatcgacccgcgcctgcgtggatgcgtgcttaccgtggatgaatcgctggatctggagcttatgaaccgcgcagcctcattgaccatcggcctgcacgattttggttccttcgccactccgaatccgggaggcactacgatccgcgaagtcaagaccgcctattggcggcgggtgccgatcactcccctggtgccggatgcgatggcatcgcatgaagcatatcggactccgtcgctggagtccggactggcggtgttcacgattgtggcggacgcctttgcccgcaatatggtgcgctccttggtcggctcatgcatcaaagttggttcgggacgcaaatctctggaatggtttgccggcaaaatggccgagccagtgcgtgaaggctcaagcgggccgattgcgccgcagggcctgactttggagcatatcgcataccccgtcgatgatcagctggccgcaagagccgaggccattcgagccgtacgtacgttgtagtttctatgaaacaacgcaaaagggctggaacccaaacggattccagccctttcagctagcttggcgaaacgctattcagctcactcggccttctcggcgtcagcggcttcctcagcgggagcctcagcctcagcggcggcggtctcctcgaccggagcctcagcggcctcagcctcaacggccggagcctcttcttcggcaaccttggcggcggcttcagcttccttcacaacagccttcttggcaaccggctcggtgacgagctcgatcacagcggccggagcggcatcgccaacgcgcggggcgatcttgacgatacgggtgtagccaccttcacgctgctccatctgctcggcaatctgggtgaacagaatgtgcaccacggacttgttgcggatgacgcgcatcacgcgacgacgggagtgcagatcaccgcgcttggcgaaggtgatcaggcgctcggccagcggacgaaggcgcttggccttcggcagcgtggtggtgatgcggccgttctggaacaggctggtcgccatgtttgccagcatgaggcgctcgtgtgcggggctggaagccagacgcgggcccttcttgggtgtaggcattgggtttactccttatatgtccgttcttcaggcaagcaggtgggcatatgcccgaacatccgcttgcctagtgaacgaacgattggtcaaagaggcagatcactcgtcttccggcgagaagaacgtaccaccttcgagattattggtatcgaaggccatcggcgaggacttgaggctcaggcccagggtctgcagcttctccttgacctcatcgattgacttcataccgaaattgcggatgtcgagcaggtcctgctcggtgtgggagacaagctcaccgatggtgtggatgccctcgcgcttgaggcagttgtaagaacgctgcgtcaggttgaggtcctcgatcggaacggccatctcggggttggtctcctcggccaccggggccggaccgacctcgacgccttcagcctgggcgttgagctcacggcacaggccgaagagctccaccaaggtggaaccggcggaagccaccgcgtcacgcggggagatggcgggcttggtctccacgtccagaatgagcttgtcgaagtccgtgcgctgttccacacgggtggcctcgaccttgtagctcaccttgagtaccggggagtagatggaatcaaccggaatacggccgatctcatcgttgtcctgcttgttcatctgggcaggaacatagccacggccacgctcgacagtgaactcgatctcgagttcgccatcgtcggcgagggtagcgatgtgctgctccgggttggcaatagtgacgccggcaggcggggtgatgtccccagccacggcttcgcccttgccgctcttgcgcagatacatgaccacaggctcgtcatattcgctggtgagcacgatgcccttgatgttcagcaggatctcggtgacgtcttcctggacgcccggcagagtggtgaactcatgcagggcaccggaaatacgcacggaggtcacggcagcacccgggatggagctcagcagcgtgcgacgcagcgagttgccgagcgtgtagccgaagccaggctcgagcggctcgatggtgaagcgggagcgctgcggattcagagattcctcggtaagagtcggacgctgtgcaataagcactgtggttatcctttcagcttgaactcggtggtgcactcaccggtcaggcggttttggatggatttggtattgctgagtgctcagacgcgacgacgcttcggaggacgaacgccgttgtgggcttgcggggtgacgtcggtgatggaaccaacctcgaggcccgcagactgcagggaacggatggcggtctcacgaccggaacccgggcccttgacgaacacgtcgaccttcttgacgccgtgttccatcgccttgcgggcggcggactcggcagccataccagcggcgtacggcgtggacttacgggagcccttgaagccgacatcaccaccggacgcccaggacaccacggcaccggacggatcggtgatcgaaatgatcgtgttgttgaaagtggacttgatgtgagcctggccgaccgggaccgacttgcggtcgcgacgacggggcttacgagcggcttgcttaggcgctgccattgaccctcgtttcctagtaacgaactttgttgttgacgttcgggcgatgggatgaaatcatcccgtggcccgaatcatgccaccgactacttggtggccttcttctttccggcgaccgtgcgcttcgggcccttgcgggtacgagcattggtcttggtgcgctgaccgcgcacaggaagtcccttacggtgacgctggccttggtagcagttgatctgaatcttgcgacgaatatctgcatcgacttcacgacgcaggtcaccctcgatcttgtagttggcttcgaggtagtcacgcagcgtaatcagctgctcgtcggtgagatccttgacgcggatgtccgggctgataccggtcgcggcaagcgtttccttggcacgagtgcgacccacaccgaaaatgtaggtgagggcgatctcgatgcgcttctcattggggatgtcgactccggcaagacgtgccattgcgattccttcttgttgccgtaggtcttgcacccgctcgcccggttacccggcacgggcctacgtacccgtggttcagtgtcgttcccttgcgggaagcactgtgagagagtgccttatttacttagtgccgctggagaatctgctctcagccctgacgctgcttgtggcgcgggttgacgcagatcaccatgacgcggccgtgacggcggatcacgcggcagttttcgcagatcctcttcacgctagggctgaccttcatggttatccttttcttgtgtacctttacttgtaacggtacgtaatgcgtccgcggttcaggtcgtaagggctcatttcgagcacgacacgatcctgcggcagaatacgaatgtagttcttacgcattttgccggaaatcgtggcgagcacgatgtgcttgttctcgagttcaacgcggaacatcgcgttaggcagtgcttccactacctgtccttcgacttcaatcacaccgtcttttgccatgtgcctctagtcctattccgttggatgattactatggcatatccgaagacacaccaactgtcaactatatacgcacatacccctgtacgaacactcggcgtgtcgcacaggggtatggaaacgttgatgtggtatttcggcatcactccggcttgttggccgggctgccgaacctactactcgaggtggctgatgatacggccgctgatctcgtcgatgtcgccgacgccgttgaccacgacgagcaggccacgggattcgtagatgtcgagcagcggagcggtttccttctcgtaggtctccaggcgcttggcgatggcctccggagtgtcgtcagcgcggccctgctcggcggcgcgcttcttcatacgctccagcagcacgtcacgggcggcttcgagggccaccacgtggtcgagcggagtgtcgaggtcggcgagcatctcgtcgagagcggtgacctgggcggcgttacgcgggtagccatcgaggatccagccgttattgcagtcttccttggccagacgatccttgacgatcttgttggtcagggagtcaggaaccagctcgcccttgtcggtgtagctcatcgcctcaagaccgagttcggtcttgttcttgatgttgtagcggaagatgtcgccggtggagatggtggggatgttgaagtgctcggcgagcagagcagcctgggtgcccttgcccacgccctgggggcccatgatgagcagacgcatggtggtctccttttgtgtcggttattaatacggttttggctcccttggttaggggagccattgagttatatgtggaagaaagattgctccgtcgtggaacagtccactggactgttccactcctcgcgcggccgcctgcccattgcgggcgaccgctgccaagcgggcgtcagccttctttgtggtccacgttttcgaacaggaagccggtgtactggaactgttcggtctgggccttggcctgacgcagggtgtcgaggcccacgcccgcgataatcaggatcgtggtgccaccgaacggcagcttggcgttgagtccgagagccatgatcagcacggtcgggatcagggccacgaacagcaggtagacggcacccacggtgttgagtcggttcatcacgtaggtcaggtaacggctggtggcgttgccggcgcggatgccgggaatgaagccgccgtactgcttcatgttgtccgcggtctcgtccgggttgaacgtgatcgaggtgtagaagaagcagaagaacacgatcatcagcgcgtacagggcgatgtaccacacggatgtggtgttcgccaggttggcgttgatccacttgacccaggactggtcggacttgccgaactgggcgatcagggtcgggatggcgaggatcgaggaggcgaagatcggcgggatgacgccggacatgttgatcttcagcggcaggtaggtggaggagccgccgtacatcttacggccgatcatgcggcgcgtgtactgcaccgggacgcggcgctggcacagttcgacgaagtcgacgaagatgaggatgaccacgagcacgcccacgacgatgccgaacttggtccagtcgccgttcttgccgttggtgccgtagccgatctcccacagctgcggcaggaagccggagcagatggacatgaagatcaagatggacatgccctggccgatgcccttgtcggtcacgagctcggccatccacatgatcaggccggtgccgccggtcatgatgaggaccatgaccacgaggttccacacggagccgtccgggatgacctggtcgcagcggtagttgaacagggcaccggagcgggcggtgaccaggatggtggtggactgcagcacggccaggccgatggtcaggtaacgcgtgtactgggtgagcttggcctctccggactggccctccttatgcagggcctcgaagcgcgggatgaccacgcgcagcagctgcaccacgatggacgcggtgatgtacggcatgacgcccagcgcgaagatagacagctggagcatagcgccaccggagaagaggttcaccagtccgatgaagttctcctgggaggcgctgccgacagtggccatgcacttgttcaccacgttgtagtccacgccaggggtcggaatgaacgaaccgatgcggtagacgatgatgatgaacaggacgaagagaatcttcttcctcaactctttggtcttcagggcctggattagtgtcctcacctagatttcctcccaatagcgcgccaatcacgcgaaatacacaaactaacgaatgagcatagtctacagtgcctacttcggccacttcatgtctcgcgaatgttacctgaattatgctccgtcgtactgaacgggggaagcatactcaaaacgatcattgtgttgagactgcttctctgcgctcagaacaacaatttttgagaaaagggaacccccgtccacctattggcgggcgggggttgtacagcctattgcgctccccgtaggactaatcagtcctcggaaacggaaccgccggcggcctcgatcttggacttggcggaagccgaagccttaacacccttgagggtgaaagccacggtggtctcgccgtcgcccagaaccttcaccggagcgttgtcacgaacagcgcccttggcgatcaggtcggccacagcaacctcgccaccctcggggaagagctccacgagacgagcgatgttgatgacctggaactcgaccttgaacgggttcttgaagccacgaagcttcggcaggcgcatgtacagcggcagctggccgccttcaaagcccggacgcacgtggttacgcttcgtctggcccttggcgccacgaccggaggtcttacccttggagccttcaccgcggcccacacgggtgcggtccttcttggcgcccggggcgggcttcaggtcgtgcatctgcaggatttcgttatctgccataatcagtcaacctcctcaacggtgaccaggtgacgcacggcgttcaccagaccacggttggccggggtgtcctcgcggacaacggtcttaccgatcttgttgaggccgagggtcttgacggtggcgcgctgagccggggtacggttcacgatgccgtggtgcagggtaatcttcaggttcttagccatgagtatcactcaccatccttctcttcggcggccttagcggcagcagcctcttcgcgagccttgcgagcctcggcaatgccggcggcacgggcgcgcagcagagcatcgggagcaacctcgtcgagcgccaggccacgacgggcggcgatctcctcgggctcttcgagctgcttgagggcgtcgacggtagcgcgcaccacattaacggcggtggcggagcccatcgacttggtcaggacgtcggtgatgcctgcgcattccatgacggcgcgcacggagccaccggcgattacaccggtacccggggcagccggacgcagcaggacggtgccagcagcgtcgtgaccctgaaccgggtgggtgatggtgccgcggacgcgaggcacagagaacatgtgcttcttggcgtccagctggcccttggcgatggcggccgggacttcacgggacttgccgtagccgacacccacggtgccgttgccgtcgccgaccacaaccagtgcagcgaagctgaaggtacggccacccttgtgggtcttggacacacggttgatggtcaccacgcgatcgagcagctcgtcgccgtggttttcttcacgacggttacgacgctcgccgcgacggccttcaccgcgctggccacgacgacccttgcggtcctcgttgttggattcggtcgccacagtgttctgagtttcttcagccacttgggtttccttcgtttcgttgtcgctcacagtgcaagacctccctcgcgggcgccatcagcaacggctgcgacgcgaccggtgtacttgttgccaccgcggtcgaacacgactgcggtgatgccggcagccttggccttctcggcgatcagctcgccgaccttcttggcggcctcagtcttggtgccttcgaaaccggcgaagtcggcctgaagggtggaggcggacaccaaggtaatacccttggtatcgtcgaccacctgagcaaccatgtgacggttggagcgggtgaccaccaggcgcggacgctcgggggtaccggagatgcgcttgcggatacgcgcgtgacggcgcttgagagctaccttcttgccttttccgagaatagcaacgctcatatcacttaccagcctttccagccttgcgcaggatgcgttcatcggcatacttgatgcccttgcccttgtagggttccggagcgcgcagcttgcggatgttggcggcaacctggcccacgacctgcttgtcggtgccttcgacaaccacgtggttggcgtcggtcaccttcagggtgatgccttcgggcgggttgacggtgatggtgtgggagtagccgaggaagaactcgatgcccttgcccttggcgacggcgcggtaaccggtgccgacgatctcaagagtcttggagtagccatcgtgaacacccttgaccatgccggccatgatggagcgggccagaccgtgcttggcacgggtcggacgcaggtcatcagcggcggtcaggacgatctcgttgccttcaacggcagcggtgatgccttccggaaccacgtaggagtcagaacccttagcgcccttggcggagaagttctggccttcaatcttgacttcaacgccagcagggatggcgatggggagcttaccaatatgcgatgccatgtttcagctctcctttctcaccacacgaaggcgacaatttcgccgccaatgcctcggtcgaggcattccttctgagtcagcagtcccgaagaagtcgagatgatggcgatacccaggccaccgagcggcatcggcagggagtcggacttcgcgtaacgacgaaggcccggcttggagatgcgcttgatgccctgaatggaacgctcaccgttcggaccgtacttgagggtgacctcaagagtctggccgaccttggcttccttagcggtgaagtccttgatgtagccttcgcgcttcaggatctcggcgatgttcgccttgaacttggagtacggcatatccacggtttcgtgcttggccgcgctcgcattacgcagacgcgtaagcatgtctgcgatcggatctgtcattgtcatttgggcttgttgccctttctcgctatggtttccgccgccctcacgcttcttctagaagcgttcgggccgcggaccttcagcgtcgatgtttaccaactggacttcgtaacgccgggcagttcaccgcggtgagccttctcacgaaggcagatgcggcacaggccgaacttgcggtagacggagtggggacgaccgcagacctggcagcgcgtgtaagcgcggaccttgaacttcggcttgccggccgccttgttcttaagagcggtttttgccatatcagttctccttgaaggggaagccgaggtgcttcagcagcgcgtaagcttccttgtcgtccttggtggaggtcaccacagtgatgtccataccgcgcacgtgatcgatcgaatcaggatcgatctcgtggaacatggactgctcggtgagaccaaagttgtagttgccctggccatcgaactggtggccgttgatgccgcggaagtcgcggatacggggcagcgcgagggtcagcagacggtccaggaactcccacatgcggtcgccacgcagggtgacgtacgcaccgatggcctggccttcacgcagatggaactgcgcgacggacttcttggccttggtgatcttcggcttctggccggtgatcagggtgaggtccttgacggcaccttcgatgagcttggagtcgcgggcagcggcaccaacacccatggagacgacgaccttctggacacgggcaacctgcatcgggttggagtacttgaactccttctcgagctcaggaatgatctgctcgttgtacttgaccttcaagcgcggggtggccggcgcttcgacagtagtatcggtcatgccagctcctttccggacttcttggcgacgcgcacgcgcacggtcttcaccttgccgtcacgcgcctcttccttaacggtgatgccaacgcgggtcggctgcttggtctccgggtcgatgaccatcacgttggagcgatggatcggagcctcagtggagacgatgccagcctgctggccctgctgcgttgcacgcacgtgcttcttgacgatctgcacgccttcgacgatcagtcgatcgttggagagcacctgcttgacggtgccttccttgccgcggtccttgccgcggatgaccttgaccaggtcgccgctcttgatcttggctgccatgtcagatcacctccggggcgagggacacgatcttcatgaacttgtgctcgcgcagttcacgaccgaccggtccgaagatacgagtgcccttcggttcacggccggagccgagaatgacggcggcgttctcgtcgaacttgatgtaggaaccatccgcacggcgggattccttgacggtacggacgacaacggccttaaccacgtcgcccttcttgaccgacccgccaggaatggcgtccttgacggaggcgacgatcacgtcgccgatgccggcatagcgtcgcttcgatccgccgagcacgcggatggcgaggagttccttcgcacccgtgttgtcggcgacatgaagccgcgtttcctgctgaatcattgattctccttagccgagctggttctccccatttaccggggcatcgtggttgctcataatgccccggtaaatggcgagccttgccgaactttacttacttggcgcgctcgataatggattcgagacgccagcgcttggtcttgctcagaggccgagtttccataatactcacgaggtcgccaatgtgggcgtcgttgtgttcatcatgggccttgaccttgctggtggaacgaacgaccttgccgtacagcgggtgggtcgaacgctgctcgagctcgacggtaatcgtcttgtccatcttgtcggacacgacgtagccgcggcgaaccttacggaagttacgctcttcagccataatcacttctccttggattcggtagcggccggctcctggctgatgccaagctcacgctcgcgaagcacggtgtacatgcgggcgatgtcgctcttgacagccttgagacgggcggtgttctcgagctgaccggtggcgtgctggaagcgcaggttgaacagctcttccttggacttcttcaagaagccttcgatttccgcgttggtcttctcgttgagattcttgatggagtaatcagcggtaccgactgccatcagatatcaccaccttcacgtgcgataatgcggcacttcatcgggagcttgtcgatagcgcggcggagggcttccttagcgacgtcctcggacacaccaccgatttcgaacatcacgcgaccagggcgcacgttcgcaatccagaactccggggcacccttaccggaacccattcgggcaccgagcgggtgcttggtcagcggacgatccgggaagatcgtgatccacacgcggccaccacgcttgatgtagcgggtcatggcgatacgcgcggcttcgatctgacggttggtcacgtaggccggggcgagggactggatgccgaaatcaccgaagttgatctcgttgccgcccttggacatgccagaacgcacagggcggtgctgcttgcggtacttagtcctcttggggataagcattcttgctcactccttcgtttctgcagccggagcggcctcggcgggagcctcagccttgggggcttcgacggcctgcggggcggcggaacggttgccacggcgcgggcggcgatcgccaccacgacggcccggacggttgttctgctgagcctgctgctcttcgaactcggattcggtcatgtcgcccttgtagatccagaccttgacgccgatacggccgtacgtggtcttggcctcgaagaagccgtaatcgatgagggcgcggagggtctgcagcggaacgcggccctcacggtagaactcggaacggctcatttccgcaccgccgaggcggccggagagcttgatgcggatacccttggcaccggcgcgcatggcgtcctgctgggccttgcgcatggcacgacggaaggtgacgcggttggtcagctgctcagcgatgccctgagcgacgagctgggcgtccagcgcggcgttcttgacctcgaagatgttgagctggacctgcttgccggtcagcttctcgagcttggcgcggacgcgctcggcctcggcgccacgacgaccgatcacgatgcccggacgggcggtgtgaatgtcgacgcggacgcggtcgcgggtgcgctcgatgacgatgcgggacacgccagcgcgctcgaggtccttgctcatctccttgcggatctgatcatcctcaagcacgaagtcgcggtagcgttcgccggccttgttggagtcggagaaccacttggagcggtggttctcagtgatgcccagacggtagccaaacggattgatcttctgacccatctttagcgggctccttccttgttagccacgacgaccgtgatgtgggaggtgcgcttgttgatacgagcggcgcggccctgggcacgagcgcggaagcgcttgagggtcacaccttcgtcaacgtaggtctccttgatgtacaggtcgttctcgcggaacggctcgccggccttgtcggccttcacgcgagcgttggcgatggcgctctccagggtcttgcggaccggcagggccgcagcctgaggggcgaacttcaaaatggtgacggcttcggtcgccttcttgccgcggatgaggtcgaccatgcggcgagccttgcgcggcgtcacgcggacgtgacgagcgattgctttagcttccatgttctattccttatccttagcgacgggccttcttgtcgtccttcacgtgacccttgaaggtcttcgtgggggcgaactcacccagcttgtgaccaaccatggcctcggtgacgaacaccgggacatgcttgcgaccatcatgaacggcgaaggtgtgtccgatgaaatcaggggtgatcatcgaacgacgggaccacgtcttgatgacgttcttggtgcccttctcgttctgctcgtcgactttcttctgcaagtgggcgtcgacgaaggggcccttcttgatgctacgagtcatcttctcgatactcccttacttgcggttcttgccggacggacggcgacgaacaatcatcttgttcgaagccttcttcggacgacgagtacgaacctcgcccttgccccacggggagaccggcggcttaccaccgcgggtacgaccgccgtgcgggtggtcgaccgggttcatggactcaccacgggtgatcggacggtggccgatccagcgggcgcggccagccttgccgagctgaatgttggcgtggtcctcgttgccgacctcgccgacggtagcgcggcagcgcgcgtcgacgttgcggatttcgccggacggcatacgcagctgagcgtaggcgccatccttggcgacgagctgaacggcagcaccagcggaacgagcgatcttggcgccacccagcgggcggagctcgatggcgtgaaccacggtaccggtcgggatgttcttcagcggcaggttgttgcccggcttgatatcagcctgagcaccggtctcgatgacgtcgccctgcttgatgcccttcggcgcgatgatgtagcgcttctcgccatctgcgaagtgcaggagggcgatacgggcggagcggttcggatcgtactcgatctcggcaaccttggcgggcacgccgtccttgtcccaacgcttgaaatcgatgagacggtactggcgcttgtggccgccgccgcgatgacgggaggtgatacggccgtaagagttacgaccgccggtcttggacttcttgcgaaccagcgacttctcaggcgtagaacgagtcagctcggagaaatccgagacggacgcgttgcggcggcctgcggtcgtcggcttataaacgcggatagccataatgtagttcttcctttaacttttctcggctagccttcagttaccaaagatgtcgatcgtctggccctcggcgacggtcacgatcgcacgcttctgggaagcgcgctggccgaaaccggtgcgagtgcgctgcttcttgccagcgcggttgagggtgttgacgttcgtcaccttgaccttgaagatctcttcgattgcctgcttgatctgcaccttgttcgcatccggagccaccacgaaggtgtactggccacggtcggaagcggcgtagctcttctcggagacgacgggcttaagaatcacgtcgtgagcgggcttgtgaatagcgaccatctaaatcaggcctccttcggctcggtcttggcagccacgaaagcctcgaaggcttccttggtgaagaccacgtactgcgaggtaatcacgtcgtacgtgttgagctgatcgacgaaaatcgggtgaacggtcgggatgttgcgcacggagagccactcgttgatgttgtcgcgagtgaagacgaccgtggtgaacttgtccgcggtgatcggggccagggcggcgacagcggccttggtggacggctcggtgataccgaactccaccacggcaacgcgaccggcgttggcgcgatcggacagggcgtagcgcagagctgcggccttcatcttcttgggggtgcgctgagagtagtcacgcggctgcgggccgaacacggtgccgccgtggtaccactgcggtgcacggatggagccctgacgagcacgaccggtgcccttctgcttccacggcttcttgccgccgccggaaaccatgccacgagtcttggtggcgtgggtgccctgacgagcagcagcgagctgagcggtgacaacctggtggatcagcgggatgtgagcctggacatcctcggcggaaacgccgaagagagcctcaggagcttcaacggtgccggtggcctggcccttggcgtcggtgacgttcagagtaacgtttgccatggtttatcaggctcccttcacagccgagcggacgagaacgatgccgcccttggggccaggaatggcgcccttgatggcgaggatgccgttctcgacatcagcggagacgacggtcaggttctgggtagtggcggtcacatgacccatgcggccggccatacgcttgcccttgagaatacggctcggagtggcgcatgcgcccacagaaccgggacggcgctcgttcttgtgagaaccgtgagtacggcggtaggacttgaagccccaacgcttgatggtaccggcgaagcccttacccttggtggtgccggtcacgtcgacctcagcaccctcttcgaacaggtcagcggccagttcctggccagcctcgaactgatcgacgtcgtcggtgcgcacctcgacgaggtggcgacgcggggtgacaccggccttggcaaagtggccagccagcggcttggtcaccttggtggggtcgatggcgccgtagccgagctggacggccttgtagccgtcagattcctcggtcttcacggcggtcaccacgttggtggacacgtcgacaagagtgacgggcacgaagaagccgttctcgtcccacacctgggacatgccgagcttcttgcccagcagagccttgcgattagacataatgcttcctcctcccttacagcttgatttcgatgttgacgtccgcaggcagatcgatgtgcatcagggagtccacggccttgggggtcgggtccacgatgtcgatgaggcgcttgtgagtgcgcatctcgaagtgctcgcgagaatccttgtacttgtgaggagaacggataacacagaagacgttcttctcggtcggcagcggaacggggccaacaacagttgcgcccgcgttcgtcaccgtttcgacgatcttcttcgccgattggtcgatgacctcgtggtcataggacttaagcctgatgcggattttctgtcccgccattgccgtccgccctttctagcgatgttcgttgtactgtttaccaacctgcttctagggcaccggcgcgcatggcctcccttggacatacgtcctctggcggtcatccgacatcagtgcgcggtttccggctgtcacttcacttgaaatggctcccggcccgcgctcgcttttttaattccaatttgcgagcccaaatcaggcaacttgtttattcaagcattgaggtgggacagcgcggaggaattcgcgcgtgtcgcgctcatgccgttcgtattacctcgcggcatagccgctcggcgtcgcctaccaacatccttctgagacttacctatatatagtggcacagctcacgttggcgaatatggattgattaattgagttggacggtaacgcgaattactcttaaggctcgtgacacaatcactggcaaagaacatcaaacctattcgtgagcacggtgccaacgtgttatatcagcacggcactttggccttactcgtgccggggctgctggaaggcaccaccaccatcggcgaattgctcaagcatggcgacaccggcatcggcaccggcgagggcttggacggcgagctcatcatcctggatggcgtggcatacaagataggccaatccggtgtggccgaacgcgtgccggacgacttcaccatgccattcgctaatagccatcgcgcggccttccagtaccagtgcgagcgtcatgatatcggcctagaagagctcaacgaaaagatcgtcaaggcgaacggccgcgcgaacacgttcttttcggtaattgtgcgcggcacgttcagcttcatcaagacacgcgcggtcatcaagcagcaggcaccctaccccacgctggtggaggtggccgaccggcaggccgtgttcctgcgccacgacgtcaagggcaccatgctcgggtacttctcccccgtgatgtttcacggcgcggctgtggccggattccacgagcacttcctgtccgacgacaagacgttcggcggccatgtgctcgatgcggtgctcgagcgcggcaaaatctacagtcaggtgttcgataccttggtgcagcatctgccggtggacgaccctgattatcgcaaccacgacttcagccaagatccgatagccgaggccatttccagcgccgagggcgatactcaacgagattagtctcacataaacacaatgtgagccaaatgaacatttccgaacaatcgcacatgttgcataatggcggaagcactggcttctcgcacttcctatgttcgattgtcgcaatgcaggtctcacatctttcttattgagaaccattcgctgcgatatcatgacagatatggcttcccgccgcaagactcttaaacgcgattggttcgacaaccaacctggcgcatgggtaatggttatgctgcccgctgtggctggcttctttatcggcgggcctaatcttgatacgctttggctgttggcgacgtgggccgtgtgctattgcgtgcagttcagcgccgcgcactggttcaaagcacacttttcacgccgttatctgccgccgatgctcacttatgccgtagcgctcatcgtcatcggcttgccattcctgattacgcataccggcatactgcgttgggctcctttatatatagtactggttgcgctgtcgatgctgtcctcgtggctgaggaaggagcgctcgctgtggggcaatgccgtgtcggtgattgccgcatcggccatggccacggtgatcgcgtcgtttggcaacgctgttgagacggcatgtgttattcccatcaacgcagcacatgcctcgtgcgcagccgctgatgtcaccgccgcacgcgccgcgattcggaatatgccagatttgagccagatattcgaccttcacgcctggtggcctgcgggttcattgcccgtgaacgggctgattgccaccgtgctgtttgcgctgacgcagtatgggtcggttttggtggtcaaaaccatgatccgggaacgcgggaagcgttcgtacgtggcggcttcgtgggtatggcatgtggcgctattgctgctagccgccgtgccggctggacgcagcccgtatctgattgcgatgactgtgctgctgttggcccgcgccgttgcgttgccggtggttacacggcgcacaaccttgaagcccgtggtgaccggcattaccgaggcgtttgccagctttattgcttttggctgcattattgcggtgatttagcgacgctcagcgattccatggggcggtaattccctcatggggcggtaattagcccatggggcggacggtaaaattttaccttccgcagaatagagccgttttcgtacaccgccccatggggttttcaccgccccatgggcaagttaccgccccatgagtaggttaccgccccatggaggcacctgccggctgagagagcgccacatatgcaaaggagcccggcccctgtaatggggtcgggctccttgtgtcgcgctatgcagccactaagctgcaacaccgcggttggtggctactgatggtgccaccaaccacaaaccgcctgcaatcaacgctcggaggcttcctcagtggcggcctcaccctcgcgctcgatgcgcagcttgtggccttccgcctgggagacaccgtagtaagcaccgacggcgatgtccttcatgtcgttgatcagcgggatgcgcgggttggccggggtgcactggtcctcgtaggcgcgcatgccgatctgatcgagcacggaccagaagtaatcctcgtccacgccgcaa

SEQ ID NO: 3944 - DNA, 8640 bp, Unknown
  R22_24m  MAG No. k141_24872
acagccgcatccccgagatcgtcgaactcgcccgaaagatccgccgtcatgggcccgacatcctcgggacaatcgaattgggctgttcaaacgccaggctcgaggcgtccgacaacaggatcaaggtcaccatccgcatggtctacggcttccaccacgcgaacaatcccatcgccctcgtcatgctccgccgcggcggactcgacatacgcccaccacaaccaagaacccaacccacgaaaacagcagaagcctcatatgtattggacatttctgcgcagagagggaggtgtaaccgcagcattacggtgtgagaacgcaaggttacatagctgggcattggctgtggcgttgctagacattgaccgtcgagccggcaatcatggcgcaagcgacaatcacgacacgccgttattgacataccgccgttcaatggtattgtaattacttgtgcgcttttgaagcgtatggatcgggcccgtagctcagctggttagagcgcatccctgataaggatgaggtcggaggttcaagtcctcccgggcccacagaaaaaatgaagcggctgcgagccgctctttttttctcacggggctatagcgcagctggtagcgcatctgctttgcaagcagagggtcgccggttcgaacccggctagctccacagacaacccttggaataataccgattctgagggtttttgcgttcttgttcgagggattctcccagtgcgccatggccctctccatcgaaaaaggggtggtcctgttaaggaccacccctcgaggattcagaccaaccgcgtggtcattgtcgctccgtcttcacggaacggtacacgaaaatccttcgccttgcggcgatatcgcccggacccggaggactacaccttcctctcgggtggaaggtaccggcagataattggctcttccggttttggtgtgtagggggatgcttataggtgggcttgtatggtgtgtctgaagccgccggtgtggaggaggctgcgggtcacgccaaaaccggaagagccgttttcttttccttctccggtggtttcgtcgttgaccgtgttgccggtggcttccttgcaggcttgtttgtaggcttcggctgggctggtgtggtggagggcgcggatgcgtgcagcggcgtgttcgatgtgttcgagcgtggcggatggcgcgtcggtcaggccgtggcgggcgaggacttcgttgcgccacgagtcgtagcgttgctcgcgcaccacgcgtggcttcctccgccccctgacccatgcgtcggcgtacgcccaatcgccttcctcgtagatgtcgcgtgcccaggacgccgtcggacggtcgaacgggtaggggcccgccggcagcggcaacttgtcgaccgtcgggtcgaacacagtgaatcgtcgccgttccctcgcttcgcgttcccgttccggcgctgccagcgcctccgcgacgtccgagtggaacgcggccatgcgctccttggcgccggaggacgtgaacccgtcgtcgggttcgcgcagtccgtgctcctcgagcagcgggtggatgtcgtggtccatgagccagcggagccgggacatgttgaacgcgaggatgaatgcgagcgagattgcgaccatgaggcccatcccggcccccatcagcagtgtgctcatttcagccggctccagcgttcggcgcccgcgcgcgggctgaaacgtccccgccagtcccacggtccgacgaaacgcaaggccaacagaatcggggagcatgtggcgaggaacgcccagaagaaagccaaccatccaatccagtcaggtgtggatctgccggtgtcgacccattgcgcgctcgaccagaacatccatgtcatcgctatggggaagcccgatatcgcgatgaggaacagcgtgccgacgatggggccgccgaacatgtagcgcagcttcgtggcgggcacggaggaggcgaatgccaagtcctccagcgaggcggggacgtaggtgttcggccggccgaacacgagccggcagaaaccccagtacaggaggagtccggccagccacatcacggcgaccgccacgtacgtgttccatgcgtcgcgggatatagtgaccggtctgagaaaagccagcagcgtcacgtcatcggtatgcgtgtggtgcgtcttcgtgtccggggtgagcagccgggcgatgccgtggatcatgaccatcaggccgggcgcagccgcggcggcagcgccgccggccgccgcgccagcccgcgcccagccggaatcgccgccgaaatccagcttgcgcttgaccggcgtcttctccagcgtgtcccagaacacctgcgccccgtcctcaagacgccccaccaacacataccgagtgaacaacgccaacagatacccccacttccaaaacccgagattatccttgaaatgactgcccgggtcatctccaccgcctctgtgcacctgattgtcgtaaagtgcgtctaagccgctacttatcagccatccggctccagtgccaatcgccgttccgacaaatgcgccgaccacggtgccggcaccggggacgatcgatccgacgaccgcgcccacggcaccgccaacggtcccaccgaggccatcaacggcaggcccgagaccctacgcggcatcgccctcggcttccgcaacctcgacaactacgtcacccgcagcctcctccacaccggcggctttcagacacaccatacaagcccacctataagcatcccctctacacaccaaaaccggaagagccggatgattccctgcaagccgatcacgccaatccgacccgacgactaatcagattgaggacggctgaattaagcttgtgccctcatgatacaacatgtcctgcgaccgacgccagacacaacggcagcattctgcccaccatagggcgtgtctttaaccagaaagtaccctcaaatacgttcagcaagatatatgcacgcagaacagcccttccgcattatcttatttgacatagagcatgccccttccattccacagaatcaagcaaataaacgagcggagagactggacacaccgcaaaacaatggcccaacccctccgctcgtttgttatggaaggaagagggatgaataagtatgtttacttcactgacttgatgaagacgatcagcaccgcgccaatcagcgagcagaccgctgcaagcgggaagagtgcgtgatagcccaccgaggaaattagcgccgccgcaacatcccacgcaccatattcaggacaaatccagtccgttgttgtccttggctttgctcaccatatcagtcaaatcggggtcgtccacagacaccgcgttctgctgactgagcgtcaacgatagcgagccattataggagtcgccgtattcgtccttgccggacacgcttatggcaatcgaattcatcagacgctttctgccgtagttcagatccacggtgatagtcggcatctccggctcttcatccgtgccgaaatcccagttgcgcacattatcgagcgcctgacggtactcatcttcagcatcgtccacgccggcatcctcgatttgctgaatcacccaggatttcagatgcggatactgcgcttcatgactgatccagtaattcacgaaatgctgagacaacgctttgatatcgatttggtacgacagctgcgtattgccggcagacttggcagacgatgtattcgggaacagctggctgcgcacattcttatcttccagctccacgccgaaatattgttggatgaatttgctggcctcggccttcacctcggcagaccttttcgtgcccttggcccggtcgatgtcgttcgagtacccatcgtcgttcatcttgtccagctgatcgtagaacgtttgctccgcgccggtgatgtcccaagcaccgttcttgaccaacgcatccttgacgttcaatatcaagtccgccacatcactaccaacgccgttccttaagtcatcttcatattggtcggccgggcagtagatgtagtaggggtcgtcgtcatgccaaacgaatttctcggcgaatgcgcctttgtaccaagcgaaggtcgttgcatattcgtctgttttgctagtgaaggacgcggaggattcgttggtggttttgcccagcgaatacatgccagacatccgcacgtcaagagaatcgtcagtgatgctgtgggttctgagttcgtatttggtgctgcgcagagtggacagcgagttgatcgcgtcgaaggtgacgaccagcggattggtgggccggaagcccagcatcgctttgacggcggtgaagttggggatgatgaacgccaaggccgccaccagaatcgtcgcaagcaatgcgcagaaagcggcgatcagcttcttgctggatttgcgctgcggtgccaggacggcggttgcatcagtcgcctgatatgcggcaggagcgggaatcggcaaagccggcaggggaacggttggtgccggctgtggggcagcggacgcggcgtaaaccgatggggcaaccggcgcggctggtatcgatggtggtaccgcagacgccggcacagcaggtgccggtatcgacgcaggcggtacggctggcgatgcggccggtactggtgccgtcgcaactggtgcgctgtctacagacgctccacatgccgggcaaaatcgtgccggcccatcaactctatttccgcagtggccgcagtacgccatcgtgtgcctctctccctcaaatcggtctgattgccatcgcttcaatgttactcttcagcattacgcctcagccagcccctacgcgtaacgatacgagacgcggcagccttaatgcggttgttttgacgcgatgccaacatcgagctctggccaacgttctggtactcggctacatcttgctgcgagccaagaagcaggccatcgctcgcgccgacgaggccgaatggcggcctagcctcgctttaagcctcaggccagcacctccatggggtgataggtggcggtgtggtggccggtgatggggttccatacccgttcggcgaatgcgcgcagacgggcgacgccctcgcacagctcgtcggcatctccggcgtaggagaggcgcacgaagccgcgcccctcctcgccgaaggcctcgccggggaccacagccacgcgctcttcgtccagcagacggtctgcgaattcaccggagtcaaggccagtcaggcgtacgtccacaaaggcgtagaacgcgccttgcggttcgatcagacgcaataccgggcatccggccagaccgtccagcacgatctggcgcttggcgcggtattcctcgcgcatggcggccacgttatcttgcgggccagccagtgctgccacgcctgcgtattgcgccaaggagttcaccgaggagtgcatgagttcggcgattttgccggtctgttcgatgaccgcttcgggtgccagcaggtagccgatgcgccagccggtcatcgcataggttttcgacaggctttccaccacaatggtgcgctctttcatgcccggcaccgcggcgatcgatggtgccacggctgcctctcccccaagcgtttccccgaacgtttccccaaacacgaacggatggtaaacctcgtcggagatggcccaaatattgtgctgcttgcatacttcggcaatacgcgccagttcggcggcagaggttaccgcgccggtcggattgcccggtgagttgatgattacggcgcgggtgcgcggggtgatcgccgcttcgatgtccgccgcgttcacgcgcatgccgtgctccggacgcagcgccacggtgaccgggcggccgccgcacagcatcacttcggcgtcataggaagtgaagaacggcgagggaataatcacttcatcgccggtgcccaccacggctttcagcgccagaaacaggccaatcgtggcaccgtcaacggcttgaatctcggtttcgggatcataagtaagtcccttcacacaggcggagtaatcggccacggccttgcggtattcggggatgccaagcacgttggtgtaccgagtgcggccagcctgtgcggcctcgcaagcggctgccacgatatgcggcgcggccgtggcgctgggctcccccacggtcagtgaaatcgcgtcaggcacgcgctctacacggtcgaatacgtctcggatgccggagcgcgggatattcagggcttcggcggacaggctcgcgggctcggcggtcggcacagcaacccgaccggcagcaggcatagtagcaggcgcagcagcagatgcaacttcggacagagacatgttggaaaacttctgcatatcatccctcctcaatggaattatttcgtcgttctcttatttcaaaaggaattattacatccaattaggactttaaacgtaaacattccaccacacaacagaaaacacaggaagaactactgaaattaccaggcaaaatcggaaagccatcgcattccggcaacaggtacagtgaacacagagcacaacgaacggagaagacatcatgaccgcgattgacgagaccgaccagcgcatcctcaccatgctggaggccgacggccgcgccacgctcgcgcaactggcccaggcgaccggactgtcagtctccgccgcccagtcgcgcgtgcagaagctggagaagcgcggcatcatcaagggatacaaggccatcatcgaccaagagcagcgcggcttgcccatcagcgcgttcgtcaacgtgaccccgctcgactactcagccgaatcctcgattccggacaagctgaacaatatcgacggcatcgtctcctgctattcggtggccggcgcccccagtttcgtgctggtggtgcgcgtggcttcccctaccgcacttgaagaactgctcaatctcatccaccgcacggtgccggtaagcaccgagaccacgatgattctgcagacctacttcgcacactgaccgcgaacccggtaacctgcgcgccgaagacctgcggccacacaccccacaaaccccacagaccgcacgatccccaacagacacatctgacatcacccaagtccgcctttatgtccactatatgaacgtgcctccggtgtgatgcggcttccatttcgacccgattcacacatagacagacatccaacaatcgcccgaaaaatctaacaaacggaaacttgagccactccataaccacgccgaaagctttcccgttatccgagcgagactctatgcagcaagggcctgcgcgcatagaataaaaccgtcttaattccctaccaaatcgaggagaatcatgctcactgacgagtacatcaagcgtgtctacgaccaggtcgttgcccgtgacggcgatcagccggagttcctgcaggccgttcgcgaggtcttcgagaccctgcagccggttgtcgagaagcacccggagtacgagaaggccggtgtgctggagcgcatcgtcgagccggagcgcgccatcaagttccgcgtggcctgggttgacgacgagggcaaggttcaggtgaaccgcggctaccgcatccagttcaactccgccattggcccgtacaagggcggcctgcgcttccacccgaccgtgaccgagtccgtcgtcaagttccttggcttcgagcagattctcaagaactccctgaccacgctgccgatgggcggcggcaagggtggctccgacttcaacccgaagggcaagtccgacgccgaggtcatgcgcttctgccaggccttcatgaccgagctgagccgccacatcggccagttcaccgacgttcccgccggcgacatcaacgtcggtggccgtgagatcggctacctgttcggtcagtacaagcgcatccgcgacgagtactccggcgtcctgaccggtaagggtctggaattcggcggctccctggcccgcaccgaggccaccggttacggcgtgtgctactacacccaggaagccctgcgcgtgctgcgcaacgactccttcgagggcaagaccgtcgtgatctccggctccggcaacgtggccacctacgccgctcagaaggctgagcagctgggcgccaaggtcgtcaccgtctccgactccaacggctacatctacgacccgaacggcatcaacgtcgaggtcgtcaagcagatcaaggaagtcgagcgcggccgcatcaaggaatatgccgagcgcgttccgggctccgagtaccacgagggcagcaagggcgtgtggaccgtcaagggcgacatcgctctgccgtgcgccacccagaacgaggttgatggcgaatccgcacagaagctcgtggacaacggcgtgaccgtggtcgtcgagggtgcgaacatgccgtccaccccggaggccatcgaggtctaccagaagaacggcgtgctgtacggcccggccaaggctgccaacgccggtggcgtggccgtctccggcctggagatgagccagaacagctaccgtctgtcttggaccttcgaagaggtcgacgccaagctcaagtccatcatggaagagatcgtcgccaactccctggccgccgccaaggaatacggtcacgagggtgacctgatgctcggcgccaacgccgccggcttcgtcaaggtcgccaacgccatggttgcccagggcgtgctgtgacgc

SEQ ID NO: 3945 - DNA, 11985 bp, Unknown
  R22_24m  MAG No. k141_25040
gctgtcgccgctcaaggccagaagtgagcctaagccgctaacacggtacaagctgtaaggggagtcgcacataatgtgtggctcccctttgctatgcctgccaaatccccatggggcggtgattaccccatggggcggtaagactctcatggggcggtaaaactctcatggggcggtaaaaccctcatggggcggtaaaacccccatggggcggtatgccagaatggcttaattccgcggtttcacatatccttcaaaccgccccatgggcaagttaccgccctatgggtgttttgccgccccatggatacgccggtgtaccgcccagaagcaacaaaaaacggcgtccagccgtagccggatcgccgctttcgggcatcctcctcaaaccataggaggacaagtgttcagttattcgcccaatgtgaggacaagccccaatcagtcgatgtcggtgccctcgtcgcgggtcggctccttggtggggtcgaagccggagacgatgtacaccacacggcgggcggcggacacggcgtgatcgccgagacgctccaggaaacggcccagcagcacgatgtccacggtctgttgacgggtgatgtcatcggacagcgccagatcgaaggtctggtggtgcaggttgtccagcttgtcgtcggccaggatgatggcctcggcggtcttggcatcgcgatcggagagcatggccaccagctggtcagcggtgttgtccagaaagtcgatcatctcggcgaacaccggctgagcggattcgggaatcgcggcggccgggtaggtgcggcgagcggcctcggccacgtggcgggcaagatcgcccatacgctcgaacgtggaagccagacgcatggtggaaacgaccacacgcagatcggtggccaccgggttctgcttggcgagcagcttgacgcactggtcgatcacagaggactccagggcatcaatctcgatgtcgccgtcaatcacagtctgtgcggcttcaacgtcctgattcagcagggcttccccagcgcctttgatcgccttgcgcacgttctgcgccatacggtcgaggtcgtcagcaacctgcttcagctcctcgttgaaaataacgcgcatttctctagcctttcatgcttgcttattgcaacctgtaccagtgtattattccagtacttgttccccacttcaacgtaggtaatggcaacctcaaattgttctactgttcattgggttgttcacctgaaattcatgttaccggcgcgccggcaaaccgcaatcccggcgtgtggtgtgaaagaatgggggcatgacacagatgccgctcgtcgccgcgattgctcttattgtcgcggctgttttatttgtggtaggaatcatcacgctcatcgtgggatttgcgacacatcgagtgtccgtggaatcgccgctggccgatgatgacgacaatgacgatctgtccgacgacaccgccacgctgctgtccatgctgccgggtgcgtccgtggtggtcgacgagcacgacgaggtggtccgctgcaatcccgccgcctaccgcctgggtgtggtgtcagatgacgccatcgcccagcagcaggtgctggatgccattcacgaggcgcgcaagtctggtggcaagcgccagttcgacttgaccaccgatactccggagcggtacgtcgcagaccagaacaagggcgatcacgtcgccacgcagtccgtccaccgccccaactggctgaaggtgactgtagggcgtatcaacgagcagttcgtcatcgtgttgattaccgatgtcagtgacgtgattcgtttcgctcaagtgcgtgactcgtttattaccaatgtatccgagcaattgttgggccccactgaagctctggccaaactcgccgattcgctggagtccggcaatctggacgaacagcaggtggctgccgatgctcgccaggtgcgttccagctgcagcaagctcaaccacatggtgtccgatttgctgctgctcatacgcgcacaggagccgattacgccgtcttccgccaaccgactgaacgttatggaacagctcgaggccacggtggcgcgactggagccgcaggcggccgcggctggcgtgcagctgaacatcaagggcgacgatgatctagtcatcaatggtgaggcggatcagatcgacagcgccgtgaccaagctcatcgaaaacgccatcggctattccaaggaaaatggtgtggtcagtgtgtccgcatccaaagacaaggatggcgaccgtgcggtgattcgcgtgatcgaccagggcgcgggcatcgcgaagaaggaccaggcgcgcatcttcgagcggttctaccggggtgcggaacagagcaatcgcacggcggatggcgtgggccttggcttggccatcgtcaagcatgtggcgctaacccatcatggcgatgtgaccgtatggagcgcgcctgggcaaggcagtacgttcagcctgacgttgccgttggcgcagtgaactttattactgtccgaggcggcggtagtcccagcggtcgaagtattcccaaatcagcagtagcaagccaataatgacaccggccacgcacataatcaccaacggcattacgctgtagcccacggccagcagaatcagcacgacaatcaacgccacaatccatagaccggtaccgatggcaaacaccttacgcaggtccacccgtacgggcttgggcgcgggtttgcggacggcagggtcaatgagaggcgcgaacttcatactcatgcactgtagtaagagtagggaggggcgtcaaacacctctccctacgatttattcaatcggtatcagttgagaccgatcaatgtgcatggcatatatggtcggccatgcgaggcatagaccgccatcacaggtgctcgaccacatagtcgacgcacttggtgaaggccatgacatcagccggttccaccgaggggaacacgccaacgcgcagctggttgcggcccagcttgcggtagccggcggcgtccacgatgccgttctctcgcaggatggacagtatctgggaggcctggacgcgctcgtccagatcaatggtgaccacggcgttcgagcgggcgtccgcatcgacgacgaacggagcggcgtattcggagcgctcggcccacgagtacaggatggatgcggacttggcgcaacgcgtggtggcccaggcgaggccgccgttgttgttgagccagcgaatctggttttccatcatgatcagggtggccacggcgggcgtattcagggtctgatccttgcgggagttgttcagtgccgtggtcagcgagaggaacggcggcacccagcgatgtgcgccttccagatgagcgcttgattcgacgcatgccgcacgatcgatggcttcgggggagaggatggcgacccacagaccgccatcagcaccgaaggccttctgcggtgagaagtagtagacgtcggtctggctgatgtccacgggcaaagcgccggctgcgctggtgccgtcgatgacggtcagggcaccggcttcacgactgccgggcacgcggcgaatcggggcggccacgccagtggaggtctcgttgtgagcccagcaatatgtgtccacgcccttggtgagctcaggcagacggtaagtgcccggctcgccggggaacagcaccgggtcttcaaggaagggtgcgttcgcggcggacgcggcgaacttggcactgaacgagccatacgtgccgaatgcggcgcgacgggtgatcagcgaagcgcaggcaatctcccagaacgcgctggcgccaccgttgccaagcgccacctcatacccttcaggcaggtggaagaactcgcgcagaccttcacgaatcgaagcgaccagttgcttgactggtgcctggcgatgtgatgtgccaagcagggtggtggcgccggcatcgagcgcggcgatctgttcggggcggattttgctgggaccggagccgaagcgaccatcttcgggcttcagcgactcgggaatactcagtgtgatagtcatggtttcaagggtagaccagtgttggggaatatcgcggataatgctcggtgtgcgggattgctgcggggctactgcggggctactgcggaattccggggtgccgggcggtagtagcggcaatgcggaatgcagtgcagaatgtacgcagcacatcatggctacggtgtgtcggaatgacatgagttagtgattcttccgataaccggatagtgaggttcgtgaacgggcggaaacaaggcagtttttcaccctgccgcacggttacgtaaatcgtttgacatgcccggatggtgggggatcgcattgaggattgacctctgttcgttgtacagtactcaattgtgccggtcatacggggtcgttgaaaggaccccgccgaacccatccaaggagttaacgtagtatgaagcatgcttcgcataaagcgaccacggtctcgcgccagaagttcagcttagcgaaggcattgtttgcctccggcaagggttctcattccgttcgtgccgtgcgcgcggtgcaatccgctggcagcgacgccgttgttttggggcttgatccggccattgccgagaagatcaatgaaatcgctccccagactcgtcgttccattcgtgaggccgctcgtgccgctgaacgccgtagccatattcttgcctcggcctcactggccgctctggtcggcacggccgcaggtgctctcgcattttccaacaataaagacgccacgaactcgttcgtggctgatccggccacgacgaccacgcagattaagcgcatcagcgatgtgactgcggcttctcgttccgaagcacgtactgatctgagttcatcctccgttaccgcacagtccaccaatgaaggcggttgggggctgagcaattcagacagcaccttggacgccaagctgatgaatcgcaataatgcgaacaatcctgtggtgtcggctctcatggatgccgatggcgatgctgtgccggctggcttcaacccgaaccatgccgttggcaccaactccaacaactatccgtggggtcagtgcacgtggtacgcgtaccagcgtcgtgccgaactgggactgccttccagcggcaacttcggcaatggtggcgagtgggcggcgtcagcttccgctctgggctattgggtggacaacactcctcgccatgtcggtgatgctgtggtgttcgctcctggccaggccaatgccgatggcacatacggccatgttgccattctggaaaagatcaatgccgacggctccattgagatctccgaatccaatgccaagggattgggtgtgatttcgacccgtacgttcagcgccaccgaagccggtaagttccagtacgtccactactgattcatttcattggcttacattcggtgattactgttcggatgtgacgtcgccctatcggcaatcgttcgcgcgaaatgacatttcaagtgttgcgaccgcgtattagtccgaactgacctgtgccgacacgccgatatatcccaatagctccggggtgttttatttcttccatcctgtacgagttaatgcgcaccgtgtaaggtgatggttctatgaagaccaaaactgtagcttcttccattgttgccgcgattgtctcctgtgcttgctcgtttatgtttgttcctacagcgactgcagctgagggtgttactgtgacttccaccaagtccttcccctcgtacacccaggtgcgcaaagatctgacgactgaagccactgccacgaatgttgaggacaatgctgattggggcggcattgagaacctcgacgtgccgcagacggaatctcaggcggaaaaggatgccgcagcggccaagaaggctgccgaagaggaggccaagaagcagacggaggccgaggctcaggcgacccagaagcaggccaacgccgcgagccgtaatgagtctcgctcttctgttacttattccgatgccagtggttcggtttccgctggtgccggtgcctctatcgaccgtgcgtattctttgatcggacagagcatggactgcaccgcattggtcagtcaagcgttggcggcccgtggtattaacttccacggttggcctgaagagtacgtcaatgttcccggtggccacgtagttacagacgggtccctgcagccgggcgatattctgatttatgccaacaccggtggatggaatggcggcgcgcactacgatcatgtggcgctgtatgtcggcaacggtcaggcggtccatggtggctggaacggctacagcgtggctctcgctagcgccatgaccgaaaaactcaccatcgtggtacgtatcccgtgatgcagtcttattgattgatatattgcaggcctcggatgccaatcggtatccgaggcccgttgcgttctcctgccgagtgatacacccgcgacatcatcttcgaaaagacattcctgttatgaaatcgacccatgtgtgctaaggtaaggcgctgatgacgaacgttaagaatattatttccacatcagtggcggttatcgccacgggtgccatgtttgcatgcgtagccccgtttgcctctgccgattccgcgcagacgagtgctgtggtgtcctcacgctctttcccgaaggcgagttcggtgaagaagaatttgttcgccgaatccacctccacttcggttgacgagaactctaaatggggtggcatcgagactcttgatgtgccacagaccgagtctcaggccgagaaggaagctgctgctgcggcggcggctcagaaagccgctgatgaagctgcggcagcccagtccgctgctgctgctgcagccagccgctctgaacagcgtgcgtcgattccacaggttgacttgggtaaaatgactggcactggcgctgagcttgccagcttctcactgaagttccaaggctatccgtatgttgccggcggcaacactccggcaggatgggattgctccggttttgtacagtacgtcttctcccagtttggcatttccctgccgcgaacctctggtgctcaagccactgtgggtactccggtcgcaagcttggcggatgccaagccgggtgacattcttgcgaatggtactcatgcggccatttacatcggtaacggacaggtgatgaatgctatgaacccggtgcagggaacggcaataagcaacgtttccgtgttcggtggagctggatattccattcgccgcgtgatgtaacaagaattatgcggtaagcgaattcgtattaaggcacgtcctttgggatgtgccttttttcgtatacgcggatttctttttgagcggaggataccggccaaaccgagtgtcgcggggtattgttggaggtacgcggtattcgtgccacaataacttcaaggaggtcgtcatgattaacgacaaggccattctcgtcggcgttgacgggtcgcatgccagttacaaggcaacatggtgggccgcgaattatgcaaagcacgcggggctgacgctgcagattgtctgcgcatattccctgccgagctatgccgccgtttcgttcgatgcaacttacacggcgatgggggacgataacgccgcgcattccgatgctcaggagattctggccaaggccaaggccatcgcagacgagcagggcgtcgaagccgccacactgattgttaccggagacccggcatcggtgttcgtcgaattgtcgcgtaactacaatctgatcgtcattggtaaccgtggcaagggcggtctggccgagcgtctgctgggcaccacgtcctcgtcgctgccggcatacgcctactgcccgattgtagtggtgccgtacaccgatgatgacggcaacctgatgcacctgaacaacacgattaccaaggtggccgtaggctccgacgaatccaagtggggtctgaaggcgctggacattgccgccgacttcgccacgtgctggggtgcggaactggacgtgatttccgctgtgccgaacctgaagggcgtggatggcgaggatgccatcatggagtcctacaaggacgatcttgaggtgcgtatcaagccgttgcaggaatcgcatcctgatctgaaaatcaacaagcagatcgtttccggcccggccgtcagcgcactgaccaaggccagctacgatcacgatgttgttgttgtcggctcccgtggtcgcggcggcttcaccggtctgctgctgggctccaccagccagggactgctgcagcatgcggccggcccggtgtacgtggtgccacgcaagtatgttgaggctgcggaatcgcgtctcgacaccgtgccgagctcgcccgccgaagtgcctaccaagtcgctggaggagattgccggcgtcgaggagattccggtgtccgcagccgagcctgaagtcgcccagcagatcgaaaagaccatcgatcccgacaggcagtaaagtccgggtatacaatgagctccctcatcagagggagctcaatttattagtacgtcggtttattagtacgtcagtgcttgacggtgacgttcatgcgcaccggggtctcctgtacgtaggtgtgcttgaccgtgcagcccttgtcgatatggcgggtgacgcgttccttgagcttgttggcatcctcctcggacaggctggcgtcagaagcatcaatcaccacctgctcctcgaaaccggtgtaggcgtcgttctcggggtcgtacgtgccatccaccacgatcttggcacccttgccctcacccagcgtatgttcgatggcgaactggctggacagcgcggcgcaaccggccagcgcgaccttcatcagatcgcccggcgtgaactggccacgatccttgccgaacttaatgtgcgcgccatcgtcgctgaacgcatcccacgaaccgtccttgttgcgttcaacccacagtcgcttacccatagctgctcctttattttcagccgccggcgatctggcccatcgccatgccagcgggggagcgcggcacctggccgctctcccgcatcatcggacttctctattatgcccctaagctacactggtgcacatggctttgaccgaagaacaactcgcagatattcgctcccgtatccccgcacgtcccgaaacggacattccgatgccctatgaggacctggtgcgcaagatcctgaccgaaggcacgctgaagtccgatcgcaccggcaccggcacgatttccctgttcggccagcagatgcgcttcgacctgtcgaagtacttcccgctgctgaccaccaagaccgtgttcttcaagggcctggcctacgagctgctgtggtttttgaagggttcctccaacatcaactggctgctggagcacaacgtgcatatttgggatgagtgggcggacgagaacggcgacctaggcccggtctatggcgtgcagtggcgttcctggcccgcaccgacccccgaggacccgaatcgcaccatcgaccagatctccaatgtgctcgacctcatcaagcatcatccggattcgcgccgcatgatcgtctccgcgtggaatccggccgaggtggagaagatggcgttgccgccctgccacgcgctcttccagttctacgtggccgacggcaagctaagctgccagctgtaccagcgttcctgcgacatgttcctcggcgtgccgttcaacatcgcttcctactcgctgctcaccatgatgatggcgcagcagaccgggctcaagccgggcgaattcgtctggaccggcggcgactgccacgtctacgacaaccacgtcgaccagttccttgagcagctgggccgcaagccctacccgtacccgaccatcgagattcgtaaggccgattccctgttcgactaccagtatgaggacttcaaggtcgtcggctaccagcatcaccccactattaaggcacctgttgcggtctgatgctgattaccatttcgtggacagcgaagactgtgaaggtgacggaccccgagtcttcgctgtccactacactaaggcccagttccgcaatccaggaggagtaagcgaaatggagcatgacagtagccgtagcggctatcacgaacccgagcccggatctgccgggctgtctgccactgaagaagactggggtgacgattatcccaagaccttctcggtgaatcttatctgggccgaagcccgcgacaaggaaggtcgcgccggtgccatcggcctcaatggcggcatgccttggcactgtgccgaggatatgaagcatttcaaggagctgaccgtctcccatccggtgattatgggtcgtaagacttgggaatcgctgggggtcaagtaccggccgctgcccaaccgcgacaacatcgtcgtttcccacgatccgatgtaccgtgcgccgggggccactgtggtcaccagtcttgacgacgcgctcgatatggcccgtcaggaggcgattccggacgacggtctggatcgttcggagatttggatcctcggcggcgcccagctgttcgccgaggcgttgccgttcgcggacaaagcctatgtgactgatctggccgtcactgtggatgccgacagctatgcgcccgatatggcgtcgctggtcgaggccgggatgtggcgggaagccgaagtgggtgagtggcgtacgcccgccaaggaggagtccggcatcgattcctatcgtttccgtatcttggtcaaaaccaagtaagcatgcgaatccggcttgtgtcctttatggcggcatgagccggattcatattcattcgaccccaaaaacacattcgggccgtgtgcggcccggtgaagcccgattgaggattgattcaaagctatgagcaatacccagccctacaccgtaatgaccgtctgcaccggcaatatctgccgttcgcctatgggcgagatcattctgcgtcacttctttaatgagcgcggtcttggtgaccaggtgaacgtggaatccagtggtgtgtccgacgaggagtggagccacccgatcgacccgcgtgccgtgcgtgtgctacgcgaacgtggctatggtgatgagattccgcgtgaccacttcgcacaccgcatctcacgtgaggaaatcgaccgtaccgacctgttcctgccgatgaccgcctcccacatgcgcgccctgctgcgcatgctgccgtccggcaagcgcgccgaagtgcacatgtaccgcagcttcgacccgaatctgcccaagccgaagcccggccgcgaggatcagattgatttggtggatccgtggtacggcggcaagcacgagttcgaggtcgccatcgaccagattgaggaagtcgctccgtacatcgtcgattgggtggcgaagcagctgtaggaatcggcctgtggccgatgctgtgtgtttcgcagtcttacgaccgcgggtctctacctccgcttcgctgcgttcagcacctccctcacagagggaggtggtcgccgaaggcgaccggaggaagagatcaacgaaggagaagccgagcccaacctcagaacaccagctgcaccagtagcatgtatacgatcgtgccgccggcgattgaaagcagcatactgcgtttccagacgtgcagcagcacgatgacggtgcaggcgatgagttccggaaggccgtgtgaaccggtcagaatcggggtgttgcgcagtgcgtataccaccagcagaccggtcatcgcatagggcaggactcggctgaaatattcgatgacgcgcggcggctgcttggattcgggaaataccaggaacggcagaaaacgggtgcacatcgtccccagcaccaccgtcacgatggtgagcgcgccttgccagatggtcatcgtcatcgcgtctgtccttccttctgctggtccgctgcgtggctcatggcacggtctgccgtggcttccggggcgtcggcggccggccgcaacacatccagatgcgggcgcaacgcgacgaacagtatcagcatggcgatcattgagggaatca

SEQ ID NO: 3946 - DNA, 18040 bp, Unknown
  R22_24m  MAG No. k141_25098
acgcaggtggcgatggcgttgggtgcgtcggtccagccgttgacgaagatgactcccagcgtcagcaacgttgtgacggtcagagccgggttggaaagcacttgttggaggaaatgcgccagtgagacgtccaaggggaatcaacaccttcttcttcgggggcggaagccgtcacactgattgtaacggaagaatggctacgtagttcccatggcgcgcggattatatggtgttgttatgttgcgcgccgcgcatcctttcgtgaaaacagagcaggacagtcgtatgcttcgattcggcgcctgcatcgacaactctcgtcatctaccgaggattcggtcatgcgtgtgcgaaaatggacacggtgtcaatcaggaggtgcacagtggttgtaagcacggattcgagccgcacaatgcccgattgggtgaagtacggggtgttctggcacgtgtatccgctgggcttctgcggtgccgatatcaggcccgccggcccgcgccagttccatggccgcggccttgacgcgatgatcccttggctggagtacgtgcgcgatctaggcgcgtccggcctgctgctgggtccggtgttcgagtcggcgacgcatggatacgacacgctcgaccatatgcacatcgatgtgcgattgggcggggatgccgcgttcgaccagctgattgcggcctgccgggacatgggattgcaggtggtgctggatggcgtgttcaatcatgtgagccgcgatcatccggccgtccgggcggcgcttgacgagaccaccggacgcttgaatccggccgacaacccgtggcatggtctggtccgcgcgcatgtcggtgataatgacgaacccgctttggatgtgttcgaggggcacggggatctggtggcgctggaccattcggctgacgagaccgttgactatgtggcccatgtgatgagccattggctggatcgcggagccgccggctggcgcctcgacgccgcgtatgccgtgccgagcccgttctgggcgcgcgtgttgccgcaggtcaaagccgcacacccgtattcgtggattttcggtgaggcgatccatggcgattacccgcgcatcatcgaggaatccacgatggattcgatcacgcaatacgagctatggaagtcgatccagcatgcgctggagacggagaacttcttcgagctggattggaatctcaagcggcacaacgcgttcctgaattccttcgtgccgcagacgttcatcggcaaccatgacgtgacgcgtatcgcatcgcagattggcccggccaaggcggcgttggcattggcggtgctcatgacggtcggcggcgtgccaagcatctattacggcgacgagcagggctatgtgggcgtcaagcaggagcgtttcggcggcgatgacgacgtacgtccgaagttccccgactcccctgccgaactgtccacgctgggagagccgacataccggctgcatcaggcgctgatcgcgctgcgccgtcgcaacccatggctgatggatgcgcgtaccgagaccgtgaagctggaaaacaagcacttcgtctatcgttcgacgagcgccgacgcccagcattccctgaccgtggacctcaacatcgagcaatcccccactttcaccatccgcaacgccgacggcagtacagcgtatcaatactgagctacctcatcagagggagctcaccattcaccgccgaataccacgaatcagcaggtcgagcaggtaaccgtacgaccggtcgacccgttcgcggcctcgtgtgcggggttgggcggaacgcagttcgaattggatgaacccgtgtatggacacccagatggaggatgcaatcaggtgggggtcatcgtcacggaacacggtcgccgcctggccgtatcgaatgatctgcgtgatggcttccaggcaatgctgggccgagtccgacgcctgccccatccagaccagcgtgtaaataccgggggcgtccagcgcgtgttcgcggtagatcatgcccgccctgcgcaggcgcagcacaggatcggattcgtcaatggcgatgagctgttcgcgcagatcggtgaagtatgcgtcgatgagcgcatcggacaccgcctgcttgccgccgatgtgctggtagatgctggtgggcgacacgtcggcctgcgcggacagcgtacggatggtcagaccgtccacgccgtcctgttccacgatccgcctcgccgcgtcaagaattcttccgcggatttcaagggttggcgtgcgtctggatcggggctgcgattgcgtcatatccgttattctagggtgcgtacaggccattaccgccgttttggcatggccacgatcgcaacgaccgcggcgataagtgcaatcgtcatggccgccaggcagacgctgtgcagcccgcccatgaacgcggatgcgaccgagtcatccagcaatctgcgcagggtgcccggcagggagccggaaatggattcggcagccatcacggattccttggatgcgccaaggatgtcctggggcaggtgagatcctcgcagcgcgtccgtcaggccggtggtgtacgcaccggcctgcagcgaccccatgatgccgacgccgagcgtgccaccgagttcgcggatcgtgtcgttgacggcactgcccatgccttcctcgccgaccggcacggccgtcatcagtgtgtcggtggcgggaccctgaacgagggcgatgcctgcggccatcactgccatgacgaccgcgaacggcagtgtggcaatcgccgtctcgagcgccgaacacccacgcagcgcctggaaccattgggtcgtgaggaagatgaaaccgaacaggcacaggaaggcggcgcaaatggccaacatgccgatgacggcgcacacccagaacacgctatcccatgcgaaccgttgcagcaggatgccgccgatgaccgggccgagtactatgcccaccccggatatgccggcccacagtccgacggccagcccacgcataggcgatccgtcgaacagcccgatgatggatgacagctcgactcccatcaagttgtatatcaatatatcatacttatggaacattgatacacatcatgtcgggaacaggcatccgcatcgcaaacaccgacctacaacacgatcaggcccgacgaccatcaaaggtcgtcgggcctgattcatacgcgctgtcggactaacggcgtccggacttcatacggaatggcgcattattgcgattcttcttggaatggcggcggttcgggccttccgtgttgccgtatttggcgatcatgcggcgttcgtgacgcttggcaccttctgaacgctcgtcgcgtacgatgcggttctcgttcttgtgatggatgcgcttgtcgaattttccgcccttgccgtaccgatcattgcgacggttcttgccgtactcgttgcggccatcgtcctggcgctcgtcgtaacggtttttgccgtatccgccgcgacggccgcccttacggcggtcatcgccatgctcgaacagatagtcgcggcgctcggcctcggggtcgctcatgccggcgcggcgttccgcacggttgcggttcttcttcacggccttcttgctggccttgtcgccgtgcttgcgctgcggctcgccttcggcaacaaactcgccgcctgcgttctcgtgctggaatccggtctcggcaacgttctgctcggcgcggtcgcgattgcgattgtgcttgcgcctgccgctgcggccggactcatcgcccgccgcgttcttggcgcccctgttcttgcccttgcgcgggttgcccacgggctgcgacttgtcgaggctccaaccatccacgcgctcggcgcggtcgcccacaagctcaagcacttcgggcgaatcgtgggtcacttcgatcatcttggttttgatgccggcctggttcagtaagcggcgcgtctcgcggcgctgctcgggcagcacgagggtgaccacgtcgcccgccttgccggcgcgggcggtacgaccggagcggtgtacaaaggacttcgggtcagccggcggctcgacctgcaccacaagctccacgccgccgacgtctatgccacgggcggccacgtcagtggccaccatgacgcgcacgtcgccggaatcgaatgcggcgaggttgcgatcacgctggttctggttcaggttgccgtgcagctcggcggccggaatgccgttctgcgtcaggttcttggcgagcttcttggcctggaacttggtgcgggtgaacaggatgcgacggccttcgcccgaggcgagcacgcgcacgagttcgtgcttgtcgccgcgcgtggtctcgaacacgtggtgggtcatcaggtcaggttcggtggtggccgaatcgacctcgtgcaccttgggatcatgcaggaaggtgttcaccacttcatccacaccgtgatcgagcgtggcggagaacagcatgtgctgggcgtcgggcgaaatctgctcaagcagtcgcttgaccggcggcaggaagcccatatcggccatttcatcggcctcatcgatgaccacgacttcgacggacgagagcgtgagcgcctgctggcgcagcaggtcctcaaggcggcccgggcaggcgaccacgatatcggcgccggccttcagatcgcggatctggtggatgtacttgacgccgccgtacaccgtggtggtgttcatgccgaacgtgtgggccagcggcatcagcacgtcgttgatctggttcgcgagctcgcgggtgggggccagcaccaggccgcgcgggtgcggcaggaaatcgtcagcgcggcgctcttccaagctggccttcttgcggcgcttgatttccttgcggaactcctccatcgcgatttcgccaagcgaatcataggagccaagccgggtgaccagcggaatggagaaggcgagggttttgccggagccggtgcgccctcggccgagaatgtcgcggccggccagtgaatcgggcagggtgtcggcctgaatggggaatgcggtcttcttgtcatctgccgcaagtacgcgcaccagcggtccgggtacgccaagttcgccaaaggtaagggggcgggattccgcgctgtcgttcatctggaaatcagcggaatcgtcacgatcatcgaaattattacggggcacagtggcctttcatgtcaaaggttacgcaaattacgcaagctttccgagcttagcgtaagccccctactttgcttgatgctcgccacgctgtcatcccactctttactgatgaccccatggggcggtaactcgcccatgaggcggtaacttgcccatgaggcggtaacttgcccatgaggcggtttgaagaaattgtgaaaccgcagaataaagccattttcacctaccgccccatgagggttttaccgccccatgggatgtttgccgccccatgggccaattaccgccccatgggttctaccaccacgtaaggcgagcaccgccccatggaacacgcaaatggcccctacccgtgaaggtaggagccattgtgcaaaagggctgagccacaatacggcccagtagccctaaaacacactacaaaatatccggatcgtctttggcgatagtgccggttgccttgccaatggccttcaggccgtggtaggccacaagaatcacgatcgtgccaatggcaatgccgttgaaggaaatgccaccaacagtgaacgcgaattggccgatggcaataatcatggtgatggctgccaccatgatgttcagcggcttgtcgaagttgaccttgttctcaacccagatgcggatgccgatcatgccgatcatgccgtacagcagcgtggtcacgccgccgagcacgccggcggggatcgtgttgatcacggcgccgaacttcgggcacaggctcaggatcagggcgaaggcggctgcacaccagtaggcggcggtggagtacaccttggtggcagccatcacgccgatgttctcgccgtaggtggtggtgccggagccgccgccgaagccggcgagcgtggtgcccaggccgtcggccatgagggcggtgccaatctggttgtcgtagtcgcggccggtcatctgggccacggacttgacatggccgacgttctcagccacaagcacgagcacaacagggacgaacatgggaaggatggaaaaatcggcctgcggcaggtggaacttcgggaagccgatccatgcggcgtcaccgatggcggagaagtcgacctggccgcggatgcaggcatatacatagccgatgattacgccgaccaaaatgttgaggcgacccagcaagcccttgaacagcacggccacgagcagcacggccagcagggtaaccagtgcggtgtccggcgcggcttggaagttggtccacacggaaggtgccagattgaaaccgatgatggccacaatcgcgccgttgaccacgggcggcatgatgatgtcgatccacttggagccggcgtaatgcacgagcacgccaatcagggccagcagaataccggtgaccatgatgccgaagctggcgaccgcaatgcccttgttggcggtggtgaccgcggtgatcggtgcgatgaagccgaaggacgagcccaaatagctcggcagcacgttcctgttgataagcaggaacagtgcggtggacatagccgtgaagaacagggtggcggacgggtcgaagcccgtcagaatcggcaccaggaaggtggcaccgaacatggcgatgacgtgctgtgcgccgataccggcggtgcgcacccaagtcagacgttcatcgggctcgacgacctcgccgggcgccagcgtcttgccgtcgccatgcaattgccattggaagatattggacattactactctcctcgctctcgcttggggcacggcattcacaaccagccgcactacgcgccattctagctcacgaagattttgtgaagtctctcttccgggaaaggctatttgccgtaatactccagcaggtgcgggtcgacggcctgcaccacgtccaccagatcgccattggacaggtacgggcgcttgaattcgcgccacggctccaccttgacctcccagcggccggtcgtctcgtcgagcacgggccgggcggtctgctcccagcgcacacgcttggaggtgcggccggtttccgggtcgcggcgcgtgtagtgcaggcaggtgcagttggtgatcttccagtcgtccgagtcggcgcgatgcaggaattcctcgtcggccagatcctcgatggtgagcatcagggcgagcatgaagtcgccgtgggtgaccatgaccacggattccgaatcggatttgcggctcagcgaggtcaggatgttgtgcacacggtcctcggccacatcggcaatcgactcgcctgccggcggacgccagtacagcggatcggtattcttgaagttccagttgcgtgcgtagttgtttttgaattcgtccttggtgatggtgttgatttcaccccaagaacgttcgcgcagcacacggttctcctcccatttggccttgggcagggccatggtggctgcggtttcgcgggtgcgcacgtatggcgagaccatgtaacggtcgaacagctgctgctggctgaccagccaacgaccgatgcagtcggcctgcttgcgtccggtggcggtgagtctccaggagcggtcgggtacggtgacgttgtcctgcgtatacagggagttgtcgccctgttcgcccgcctggacgatgacgttcgcttcggattcgccatgccggattacgtatagatcgagcggcatgctcatatggattcctctttcgttattggttacgttgtgttgttttctgctgtttcctacttgacctgcgtaatggtgttccccttgaccatgaacgcatgccgggccatgtcgatcatcggctgatcgaacttggagtcggtgtagaactcgtcgatgacggcgtccggaccgtacagttcgcggaaccgtttggtcttgttggtgttgaagttgaggtacgtgaccttcatcgtctccacatccacctcgctggccacgagattcctcacgccgagtctgcggcaggcctcccccaccgtcagaccgaaggatgcggtgaggatcacatcatccgactcaggctggtaccaaggcttgatacgtgcgtaatatcggtcccagaaatcgtccacgagctgttcgacgctcgccacccgtttggatcggctcagttccgtgagatagccttcggtcatcttgcccacgccgtattccatttgttcaagcgtggcccggccaagcttgtatttgaccgcgtaccgcagcacgggggcgatatagcggaacactttcgggtcgtggcgggcggaatacaggtacaagtcgaacaggctttcgccatcatagatggttccgtcgaaatcgaatacgcgcataccttctgcttctactctgttattccttgtctaaggctaatctcggtaagccggcgaaagcgcaaatacgcagtgaatttcacatgaacactgttttttggattgatttcggtacaggtaacgtacactggtgacagcgtggaaggaggtgcgtaatggcgacgtctgaaatcgaacaatggtggattgataagtttcaggagaacctgggtccgattcgcaaggtagccggatggacgactcagcaactggccgacgagctgggagtcgcgcgacagacggtgtctaacttggagaccggcaaaagcccgatgaccaagctgcagtatctcgctttacgtacggtgttcagcgccgagatcgcacgtcgtgaagaccgcgatctggcacgcatcatcaagactttggtcgacgatcccattgagcaacgcattcgcgaacggcgcgcccaagagcaggacggcgaggccgttgccgacaatgccccagtcaatacggacggtggcaacgttgccgacaacgccgccaccgagaaatgcaagcccagtgccgccacattgaaggcttcaaagactgccgcaacgggcaagcccacgctcagcacggcgatgcaggctctcgccgtcatcaccggcgcattggccagtggaaccgccgccggcatcatcacctacttgatgttcccggacggcggcccgaacaagcgctgagtcgccgaaatatcgaatccgttactcgcaggccacgccatcgtgatcgcggtccaacttgccgttgtatccaggctgcccttgatacaacggagcagcaccagccgcacggacttcagagcaattcgcataatgcacattttgctgcgcttgctgttgctgttgtgcctgtcgagcggcctcctcagcttgccgctgggcctcggcctgcgcggcagcctgttcttcagcggcctttcttgcagcctcttcttcagctgccttcttggcggctgcctcttcagctgccttcttggcggctgcctcttcagctgctttcttctcctcagctaccttcttcgcttcttcctcctgcgctatatcgctggctttacgaacattgataacaggcttgtccccatcttccacggattggacaacccagttcgaagctctgagcaccattttgtccgtatcgcttttcacctcataatcagaggaggaaaaaccggcatccttgagctcgtctttcacatcggccagcgaacgccctttcttggcgatggcgacaattttcgaatatgtggattcctccttgccgtccgcaccgtcagaagaccccgagcatccagcaagcacaagacccagaaccatcataagaatcacggtcaacgcccaaaccgcacgattgacacgcttcatgttcccgaaacgaaccctgttgttcaacattattctctcccttgtagtcgcagatctgcggatggtcggaaccacgtcaatgtgaatccaaccatcctgataattactgcttattcaatgatatattcatccattgttttcgccgatatatcgcaccagcgtttccctcattatcaactatttcgagttgcatgaatgcgccgtttataggccaagaatttcgtgcttttttgcatcaaattcttcttgggagagaatgccgatatcaaccaattccttcaattttttcatcgcctcgacttgttcttccacagacatggatgccgtgtgagaggcgggagcagcggcttccggtgccggcgcaggcgccggcgcttgaaccggggcggccgtcataggattaatggcttgtgccatattcatgcccagcaacatgccaccatcgccaaagccgttgtcttggatgccttgcgcaatgcgctgctgggcagccatattgccagcttgctgggaaacgccctcgtatgcggcaacattcatcttattcgaggcgaactgctgcacgagttgacgtgattgctcggtgaactcgatactttcgatgcccacactggacacttcaaagccaaaacgatcattccacgtacccgcattggcccgatcgccacgcacgcatgccgcgatgtcattcgtcttgccgggcaattgcgaaatacgatattcattggacaacgaattgatggccacaataaacgactgtacgaattcagacagaatctgcctacgtggcccttcatcatcgaatgaatacgacacggtagtggcaggcacaaagttacgaacgaatcgaactggatcagtgacctttagcgacatggatccgcgtgcgcgaatttccaaatcgacgccatagaaccggtcgttatacaccagcggcgcagaagtgccgaatttgatgccacgaatctcacgcaggttgacgaaggccacatatttggtgcggccaggctggcctccgaaggtgaatcgatcggcaacctgattgaagaacgatccgatgccgtctccggcgagcacactctgctccccgttgcgatattcataaccgcccgactcggtgatgacgttttcgatacctgtttcagagaaaatgaacgccgcagtattctctggcacatagatacgcgaaccattggtgattattccctcggaaccgtattcattcgaaccgcgatcgttgttgcttccgcggggaatgcccggcacaacgacggtgtgttccgtgaacggaccagcggtgatgatatcacgccacaggtccgcgaatgtaccgccgagcgcgccggcgaacgccttaataactgccatctgttttttcctcgatatctcatgcatatggccgatcttgcgactatgcaatcgcaagaccggccgttatgctggcatgttggttatagctgcgtttcgcgatcgcagtattcgcatcgaacgacttctttgcgatgaccggaaagcggagcgccacaaccttcgcaattcaccgaaaccacgggttcggtaataccaagcccactacggaatgcgccaaaagtgtccttcagcgccccggccagagcctccgttccggggatggccttgttgaaggccggctcatccattggcgtatactgtctgccgcgtatacccatataccgtcatcgttcctttcttggaaaaccgttacctcgatacgccagtctgatcactggcccaccgatgcgagcttctgcatgcatcgagtcatgacctcggtgtagtaggccgaatcctcactgctgagggagttttcgtcaatggcgtctaccttctgggagaactcagagtaacgcttcatcatgctggcatagtcggtagccatgctgaccacgttgtcggatttctgatatttgttcatgaaggcaacatactcatcgataaaggcctcgtagctgtccatcgtggccttgaagtcagcactgtcattggtgttctgctgcgccttctgatccgaagactggtcgctctgcttgttggcatcgctggaatcagtgcccgtatcagtgctcttatcatcctgcttcgcggcgtcgccgtccgtagacgtatcttccttcttttccggaacctggatagtgatggacatgatggtctcatcgtcagtgttacgagaaacgctcacactgtatccatcggcgttcttggcattgaaactgtcagcggacttgctatagtccacggtgaaaccgttgtcttgcacggacttgacgtagtcggcatactgcttggcgtcggtaccgcacacctcgatggagaaatagtccgaagactcgcttctaatttcaccctttgtggatttcggctgcggcagcagcgccgcgatatccgactccggccatgaatatgcttcgcacttggtggcgagcgatgcttccaattccgcccgatcagccttggccttcgcatcgtcacgaattacgaacacgccaccgattaccagacccacaacggtgataccgactgccacccaggccagcactcggccttgcaccttgccactcgggcgggtcacgtatacggcgaagcctgagagcagtgccggaatcaccgtggcgaacagcagtccgccccaggatcggccagaaacatccacaaattgggcgagtacgaacaacactccccaaataatggcgaacacagccagcttggaagtcttcttcaccccttgtgcattcggagcaagcacggcaggcgcagcggcaccagcaaaaccagtggcagcaccggcaccatgtgtggcgggtgcaggagccacaccaatacgcttgtccagagcggcgaggaactcatcaacgcgcttggcgctttcgtttccagtcgcctccagacgaatggcggcccctgccgcaccctgcgggactacggttagcgtgcagttcaccccatcataggagtggaaggaaaacgctccggtctgggtgttttcgttatccaaggtaaacgtggcgccagtagtcagctggtcgtgaataacttggaacagctgttgcggactgaccgcatatacacgatcaaatggcgcgccggcgggccgctgcgatgccgtagccggagtcatcggagtggtggtagcaccatcagacgctacgttcggttggccagccggtacagtattcggcacggtaggcgcattcgcgcgatcttccggtgcgtcattcgtgccttcggacggtggaaccggctgaggttgttgatcaaatggcgttgtcatgatgcccttctttccttaagcagcagcattaccagcacagaagaggcaagcccggcaaccgttacggtcaatccgactgccatggcaagccggtatcgttcgctcatcattgcgtcccttcttattgctcgctttgctctgcgatacatcgaaaccagtgtatggcgttgttattatgtacgcaaattagcattttgtatgcatattagctttattgtcgatgcttgataccgcgcatgaacatcctttccgccaccgcacctacacggatggcatcgaccattgtcggcgacacgcgcgggccatacatcagctgacaactgaatttttcggcgtgtttccgaaaagtcggcgtcctgtacgctgggaatcgagcaaccgcgtacgatggcgcagcacagcacccgcaacacagcgacaaggagcatgggcaatggcagacatccccgaagaacatttgaccgaggaactgttggatcggctgctcgccagcgccagcattgagcagtatctcgatgagggactcgtcagcgcacgcacgctgaccgactatctgttcgaccgtatggaagcccatgacctgagacgagccgacgtggtgcgggcatccggcctcaacgccacagtggtttatgacattttctccggcaaaagccgccccggccgagatcacgccattatgctggctcttggtctcaagtgcacattacgtgaaacccaacggctacttcgtcttgcaggcgtttccgaactgtggtgcaaacagcgacgcgacgcgattatcatctggtgtatacgcaatggattcgaccgcatcgccacggacgacgagttgtatcgtatgggagagacgacgttgctaccggccgattgacgacattcggcccaacaacactcaccagtgagacgcaagtaagagggcatcaaggagagacatggacgataagcaggcgatgcatgcgatgagcatcgacgatgcgtaccatgtcgagcgtacgctcgctcgcggaccttccggcgtcaccgaactggtgagcattgacggcaacggcccgttcgtacgcaagaagattccctctcccctagcgcaacgcaatgtgtgggcggcgctcagcgcctgccagagtaatcgtctgccgcgtgtggaagcgacgtacgagctgcccgaccggttcgtcatcgtctacgattacgtgccgggcagcacgcttgcgcaaattgcggaggaaaacgggcggcttgcaccgaatgtggccgtgcagcttatcgaccaaatttgcgaagccgtgcaggagcttcaccagcacggcgttatccaccgcgacatcacgccggccaacgtcatcgtggcccaggatggcgcgcatctcatcgatttcggcatcgcgcgcatccggtcagaggcaagcaaccgttcacgggataccacggcgcttggcacctacggattcgcctcgcctgagcaatatggctttgccaaaaccgacgcgcgttccgacgtattctcgctgggccggctactcggattcatgctgaccggcgtatatcccgatgccagcgactacgagcagcgacttgccgatgatgccgcagtaccggctcgactacgcgccgtcatcggctatgcgtgcgcattcgagcccagcaaacggccacagagcgtccaagagtttcgccaggcgctgttctcccagtccaatccgcccataccgaacgcatcatcggcaaatccgccatcaacgagaacaacgaacggcagcgcgtcggcgtctcgactattccggcgtctgcacttgagcaaacgcgccatcgtgctgtggtccattgccggagcggcactgataatcgccgccattgcgggaggcattgtgttggcaggccaacttggcattatcgggtcggcaacatcacccgattcctcgacacaatccagcagccaatcaaccgataaggccgatggcgggcactcctcgaacgggtcaggaaccgacaatgccaatggcacgggcggagtaggcggcactgacggcgctgatggagacaatcgagacaccgtcaccgacaatcctctgaaaatagtggaatccggctggtcggcggaccagcaagggtatgtccactacgctttcgccctgcgcaacaccagtaagacccagcaggtgcagtatccgcagattaccattacggggcgggccaaagacggttccatcgtgttctcgcagacgcaagcactgaatatggcattcccgaatcagactgtatatgacgccggtcaagcaggcgaaggcaccgccccagaaacggttgattttactgtgctcaatccggatacatacaacgtcgccaaggctcagggaaccgccgccttccccatcagtggaatatccaaaatagacaacagggacggcggcacgacgttcaatggcgaggtccgcgccgtggcagatggattcaagccatctgatggacagcaaatcaagatttccctagtactgcgtaacgcacagaacgcaatcatctatggagatatcgcattcgtggattggccgggcaatggccgatccacgccattctcgattaccgtctacgatctgccgaagtatgtgtcttacgatctgtatgcgcaaatctggtagttgactttacgtctggcaggtggccgtcaggtgcctgtcaggccgctgttcgcgtcacctgcgcactgacgttacggcgcgcctggccgaacagatagatgccgatgggcagggtcagaacaccgccgatgatgaacaccagcgaaatcgggatcacgtcggccagtggcgcgaagatcaacatgccgagcggcattccgagcgtgctcagggtggtgtcaaggccgaatacacggcccaccatcttctcatcggcctcggtctggatgatggtgcgcatcgggcccatgcagatggccgaagccaaaccgttcaccacatcaatcagcaaatacgccagcagattgtgaaccacgccaagaccaacgacggagacgcccaccagagcgatgccgaaggcgaccacgcgcatgttgttgcggatgagcttggcaccgatggtagacatcagcgcgccgccgagcagcataccgatgctccatcccagctcgttggcggcgagtttatcggaggcggtggtcaggttgatgaatccgagattcaaatcgatgccctcatattcgcgggtcatgagcaacagcgtaaggttcatcggcgccacggccacgaagcacaccaaggcgtcaccgagcaccacgttgcgcaggttcgcccggcgccatgtgtagctgaaaccatctttcaagtcagcaaacacacgacggacgctggcaatcagcgaacgatcagcattggcatccgacatcggttcgagtgtgggttgcccgctattctccgcttcagccatacgcctcgcaacatgttccgcgctcttcttcggcgctttgatcaacgccacaaagccgacgccgataatggccgtggtcacatcgactaacagaatcgaccacagcggcactgtgttgataagcacagcagccaccgcaggtgccacaatcatattcaccgaattaatcacgccgtatattgagttgacgcgcaatagtttgcccgagggaacaacatccggtatgaacgactgcacagcgggcgtctgcaccccgcctcccgccgaacgaatgaacagcaccacgaaaatcatggtcagactcgcccatcccatcgcgaagctcagcgacagcacgacggtgaccacagcaatcaccatatccggcagcataatcagcaacttgcgactgtgacggtcggcccaggagccgccgaagatcgagaccacggcctgcggcaccacgccgaacagggtggccagcagcatcgccgaaccggttctggtctgcaatacgatccaccaccagatggcgtactgcacgatgctggagcccaacagcgaaaacgcctgaccgacgagcagcaacgccacacgccggatccacgcacgctcggattccccgttggccactgctgcggcataggcggcaccgggtttgttcgcgctatggaccgctgcgcgcgcattcgcattgtcatcgccggaaacctcgggtgtttcgcgcgcagttggttcagttgttgtactactagaagacatacgagtgttctccattcttcaattccactacaaaggtcacatcacggcatacgcacgccgacgcgcgtatgcgtgcacgactccagcaacgagccgtacccgccgttagatggcaggcttcagtattgtgacgccatgcgttagcgtcaccatgcaacgagaggaacacactattcaatagtatatcatgaagacgtgacgttgcccttgcgcaggtgccgtaagactccgcggacaaagcaatgaggcttcccccgcgagaagggaagcctcatattccattcattctattcagcgatgatggcgcctaatcaccgatcatcctttgggaacagcgcatcgaaggcatgttccatcacggacttacggcggatcacaccgacgagtctgccatcaccatccaccaccggcagtttcttgaactgcttcttggcgaggattcgggccacctctccaacatgctggtcgggagtggcggcaacgaccttgcgcgtggcgatgtccatcaccttcttgccggagagcgcctgcaccttggaggccacggtttcgtcgtcgaacaccaccatcgtcgaaccggtgccggtggaaaccgtacgggattcataggtggcaatcgatttcatgacatcgccgtcgctgacgaagccgacgagcctgccatcgccgttcaccacgggaaggctggagacgttgaggcggatgaactcgcgcaccacatgcgtgatgtcatcgctgtccaggcagctgtagggctgatcgtccatgat

SEQ ID NO: 3947 - DNA, 9001 bp, Unknown
  R22_24m  MAG No. k141_25240
ccgatacaataaaggatttgattaatatgactactcatagagcatttaggtggccgtccctgctgacggaatccggccgcggcatcgcgttcggcggcgactacaacccggaccagtggcccgaggagacgctggacgaggatatccgtctcatgggtgaggtcggcgtgaacgtcgtatcgctggcaattttcagctgggacaagatcgagccggtcgagggcgcgttcacgttcgagtggctcgaccatgtgatcgacaggctcggcagagccggcatcgccgtggacttggcctccgccacagccgccgcgccgctgtggctgtacgaatcccatccagaggtgctgccggtagaccggtatggtcataccgtcaacgcgggctcacgccagtcgtggcagcccacaagcccggtgttcaaggaatacgcgctgcgcctgtgccgcaaacttgccgaacactacaaggacaacccgtatgtgaccgcctggcacatgggcaacgaatacggctggaacaaccgctacgactactccgacaacgccttggccgcgttccgcacgtggtgcgaggccaagtacggtaccatcgacgcgttgaacgaggcgtggggcacggccttctggtcgcagcacgtgaacagtttcgacgaggtgctgctgccacgtcacatgggcggcgacgccatggtcaacccgtcgcagcagttggattacgagcggttcggcaacgacatgctgctcgacttctacaaagccgaacgcgacgccatcgagcagatctgccccgacaagccgttcaccacgaacttcatggtctccaccgaccagtgcgtcatgaactacgccaaatgggcggatgaggtggacttcgtgtccaacgatcactacttccatgagggcgaatcccacctggacgaactcgcctgctcggacgcgctcatggactccctcgcgctgggcaagccgtggtacgtgatggagcactccacctcagccgtgcagtggaagccgctgaacacacgcaaacgggccggcgaactcatgcgcgactccctggcccacgtggccatgggcgccgacgccatctgctttttccaatggcggcaatccaagtcgggcgccgaggcgttccactccgccatgctgccccacgcgggcgccgattccaaggtcttccgcggcgtatgcgagctcggtaaggcgctgaagacactctccgacgccgggctgcagggcactgagctcgagcgtgccggcacggcgatcctgttcagcgcggaatccgaatgggccacacgctccgaaaccctgcccagcatgaaactcaaccactggcacgacgtgcgcgactggtaccgcggcttcctggatgccgggctgcgcgcggacgtggtgccgctcgcctacgactggaccggctacaaaaccatcgtgctgcccaccgtgctcagcctgtccgacgaagacgttctccgtatcgccgacttcgcgaaggccggcggaaccgtcatcgtcggctatgccgccggcctgatcgacgagcacttccacatcggcctcggcggctaccccggcgccggcaacgggctcctacgcgacatgctcggcatccgctccgaagaattcaacatcctcggtgaagaagccgaaggcgagcccagcgaaatcagcctgtccaatggtctgacgacccgcctgtggcagaacgacgtgacttccgtagccgcggacaccacagtgcttgcctcttacgcaggtgagtccgccgccgactgggagctggagcgcacccccgccatcaccagccgcccctatggcaacggtaccgccatctacgtgggctgcgacctcaaccgtcacgacattgcccagttgctcaaagcacttggctcccgatggcaggagttgtcggcgcagccgactgagagtggtcaaactccaacctatcccaccacagatccccgcatcctgcacaccatccgccgatccgcagacggctccacccgcttcgatttctacctcaaccgctcaaaccagcccgtcgccatcaacggtgtggaaggtgatcccatcatcgcccaccgttgcgagactgacgccgttggatatacgctgaaccgcaacgccattcttatcgctaaaacgtcctgctaaaccgcgctagaatggcaatgttgtccggatagaggagtgcggcatgagcgacgagaaaacagccaagcgtcgagtgacgctacgcgatgtcgctcaggccgccggtgtatcgctcaaaactgcgtcgaacgtgatcaatggctccgggcgtatgacagatgagacccgtgccaaggtcgagtcggtcattaaggacctcgactaccgagtcaacgtggccgcccgcaacctcaaccgcgatcacaccggcttcatcaccctcgccgtgccttcgctgattccgccatatctggccgagctcgccaaccgcaccatcgaggccgcccgtcagcgcgactattccgtatacgtcaccacatatgcggaaggctccgcgaaaggcgcgcgcgagctgctgaagaagttcaactccacggtgtccgatggcatgatcctttccatgagcgaggtggaaaacatttcgcccgatgatctgaaggttgattttccgctggtcatcgttggcgcgcgtaccacgtggggcattgtggatcacgtgaccccagacgatgtatccgcagccgccatggccgcaggctacctgtatgaccgcggttccaccagacttgcagtgatcggtgcccgtgacgtttacgacgaagatgcattgctgaatgccgtagaaggcaacgcgcagctgcgtctgcgcggcatcatcgaagagacccgtaggcgtgggctctccttggatccgcagctgattggcaacaccgatcaggattggaccatcggagccggtgcccgtgtgacccagcggctcattgattccggcgtgccattcgacggtgtgattgccttgaacgatcagttggccatcggcgcattgaccgctctgcgcaccgctggttatgaggtgcccgtgcaggtgcaggtcatcggcttcgataacaacgaggaagccccctacctgcagattccgctgaccaccatggattcccgccttgactggacggctcccacggcagtggatcgcatcctcggacgcatcgacggcagcatcaccaagtccgaactgctcaccaccgaatcccaggtcatcgcccgcgcctccacacgctgaacgacattgctgtaatgctggtgttgctgtactgggccgtacgaggcgttgatacaccggttgaccaacacggcataaagcgctaaggtgacgattgcgtggtacacagctgtaccgcgtggcgcgtaaggaaaggaagcgccaagcatcactgggcgttcgttctgagcgttcaccattcaaaggagaaaaagcatgcgccgaaataccgcgcttactcgcattatggcatccggcgtggccgccataatgctctgcgcaggaggcacgttcactgtaaacgccgccgaaggagaaccagttaaagccgacgtctcggtcaaggccatccaaggcttaagcgatgatttcatcggcggtatggacgtctcatccatgctctcgctggaagaaagcggcgtcacgttcaagaacgccaatggcgaggtcgaggatttgttcacgttgctcaaggaatccggcgtgaactatgtgcgtctgcgtgtgtggaacgatccgttcaccgcagacggccaaggatatggcggcggcaacgtcaacgccgatcgcgcactgaccatggccaagcgagccacggcagcagggctgaaagtgctggtcgacttccattactccgatttctgggccgaccccagcaagcagcaggtgcccaaggcgtggaaatcctttgaaggcgacgcggacaaaaccgccgacaccgtatacgattacaccaagcagactctgaccacgttcaaacaagccggcatggacgtcggcatggtgcaggtcggcaacgaaaccactgcgaaaatcgccggcatctccggctgggacggcatgtccaaagtattctccgcaggttccaaagccatacgcgaagtgctccccgaagccaaggtcgtcattcatttcaccaacccggagaaagccggcacctacgccacttacgccaaacagttgagcaaccacaatgtggacaaggtctcactcgtcaaaaagaccgaaactccggtgaagccatccacggagaacctggacaaggctgtggccgaagccgggaaaatcaatcgcgatgagtacaccaacgagtcgctcgccaaactcgatcaggcgcttgccgctgaccagttcacgctcgattacgatttctccgctcccgctgatgtggcgaaggttaccgtaacgctcaagtcgaatccgaatgtcaccgaaacctatacggttgcggttaccgctcgggccgaaggtggttccggcaacggctcggacggtgcgggtaatggcggggctactatcaatcccgatacgggcgagggcgataagaccaacggtgcgaatggcgacaagatcactggtgtgctgagcaataccggtagcgcggtgactgccgtgggtcttgcggttgtcgttctcggcgtggccggcggggtctcgcttgctttgcgtcgtaagcgctcctgatagagactgatgcggcattatgatgcggttgccggcagccggcaaccggctgccagatgccatctgtcggctgtcgtttatcggttgtcggctgtcagatgcgtctgtctcggcgcagcgatgcgattctgtcccggttcgtgcatcaatcgtttgatgtgggtaccaggacagaaatcactgtcctggtttgcgaaaacgggtgtttttcgcgtaccgggacaattcccgttgccccggtttgcacgtcaatcgttctacgtgagaaccgggacagtatgttgatttcgggattggctgtattccgccgattctgtttgtcggggtatgtggactttggggattgtcttgtcctggttctcgaaaatggcccgaaattgcgtaccgggacaacgatttctgccccggtgcaaacgtcaatcgattgacgcctgtaccggggcaaattcgcgcccgggaacaatagggcgagggccggtcgcaggagtagagcgtgatgttgtcatgattgcgcccggctctcccacacggaaggccgggcgcaatcatgccgtttggttgcagcacccgcacatcgcctgcataaccgtgtacagtggcgtgtagttgcagtacatgaaggagcatcacaagccatgaccaacggacacatcaatcccgccaacgtgccggacatcgccttgaaagacggccattccattccgcaggtcggccttggcatgctacgtatcgatgacgagggcgtggcccctgtcgtcgaatctgcgctggaagccggataccgccacatcgatggcgccgccggatacaacaacgaggccggcgtgggtcgtgcgctcgccgcttccggatacaacaccggcgccaagcgcgagaccctgtgggtcaccaccaagctgcgcgactccgagcagggctacgactccgcgctcaaggcattcgacaactccctgaaactcctccagctcgattacgtggacatgtacatgatccattggcccacgccgttcgactggcgcagcaccgacacctggaaggcgttcgtcaagctgcgcgacgaaggcatggcacgcacgctcggcgtatgcaacttcatgcccgccgatctgaagcgtctgcacggggagaccggcgcatggccggccgtcaatcagattgagctgcaccccacgtggcagcagcgcgaagtggtggcgttctgcaagaagcacggcatcgccgtggaggcctactcgccgatggcgcgtggcgccgacctcaacgccggcgacggcaccatcgagaagatcgccgccgcccatgaggtcagcccggcccaggtgattctgcgctggcacatcgaaaacggcacgatcatcatccccaagtccgtgcatgccgaccgtcagagggagaatctcgacctgttcggcttcgccctgaccgccgatgaacacgctgccatcgacgccctcgacggccccacccgcgccggccacgaccccctcaccttcacctatgcgtgattgatggcacgtcgtaacgcccacttccgccgtcgtttcaacgcctctggaccgctggagcgcgtgctgattctcatcgttctcgccgtagcaatcggcgtgaccatcggcctgttactgccgcaggtcagctccgacgtggccaaaatcaccggtggctacactgccaccggttcagccgccgacactttgaacgcgctcgccgtagacgacaaccaaagctcctccggctacgaccgcgattccttcggtttccgcaccaccgacgtcgacggcaatggctgcgacgtacgcgacgacgtgctcgcccgcgatctcacggacatcacctacaaatacgccggttcctgtgtggtcgagtccggcacactggccgatccgtacaccgcccagaccatccatttcgtacgtggccgcgccaccagcgccaaagtgcagatcgaccatgtggtggcccttgaaaacgcttggcaatccggtgcgcacgactggtccactgccaaacgccatgaattcggcaatgacccctataacctgctggccgtcgacggtccggccaatcaggagaagggttcggcttccgccgcctactggctacccaccaacgccgactaccgttgcgactacgtggcccgccagattggcgtcaaagacaagtaccagctcaccgtcacctcccaagaaaaggacgccatgctcgccgtcctccatacctgcccgggccaggccgtgcccgcagacgaataggggctaccgctcaggattgttgagcataggtgcctgcccctcgtcataagcgcgcaggagccgtcggagcaaaaatgtggtgaagtatggtgcggtgaacacgtgttcgctgctaccgatattgccggcggatagtttcacgccgaactgaatttccggataagaatccgaagcgattagcgtccgcatggatttggcggtgccttttttcgatttcacctccaccggcaccagccattcgcgcgtgcggacgaagaaatcctgttccagtgtggaatcctcttttttgtagtagtacaggtcatagccggatttccgtagcgcttcagagacgatgctctcgtacatagcacccttatagacaccaagattacgattggcccgcagatcatcactggcctcgtcgtcaagcatcgctacgaacagaccggtatcgccgaaatatatcttgaacttgttttcgtcataattgcctttcaacggcagttcaggataggacatacatcggcagatattcaccattcccgaggtttcaagccattccacgcatcctcgatagtctttgaaacgcgctccgctggcaaccttgctgatttggaacttcttgttttccttggcgagttgcacgggaatatggttgaacacgttgagaattcgtgcctgatcgagtccttgcgcgtatttgcggatatcctcctggtagtccaaaataagctggcgctgcaattgcagtgttccctcgaacgtgccagtgcgtatatgggaggcgacaaccgcaggcatgccgccaagcacgcagtaatccataaatgccgtggagaagacgttcatttccacttcagagaatggcgtagcatcacacaggtgggtgaacatgctttcgatgacggcctcatcgtatccgcgagcccacagaaattcttcgaagtccaacgatcgcatttcgtagtcggtcttatatcccacgctattgctttcgatttgcttatagctgatgcccaacattgaaccgctgcaaatcacatcatatttgccgtcgattttaaagaacttcagtgcagtggcgatatcaggatgggcctggatttcgtcgaaaaagatgagcgtatcgcccggaatgaactttttggctgggtcgatcagggaaatattgcggacgatggtattcgcgccataaccgtccgcagtgattgcacgatatttcggttcctcaacgaagttgatttccactaccgaacggtagttgtgtgcggcaaagtaatcgatagtctctgtcttgcctacttgacgagggcccttgatgattagcggggagcgattcgggtcggatttccatgcattgagataggcatcggctttgcgtttgagatacatgaggagcccctttccgaattactgctatatcaatgattttacactttcatgagcgagttttctaccgtctggcacatttcatgagcgagttttctagtaattacctcatttcatgagcgagttttctaccgtctggcacatttcatgagcgagatggcgggaaataccagctgccagtccgccggtcatccatcaatcgtccgcagattgtccgtctgttgactcgggaaacatgcctgcgctataactgtgcgcggtatgaagggaacaggtacaaacaatatggcagtaacacacaccgaagcagatgccactgcggcaaccgctatgacgaacgctgtggcagacatcgaacaggaaacaccggaaatcggaaaggaacgccagcttgccggagtcggaaccggggccggagcagggacgaacaacaataagaagccgcatgaccatgcgctggccagcatccttggccccgcgttcgtggcggccgtggcctacgtcgatcctggtaatgtggcggccaacatcacgtccggcgcacgatacggctacctgttggtgtgggtgctggtgctcgccaacgccatgagcgtgctcatccagtatcagtccgccaaactcggcatcgtgaccaacaaatccctgccggaactgctgggcgagcgtatgagcga

SEQ ID NO: 3948 - DNA, 4882 bp, Unknown
  R22_24m  MAG No. k141_25423
cacccgccacctcagtgccaaatgcactcctattccgtaatcgtcagcagcccgtcttgttcttcgacgcacaaaaacgtaggccgttcctggccggggtcgttgggcgagtggaccgcgtaacgcagcacgccatcgagaccgttgaacagcatgccgtggccgccgtggctaagcagaggctcggggcattgcgtccaaggcccagcaatcgaccctgattcgctgatggcctggccgactgcatatccgccttccgtcgaccagctcgaccacagcatcgccagccgtccgttggaaagcctgcacaggcagggaccatcggagaagtaggcgtcctcgtcgatgccgaattccgctttcgcgaacggcaccggcaccgcccacggcgcatccgaggcctggaacaatgtcatgctctcccccaccgtccgagtcaggtcggaggacagacgtacggcatccatgtctccggcgggcacatcctccaaggaatgcgagtagacaagccacatatcggtaccttcaccatgcagagttccgtcaatgcaggactgattcggatcggtcagccggcagacatattcgaacggatcaagcggactatcagcgcgtagcatgtgcacgcttttgcgcccgtccggctcgccgagcgtggcaatcaggtggaatacaccgtctcgctcgtagcattcgggcgcccagtaagcacggtcggccgtgaattcatccggcttgtggaacacctcgaacggaccctcccaattgtcaaggtcgcggctggtgtagcaatcaaaaccatccatcgcgccccacacgttatcagcgcgggtgccatacaggtaatagacaccgtcgtgaggcaggacgaacggatcgcgcaggtggatgtcagttcgtttcattggtcaggtcccctttcatgagacagtcgtcatcagtcacttcgcgctttcgaggcacttcttttggaatccgctcacaccgagagccaccgctccggccagagcaatcgcggcaccgatgaacatcgcgccggccgcgtgcgaaccaaacagtccgttaatcgcgttgacgagcacagggctggcaaatccgcccagtgcgttggccgtggtcatggcagcaatgcccagcgggatgaggtagggcttttcgatgacggtgacgaggaatggcgcctgcgcatagtagatgctcaggccggctccggcaaagaaactgccgatgatgagcagtggcaggctggccgagcagccaagcagcagcaaagacaggccctcgacaatgaagccgaccatcagcaaatggttcttcacgaatcggaccataagaccgacgcacaaaccagccagcagtccgccgaactgtccgatggtggaaatcagtccagcggttccggcatcgcccaagccgcgctgctcgaccaacagggacaagttgttgctgtaggcattgttcgccagaaggaagaagaagccggcaacaaccaagaaccacagtttgccggtcataacctcgcgaatcgacgcggaaggccccgttccctgaatccggccggcttcgtccgtctcaccattcttggtgggcagcgtgaatgcgcagaccaccagcaccacggcggcgaacaagtagatgaggtaggcgtgataccactgtgcggtggcgagtttgccggccacggtcatgaacaccatcgcaccgatgctggccacggcaacctgctgacccataatcgactgtcgctcatcgccctcgtagtgcacggagatcaaagtaggcagcacgttgttgataaagcctaggcatacgcccatcaacgcggaaaacgcgatgactgcagccagactggaatgcacgaagtacggcagcagaccgaacagcagcatgccgcctgcaccaatcagtgccacggtcttccgggatagaatgctggcgagtttgccggtcagccaagcgccaaccagtgcggtcagagtgatgccgaaacaatcatctgcacgctggagagcgagctgtccgggaatgcctgagcaaccaatccgatgaccggcacaatgaaaatgcccgatagcgtaatggaactcggcgataggatgcccaccttggttttcatattactcatcgtcaattctcctcgataacgactttgttattgacattgcagtgctgttgttatcaacgatacgagagtaaaactcggcaatattgacatgattatgctctataatgacctttatcgatggcgcacctacagcagcatctacagcaaaaggagtgacggccatggagcgcgatgctttccggctgccgggcctcaccgccggcgatgacaaccagtatgccgatcacacgctcaccggcatggcagccgatgcggcgaacgtcatagccgcaggcggtcccgccccgctgactagcttcggcactgtcgctcaagccgcccatctcaatccagatgacggcttcggcatcattggccatgatcttgcacacccatcgcacctacaccggcatgactatatggaaatcacgcacgccatcgccggtacggtactggtctgggtcgaaggagagaccaacgtgctgacacagggcggcaccatactcatcaagcctggagcccgtcatctcatctcccccatcatcgaatacgggcaaacaccacacgaggcggacatcctgattaaacccgagctcatcaggcaatgccgcattccgattctggaagcagccggcgccgaccggatgttcattagctggcttgacgatgaccggcagacccactgcctgctggcagccggcaagcaccacgccggcgaggccgctatcagccgcatgttcatcgcctactgcatcaacgcaacctacaggccagacttcaccgtcatcggcaacctgctcgagctgttccacgaaacgtcccgagtcttggaacaccagccacgtaccgatccgctgatcgccgccatcatcgaaaccatcacggcagatcccgccacggcccacaaccaggccatagcggacacacttggatacagcgtgggatatctgtcccggtacgcgcgcaagcacagcgggcacacactcggccaactcatcaacgaggaaaggctccgactcggcgccgaactgctcgtcaccaccgacgacaccattgccgaaatcacccgaaccattggctacgaaagtccagcctatttccataaactcttccgcagccgctacctcattacccccgaccgctaccgcaacgacttccgtatcgcattacgttgcggatgacaagcgccgcttttcccccgcaacgtaccggaatccgagatctcgcgagctggatgacgccgtttgcatagcgctatactcactttttccacgcaccacaccagcacacccgccacgcaagcgacaagtgtatatcggacgaatagcatggcgaatcccgccactatcatcatcacaacaaaaacgaacacatcggcatgatcgcatttgccacggtgcaggtataggtagctcaccacaatcatcgggacccgcccagccccgccacaaccagaaaaccgcccttggcgacgttgcctcaggcggttttccagcggaaggagagaaaggagaaagaaggaatggaaaggtgccatgcgggcataacacaacaccgcacatggcgaaactatcgaatcagcccatcgggcgcactggcatcataattgatgtgtacacgcccgatggagcgaattcaatcggtcagaccgatggtcactcgacctcagccagggcatcaatgatgtagttgttgatggtggccttgacggactcgaggtgatcggacttggtggcggcgatgagctcggactgcggcttgtcgaggctgtaggcttcgaggtcggccaaggtgacgttgccctcgtcgatgtccttgccgatgccggagtcgtaggagctgtagcgctcggcctgaagattctggatgaagccgtcctggttcatcttgtcggcaaccagcaggccggcggcgtaggcatccatgccggcgatgtgggagcggaacaggtcctcctcgtagaaggaggtacggcgcggcttggcgtcgaagttcagaccaccgtgaggtccgatggagccggcctgcaggacttcccacatgacggcgacggtctcgtacagatcggtcgggaactcgtccatatcccagccgatgagcttgtcgccctggttggcgtcgagggaaccgaggaagccggactcgcgggccacgcggatctcgtgctggtaggtgtggccggccaggttggcgtggttgccttccaagttcagcttgaagacgtcggtcaggtcgtggttgcgcaggaactcgatggcggtggcggcatcgaagtcgtactggtgcagcgtcggctccttcggcttcggctcgatcaggaactgggcctcaaagccgatttccttggcgtaatctgcgcacatgtggaagaacttggcgatgtggtcggtctcgcgcttcatctcggtgttccacaggttctcgtagccttcgcggccaccccagaacacgtagttctcggcgcccaggcgcttgccgatctccaagctcttcttgagctggccaccggcgtaggcgtagatgtcggcgaacggagaagtggcggcgccggacacgaagcgcgggttggtgaacagggaggaggtgttccacagcagcttgacaccggtggacttcatattctcgtcgatcttgtcaacgaccttgtcgaggttggcgttggtctcgcgcagggtgtcgccttcgggggcgatgtcacgatcgtggaagcagaagtactcgacgcccagcttctggaacagctcgaaggcgtagtcgaccttggccagagcctggtcc

SEQ ID NO: 3949 - DNA, 6276 bp, Unknown
  R22_24m  MAG No. k141_25455
atggtggggcggttgatgcgctgctggttgaccacggtgccattggtggagttcaggtcttcaatggcccactgcccggagcgcgtgtcacggtagacacgggcatggtgggaagacacgaattcgtcatcgagcaccacggtgttcgaggcggcgcggccaagcgtgatgtcggcttcggccagcggcacggagctgccggcaagcggaccatcgatgatgaccaacagggtaggctgcgccgaggcggcggacgacgcggaagcgctgggctggcgatgcgggcgcggcgcagctgcctgcggcgtttcggccttggccttatgcacttcacgctcacggcgacgacgcgcgcgcgaaggtcgcggactgaacgtctcgatgtccttgcgcagcgaacgtacggccagccagatgaatatccacagcaggatcaggaatccatacttgagcagggcgaatgtcagttcggtcataagtggacgactttcgggcgtgtgctcgactactcctgggcttgggcggaggcccagtacaggatgcgggtacggccgatggtgatggtgttgccgtcgagcagcgtggcggcgggcacttggtggccctccacgtacgtgccgttggtcgaacccaggtcgcgggcgatcacgccgttatccgtgatgtcgatttccaggtgcttgcgggagatgcccggatcgtcgatgacgatatcgcagccggaaccgcggccgattaccgtcttgtctttggtgagcaggtactggttgccgttcacctcgagcaccgggctgtcctcggtctgcgcatcggtggtgaccggcacggcattgccctgcacggattcggaggtgaggttgaagttgcccttggacaggtcaaggtcttcctcgaagatcacgatcaccgggcccacgaaggcgtaatgctggctcttcgcgtactcggtgaggttatcggccagttcgttggccagggtctcgctaccccatgcctcgatacggtcgaagtcaggagtactgagcttgaaacggtattcattcggggccaccgtgcggtcacggcccacgggcatggcctcggcgtcaatctcgcgctccaaggcgctggaaagatcgacaggctgcaggtctttggagccaaacttggcgaatactccgttgactgcaccctccacgcttttttcaaaacggtcgagaacgctcatagtcctccctttctaatcctcacccatcctacgcggtgatgggaatatgaggcaaaaaaccggtctttcacatgacgatgggtgcaaaatatccaaaaatatccaaaaattcagggcggaaatgggtgcgacgcaccacctgcgccgtttttccgcatgccgtgtgggcgcgggccccgggcgtgccgcggacgtcacggcccacggcgcgcccggggccggtcaggccagggcgtcgcgcaggaagtcgcgctggagggtgagcaggttttcggctacggtctcgtcgttggtcatatgggtgatgcccgtcaacggcaggaaggtgtgcgggcgacccgccgccatcagggcttgcgagaggcgcaggctatgggcgatggtgacgttgtcgtcggcgaaaccgtggatcagcataagcgggcgctcgagtttcggtgcgtcctgcacgatgccgttgcggtagtagacatccgggtcgaggcccagatagcgctcggtgtaatgcgtgtcgtacagcgtccagtcggtgggcggggcgccggcgcacgcggccttgaacacgttcggcgcgtccagcacggccagtgcggacaggaagccgccgtacgaccagccgatcatacacaccttgtcgaggtccggtgcgggaacgccgggcctgcgcccatcggcgttgagcctggagacggcctcgggaagggcgttgacggcttcgatctgatcggccagcgtcacgcccttcatgttctcgaagattgcgcgatcccaggccgggccgcggcctgtggtgccacggccgtccgccgtgaccaccaggaagccctggtcggcccaccactggccctcccagtagaaggactgggaggcgacgacctgctggaagccgggcccgccgtacggcttcatcagcaccggcagtttgtcggcatgggcgtacgggctggacgggctcggcgcgatgatcgccgtgtacaaccggtgctcgcccagccgcgtgaacgtgacgttcggcgtgaacccgggttccgcggcggtgctggtgatgtcggcggcggtgatgtcggtggtgttggcggcatcgctggtgttggcggcgatgacggcatcggtgacgccgccgacggcgcgtcgcgtgacgatgtgccgcatccgggcgcgggcggaacgcatatcgcgcccagacaccaccatgccgcgtgcgccgcgtgaggccgtccactgaccgggctcggtcgtgatcggcgcgaccgagccgtcatatcccatgctcaccacatcgaagctgcgggcgtcatggccgccgaacagagactcggcatccgaagcggcacccgagccggcccaggcgcgcggcacctcggtcgcgatttcgggcgcacgctgcaccacggccagcacatcctcgtcggtcacgtcgagcaccgtgcgcacgttccagccagccggcgtgaacggtcggccgtccaccgtcagacggttggtatccgtggccatatcgttgagcgagcacaccagacgatcatccggcgtgtaggcgggcgtgccgtgaaccaagtcgatccactgctcgttcgcgtgctcctcaagcacacgcgtggcgcccagcgcggccccatccgccgcgaccgccacctcgagcacctggtcgcgggtctggcggcggttctgcaccagcaccagcggatcgtggccgcgacgccagctcacggcggccacatactcgtacgcctcgcgatcccaatccacatcggcgttgccggtgatgcccgcgtaccggtcgttctcatcgaacgccagcgtgatcacggtcaggtacacgtcggcgttgcgggtcagcgcgcgcgggtagcggcggccggcggccggcttctcgggatcggccggatcgctgatgtaccaggtcggctcgtcggcggtgtcgaaggattcgaacagcacatgctgcgaatccggggcccaccagaaaccgtcgtaacggtccatctcctcgccggccacgaactcggccagaccgattttccacgtgttttcggccggattgccgtcctcatcctccacgctcacgccgtagaccgcggtgatgcggtcacccagctcgccgccgatatcgaccagcatcaggtagctgcccgtggtgtacagcacatgctcgccatccggggcgatgcgcgggttcagcaccggcgtgtacatctccgggtcctcatcgagccattcgccggccagttcgcgggtgtgcggctcgggtgcgccggtctcgtcattccaggcgatctcggtcaggaacaggcggccgttgatggtgaacacgatgcgattgccgtcatcgtctgcggaatagccgacgatgccggtgccgccctcgcgcgcacgctcgcggcgggccttctcctcggccggcacgtcctcgctgtcggcggttgcgccaagcagttcgcgcggatcggccagcttggtctcatggtgttcgccggactcgtcgaaccagcttagccacagtgcggtcaccagatcctcggggccgtcggagcgcaggaacagggcccgcgagccgtcgcccacggtctgtgcggagcgcggcgcgccgcagccgaagcgcagcgtgcgcgccctgaggcgtgggaaatgcttgattgcgtcattgacatcattggtttcgctcatacctcacaacctacgcgcctgtgcggtcagcggcgtgaggcttgtcctaagatgggaaccatgcaggtgacgatgatcgacgagaacaagtacgccgaaacgatggccgacgtggtgctgcccgcgctcgagcaatgccgcgaggagggctggttcgatccgtccgccgccgaacgttcggccggggtcgagccgctgtccggcattatggacaccggcggccgcgcgggccagctgcactacctgtgctacgactccgccaaattcgacgcgatccgcgaacaaggcgccaccgccgtcttccgcggggccatcgtcatcagccacggcttcaccgagttcgccgagaagtacgacgaactggtctggtacttcctgctcgccggctattcggtgtgcgtgctcgaacatcgcggccacggcaagtccgcgcgcgacgtggacgatcattgcatggtgtggattgatgactggcagcgctacgtggccgatctggccggcttcgccgaaaccatcggccagcagtacgcagccggcatgccgctgaacctgttctgccattcgatgggcggcggcattggcgcggccgtgttggagcgataccccaccctgttcgacaaagcggtgctctccgccccgatgatcgcccccgccaccggcatgccgctgggcgtggcccgtgtgctggtcggcgcgctgtgcggactcggcttcggcaagaagcgtgtgttcgggcagtcggacttcacgccggagttctcgatggaaggcaacgagggcgcttccgaggcgcgtgaacgctggtacttcaagctgcgttgcgagaatagcgaataccagacctactgcgcggcgttcgaatgggtgcgccaggcgttgaagctcaaccgggccatactgaatccgtccgcctgcgccgaagtggagacgccggtgctgctcttccagtccggacgcgacatctgggtactcaataagccgcagaatcacttcgtccaactggtcaaggacggcggcggcgaggcgaacatcgtgcgcttccccgaatcgcgccacgaaatcttctccatgcccaacagcacttacaagccctacctcgaaaagatcctcggcttctacgacgaccccatgattgcctgcgccgcgtactgatgtagctcttcacccattgttcaccgtgcggtcaccttgtggcccggcccgctttagatggcgggagagccatggaattatgggcataatgtcttctctccgccgccgcggttgcggccgcggtatgtgccggcgtgctcgcgttgaccggttgcacggcgttcaataattccgatgacggcacagcggacggcaacggcacgtccgccaccacgcagaccttccagccgtccggcggcaaaccgactgccaccctgagcattgcctccggctccgaaaacaaggaagtcgccgtcgccatccagaaagcggccgaccaatccaacgtagccgtgacgatgcactacatgggttcgctggagattatgaacgcgctcaaggccggcggccaggatcacgacgccgtctggcctgcctcctcgatgtggatttcgatgggagacaccaagcacatcgtcaaagacgcggccagcacctccaccacgccgatcgtgttcggcatcgccaaatccaaggccgtcaaactcggctgggctgacgacaccggcgccaccaagcccgtctccaccgcggacatcctcgccgcggtcagcgacggcaaactcacgttctccatgacctccgccacggtgatcgacagcgcgctcaacgtctaccagaccgcgctcaggaaacccagctggaccatttgggtggtcgattactccggttcgatgtctggagagggcaagaacggcgtggtcaaaggcctgaacgcggcgctcgacccggaccaggccaagaagtcgtacatcgagcccgccagcggcgacgtgaacattctcatcccgtttgaaaccgaggcccaccgcccggtcaaggccactggcacaagcaccagcgacctgctgcatgaggccgatgccaccgatgccagcggcggcaccgatatctatgaaggcctgctgagcgcgctcgacgagctgcccagcgagtcggaagcctcgcaatacaccaccgccatcgtgctcatgaccgacggccgctccaactccgatcatcaggacgaattcgaaagcgcctataagtcgcgcggccgtgatctgccgatcttctccatcatgttcggcgggttaagggtcaaaatgtgtgtctggctcggcgtgtcgcgggggttagatttggcctttttgaatgccgattgagtgggtgtagtcggtgtcgatagcgttgtcgtagagggctgggcgtcctgtttcgtggtcggcttg

SEQ ID NO: 3950 - DNA, 6571 bp, Unknown
  R22_24m  MAG No. k141_25564
cccaagggcttgacgaggttgtgccagatcagcacggccgccgtgccggacagcatgccggccacggcgccggccttgttggcgcgacgccagtatagcgagcacagcatcaacgggccgaatgaggcgccaagcccggcccacgcgtaggacaccacctggaagatcgacgagttctggtcgtatgccaccagaataccgaacaggaacatgaccaccagcgtgaccctggccacgatcatgacctgcttgtcggtggccttgcggtgcagcagcccgcggaagatgttctcgcccatggccgaagcgccgatgatcagatacgaggagctggagctcatcgaggccgcgaaaatgccggagaccaccacgccgcacatgaagctcggcagcagggtctgcgccagcacgatgaagatggtttccgcatcggtggaggtcagcagttcggtgggcatcatcgcacgccccaccaagccgatgcacaccgcgcaacccagcgaaatcacgcaccaggaggtggcgatgattcgggacttgcgcacttcttccacgctgcggatggacaggaagcgcaccagcacctgcggcataccgaagtaacccaggccccacgccagcatggagatgatggtgatgatgccgtagtcggagggcgcgccgaacacggccttgcccgcctcgacgagctgctggccggtggccgggtccagcttgggcgcggccacctgcgtgccggacaggtagccggggatggcacgcaggaattccacggtgttgtcgatgccgcccgcgctggccacggtgccgatgaacaccaccgcgagcgcgaagaacatgagcatgccttgaatgaagtcggtcatcaccacggacaagtagccgcccaccacggtgtagacgaacacgaccaccgcgccgatgatcatcatgacgtggtagtcgaaaccgaacaacgtggcgaacagcttgcccacggtcacgaagcagctgcccacgtacacgctgaagaacaccaggatgatcacggccgcgatggtggagaccacgcccttcttgtcatggaaacgcttggcgaagaagtcaggaatggtgatggcatcgccggccactaccgagtagcggcgcagtcgccgggccacaagcttccagttgagataggtgccgagcgccaggccgatggcggtccacatcgggtcggccgcgccggtgaagtaggccaggcccggcaggcccatcagcagccagccgctcatgtcggaggcttcggcgctcagggccgtgagccacggccccacgccgcgcccgcccgcaaagtattccttggaagaggagttggagcgtttggagtagatgaatccgatggacagcatggccgcaaaatagatgaccatggccagcagaatccagaaatcgttggccaactgcggcacctccccaatcatgacgccaagcggctaccgccatggcagaactatgtgctgatatgcgtgctgatatgcgattgacgccggagcggcgtcatacagaccgtcacagccgtgaatacggccgcaacgcacttcgcctgatggtagtggatacaagggctcaagcaccttccaccgtttccatactgagacgctgttttatccgagctcccctcacctgaggggagccaagatgacggtcagatgtcgtagcgccaggacttgtcggtcaccacgcgggccatcgccaagccgatcggcagacagataatcaccatgaacgcacggaacgcccagtccagcgcattcatggtctggaagctgccgaggtaccacatggcacggtacatatacagaccgggcaccatgatcacgatcgacggcacggtcaggcagatgcgcgggtagccgaggtgcggcggtagccagccacgtcgcacggatgaacgccacgccgatgccagaatgcccgccaggaacgcgccgatgaaggtagccatctcaggagccatgccgaagtcctgcaattccagacgcagcgtgtccgtgatcgcaccgatcagggcggcggccaggcacatgcgctgcggcgaattgaacagcacggagaagccccacacgccgacgaacgccgccacgaaccgcagcaatccgttgacccacgggttaagccccagcggttcaaagccttccgggtgcaggtgcaccatcacggccacggcccagcctgccagcgtggccatcaggatgatgcacagcacgtacgccacgcgctggatgcccgaggggaagtcgattttcgccatgtcgagtccgccggtgatgagcgggaaaccggggatcacgaacagcatggcgccaatgtaggccgtatcgtgcgagagcgcgactgggtcgaaaatgccgatgagtcgcagggtgccggtgcaggcgagcgccgccgcggccacgcacacaaaggtgacgaagaactggttcagatggtatgcaaacagccggcgacgcatccactggccaaggcccgcgcccacgaacgcaccgatcatgtcgtatgggccgccgccgagcaggaacacgaaggccgcgcaggccagggcggaggccagaccggagaaccacggcttgtacagcggcttgcgacgctcaatcagatcgagccgctcgtgcgcctgccgcacggtgataccgcccttggccttctcttcgtcggagcgctcgttgaagtgttcggcgtattccttgggtacgcgattcttgcgcttcgtactgcttgcagcagggctttcggcggttgcgccgttcgccgcgttcgccgattcaaccgactcattggagtcaccggtaaacacttcggcatcgtcgtaggccttctcttcggccgctttgtcttcgaccggagtgacttccgcgctgtccgccaaaagtcggtgggcttcttcattgtcatcatccaaggacttggccacggaggtcacgagtaccttggttttcaacgcaagatccagcgcctcgtccacgctgccgttggccgcctcagcctcggccttggcacgttcgcgcaggcgcttggccagatcagcagaatactgcgaagcgtcacgttcgtccaaatgcttgaccacgccatcggacagttgcgaatcgacgtgatacatcgaccccttgccgagattcacggagaaccagtcggcgaaatgttccagcagccagatacgttcggtgttcacgccggtggtcggcaaatccacgacttcggtgatgcggttacgaccatccgtgcaggtggcctcgatatccgtcaggttcacgtcggcgcgtacgtgcacgcccagcgggtaggcgatgcggtgcatcatttcacgcacgcggaaggagccggtgccggctcccaagtccagcatgccgacccgtacaatcacgctggctttggcggcgataccggcgtccaccaccggtttttcccaatcgcgtgcaatatcttccatgtccagcggaatggagtgggtgtggaatttacgtacagccgttgcgcctttcgcttcgggcgcactttttttcttctgttcgctcacatccctcattactactccctgcctcccccgccggcaatcgtaaggcgctcaaatcttccgcgaatcggacagtgtctcatatgctgtccgatattcggtctctataggtggacaacttggcgcactatatggactccgtaacgcaaatagcgatttcgcggggatacactattgcccacacaacaaccacgttgaatatgggctgtgggctcgcaacgactggcctcaacaactgcggaggagccgcagacgaccggtagaccgagcaacctgttattcggcaaaggaggttatatggcaacacctgaagaacagatcactcccgctgacgccgccatcgtcactaccgggaccggccgaaagggcccggaggagcatgatcttcccgaaagcctgaagtacgacatggatctgtgtcttgagatcctgcgtaacgtactgggcgaatacaaccccgaactgctgtctacgttcgacaccgtgcgtcattacgcggtggaggccagcgccgagcatttcgccgagctgaaggatccgaaccccgaccaggatggcctgaaggaggccgtgaacgtcatcgacaacatgacgctgcacgacgcccagctgctggcccgcgcgttcgccacgtatttccatctggcaaacctgtccgaggagaactaccgcgtttccgtgctccacgagcgcgagaacaacgtgcccgttgaccaggcggtcgatccgatcaacgagctcaccgtcgcctaccaccagctcatcaatgagactggcccggccaaggccaaggaactgctcaaccagctcgaattccaccccgtcttcacggcgcaccccactgaggcccgtcgtaaggccgtggaaggcaagatccgccgcgtttccgaattgcttgaggagtacaagcgcctcggcggctcggataagaaggaatgcctgcgccgtctctacaacgagatcgacgccctgttccgcacctctccgatcgcgctgaagaagccgaccccggttgaggaagcggacacgattctcgacatcttcgacaacacgctgttcaacaccatccccaaggtctaccgtcgcttcgatgactgggtcctgggcgataaggccggtctcgtcgagcccgcttgccccgcgttcttccacccgggcagctggatcggctccgaccgcgacggtaacccgaacgtcaccgccaaggtgagccgcgccgtggcccgcaagttctccgatcacgtaatcgccgcccttgaggaagccacccgcaccgtgggccgcaacctcacgatggaagccgagaccacgccgccgagcgccgagctcaagagcctctggagccaccagaaggaaatgagcgagcgtctgaccgacaaggccgccctgatctccaccaaggagatgcaccgcgcggtcatgctggtgatggccgaccgtctgcactacaccatcgagcgcgacgccgacctcatgtaccactcctgcgacgacttcctcgccgacctcaaggtggtccagcgttcgctggccgccgccggcgccaagcgttccgcttacggcccgctgcaggatctgatctggcagaccgagaccttcggcttccacatggtggagatggagttccgtcagcactccgtggtgcatgcccgcgcccttgcggatatccgcgagcacggtctgcacggcgagcgcggcgaactgcagccgatgacgcacgaggtgctcgacaccttccgcgctctcggtgccatccagaagcgcaacggcctcaaggccgcccgccgctacatcatctccttcaccaagagcgcccagaacatcaaggatgtctacgagctcaaccgcttggccttctcccacccggaggacgtgcccaccatcgacgtgatcccgctgttcgagcagcttgaggatctgcagaactcggtggacgtgctcgaggaaatgatcaagatccccgaggttcaggctcgtctgaaggccaccggcaacaagctcgaggtcatgctcggttactccgactcctcgaaggacgccggcccgacctccgccacgctggccctgcactccgctcaggagcgcatcgccaaatgggctgagtcgcacgacatcgacctgaccctgttccatggccgcggcggtgccgtcggtcgtggtggcggccccgccaaccgcgcggtgctcgcccagccggtcggttccgtcaagtgccgcttcaagctcaccgagcagggcgaggtcatcttcgcccgttacggcaacccggtgctggccatccgccacgtcgaatccgtggctgcggcgaccttgctgcagtccgcgccgagtgtggagaagcgcaacaccgagatgaccgagaagtatgccgacatggccgctcagctcgacgaggccgcgcacaaccgcttcctcgacctgttgaacaccgacggctttgccccgtggttctcgatcgttacgccgctgaccgaaatcggcctgctgccgatcggctcccgcccggccaagcgtggcctcggcgccaagtcgctcgacgacctgcgcacgattccgtggatcttctcctgggcccaggcccgcatcaacctggccgcttggtacggtctcggcactgcatgcgagaagttcggcgatctggagaccatgcgtcaggcttacgaggaatggccgctgttctccaccttcatcgacaacatcgagatgtccatcgccaagacggacgagcgcatcgccaagatgtacctcgccctcggcgaccgcgaggacctcaatgagaaggtgctcaacgagatggagctcacccgcaagtgggttctggccatcgtgggcgacaagtggccgttgcagcaccgccacgtgctcggccaggccatccgcatccgctccccatacgtggacgcgctgtccgtcacccaggtgctggcgctcaagtcgctgcgcaagaaggtggacaaggaagagctctcgcaaagccaacaggcaggattcatctacctcatcctgtgcaccgtctccggcgtcgccgcgggc

SEQ ID NO: 3951 - DNA, 32920 bp, Unknown
  R22_24m  MAG No. k141_26243
ccgccggccagcttggccagacgctcctgcagcttctcacggtcgtaatcggagtcggtgttctcgatctcagcgcggatctgggccacgcgagcgtcgatgtcttccttggagccagcgccctgaacgatggtggtctcgtccttggagacgatgaccttcttggcgtggccgagcacggaggtgtcgacggactcgagcttcaggcccagttcgtcggagacaacctgagcaccggtcaggatggccatatcctgcagcatggccttgcgacggtcgccaaagcccggggccttgacggcgcaggacttgaaggtgccacggatgttgttcaggatcagggtcggcagtgcttcgccgtcgacgtcctcagcgatgatcagcagcggcttgccggtcttcatgaccagctcggccacgtgcacgatgtcctgctgggaggagaccttgccggaggtcagcagaatgtacggatcttcgagcactgcggtctggtcgtcagcgttggtgacgaagtacggggcgatgtagcccttgtcgaaacgcatgccctcggtgaagtcgaggtccaggccgaagcggttgttgtcttcaacggtcacaacgccgtcctggccgaccttgtccagagcctcagcgatcttctcgccgacctcagggtcggcggcggagatggtggcggtagcagcgatctggtccttggtctcgacgtccttggcggcggcgacgagttccttgacgatgacctcggtggccttctcgatgccgcgacgcagggcgatcgggttggagccggcgaccacgttcttcagaccctcgtgaaccagggactgagcaagcacggtcgcagtggtggtgccgtcaccggcgacgtcgtcggtcttcttggcgacttccttgaccagctcggcgccgatgcgctcgtacgggtcttcaaggtcgatttccttggcgatggacacaccatcgttggtgatggtcggagcgccgtaggtcttgtcgagcacgacgttgcggcccttcgggcccaaggtgaccttgacggtgttggcgagcttgtcaaggccctccagcatgccctgacgggcttcctcatcataagagatgatctttgccatggttgcgtattcctccaaatggctaggtataccggttatcactcgcaagcgtcgagtcgtgacgaccagccgtcagctgccgattatcactctcgacctccgagtgctaacccagacattagcactcgcgaccgccgagtgccaacatcatcggcggcgattgcgctttgggcatgaaaaggccccaaccgtcgaaacggtcagggccttcaatgcacatccttgcgtgcgtgttgctcactcggagcgggcttcacccgaagacagcttgacaacatcctttgcctgcgtgcctttgccggacgaagcgggcgtatactccacgcgatcgccctcgtacagcatcttgaacttattggtgctgccgtcgtccttgatttccgcgtagtgcacgaaaacgtcctcgctgccgtcgtccggctggatgaacccgaaccccttcttggcaaggaagaacttcacggtaccttgtgccatatctgatctttcctttgttcccttaggcgtcgcgacacaaaacctatagggaacgtagaaagaaccgcatcgcgctcccctacctcgcgactagatgacgattgtacagtgacgagggaacaatcccaaccgcagtggcacattttcggtacgaattatttcatagacgtgagaacgctcacagttttcgatgtattccacgccgatatcaggggcgcatcaacaacgctagttgagcagcaccaccgtaatgggaacggcgagtccttgcacctgctccacagccgaaatgccaagcgtggtcgccacatcttcggcggtggctttatcggcttcattctgataccataccacggaagaagccggcaatgtgccgcgcggattggtcgcctcgacgctggtgtaaccggcggtctgcagcacatcggcctgctgacctgcatatccttggattcctgtggcgttgaccacacgcacctgcgtggccttattcacagtcgcggtggctccggactgctgagactgctgatcggagtcttgattctcattcgaggatgtcgtatcactgttggtatcggattttgccgaatccgaagtcgagtccttggacggatcggtcgaagtggacgaggaatcatccttggtgctgtttttggtctcagccttgctggacgaatcggacttggaagcagtcccggacgtggtcgcagtctgggacgatcctcctattgcattcctgtattccccggaaatccatgcccagaccccgacaccgcacagtgcggccaccagaataacgacgatgaacgggcagaggcgggccactgccgaacgagcgccacggtgaactcccaccggtcccttcggaggattgtcgaaggaatccggttcataggattcgtaggtcatcatgtcgcgtgccataatcgccctttcttcctgtcaaaactacccatgagtgtaatcggcaaacaactcatcagtccaccacaccacgcctcgtgcaccggatatgcacgtttgactacagtggtgagtcatgatcaaaccattgagcgaactggtagagccggggtgggcccatgccttggccgacgtggagcccgccatccaccatatgggcgattttcttcgtgcggaaaacgccgccgggcgcccgtggctgccggcaagccacaatattctgcgcgcgttcaccatcccgttcgattccatcaaggtgctgattgtcggccaggacccctacccgaccccgggtcacccggtgggtttgagcttctgcgtggcgccgaatgttcacccgctgccgaaaagcctggtcaatatttataaggaattggttgacgaccttggggtgcccatgcccaccaacggcgatctgacaccatggacggaacgtgaggtgatgttgctcaacagatgtctgaccgtcggcgtcgggcggccgaattcgcatcagggcaaaggctgggaggaagtcaccgaggccgcgattcgtgcgttgaacgcgcgcacggacgccgacggcaagcccaagccgctggtggcgattctctgggggcgtaatgcgcaaagcctcgagccattgctgaccaatgccttcattatcaaatcgcctcatccgagtccgctgtccgcttcccgcggattcttcggctccaaaccattctccagagccaatcaagccctagtcaccatgggtgccgacccggtggattggactctttagacagaccaacagtcattgtgagtagttacagtgagggcatgactttgttccccacgcaaccgaacataccttcgccgaccaccgccgcacgaccggtcaccgttcccacgcccggcgtgtcggctccgctgggtgccgatgacgccaaacgcgcacgtatcctggccgacgccattcgggcgaggttcgcccagacactggtgggtcaggataatctacgcgaatcgcttatcgtgaccttggtggccggcgggcatattcttatcgaatccgtgccgggcttggccaagaccacggccgcccagacgctcgccacctgcgtatccggctcgttcaaacgcgtgcagtgcactcctgatctcatgccatccgatctggtgggcacgcaggtcttcgattttgcgtcgcagaagttcaccacgcagatcggcccgattcacgccaatttcgtactgctggacgagatcaaccgttcgaatgccaaaacccagtccgccatgcttgaggccatggccgagggtgccacgaccatcggcgggcagcgtatcgccttgcccaagccgttcatggtgatcgccaccgagaatccgattgaggaggagggcacgttcaacctgcccgaagcccagatggatcgtttcatgatgaaggccgtcatgacctatccttcgcccgacgaagaggctcgcatgctggccatgctcacccaccgtggctccgatatgatcggtcccgacaccatcaccggcgaacgcatttccgtgtctgacgttgattttctgcgcaaggcggcacgccgcgtgcatgtttccgacgcgatcatgcgttatgcggtcgatatcaccgccacgtcacgaggtgccggctcccgccccatcaagggactgtcgtccttggtgcgtttgggtgcctcgccgcgcgccaccatcgccttgacccgtatcggccaggcgaaggcgttgctgtccgggcgcgactatgtggtgcccgaggacctcaaggcgttcgctcatgaggtgctgcgccaccgtattatgctgacgttcgaggcactggccgatggcgtggtcagcgatcagatcgtcgacaagatcgtcgaaacggttcctgttccgtgagttccgattccgttcgcaagaaaatcgaggcccttggcactcagctgagcctgcctaccgtaaggaaggctttgggcgtgctggagggcgaacacgcatccgggcgtcgtggcggcagcggcgatgcgatggatgtgcatgcctatgagccaggcgacgaatcccgtcttatcgattggaagaccagcgcccgccaaggccgccccatggtggtcgagcgcgagcgcctgtcgacgtcacgggtctggttgctgatggacgttggcctggagatgactggcgtatgcccttccggagaacgcgcatggcaggttgccgccaatgcgctgcgtatgttcgccgcactgtcgttgcgccggtcggacgatatttcgctggtgttcggcgatgagtccagcatcacccgcgtgccgttcaacggtgggttcgcgcagttcgaacgcacgctggacaaggcgcttgatcgtgattgggatcatcaccgtaatatcgacgcgctgctggaatatgcgcgccgtatcaaggatcgtgaggcattgatcgtattggccaccgatgagcatgcgatggaggagcggcatatcaccacgatccgtcgtattacccgcacccatccgatggtgctgatcgatgtggcgacgatgaatccgttcaaggccgtctcatcccgccacgctcccgccgacggcttgagtgcacggcgtgtgccggcattcctgcgcaacgccaaggcagcggccgaggtcgatactcatcgcgcgtatatggccgcggctttggaacaggagctcacccgtgccggttcccatatcattcgagccgcatccagcgaatccatgttcgatcgtttcgtcgccctggtgtcccgggcattggcccgcaccacacgcaatagactgggcactgcacccgaactggtcggactgactttggcgggtgatctatgatgcacagcatgttccccatcatcccgctcgccactgatcccggcgatctcaggcccgtggagtcgttggccttgaccactcccctggtgatggccatcgtcgcatgcctgttgctggcggtaggtctgatcgtgttgatcatcatgctggctcgccccgcacgcaaacctcggaacagcgaccgtgcgcgtggcactcatagcaatgccagctccaaggccgagtggcgtgcccgcatcgacgatgtggtggcccgtcatgaatccggagcactgccccggcatgaggctttcgtcgaattggccgtcatcgcccgtgatttcgccggtgccgcatcaggcaaggagcttagttccagtacgctgaccgatttggcgtacctgaatcgcacgcccgcgaatcgccaaggattggacgcattgaagcagaccattagcgcgttgtatccaccggaatttgcagatgatgcccgcaaccgaatcgcccagacgaccagcgtgcagcaggccgccgagtgggtggcgaatctggtggaaaggtggcgttcatgatgctggcatggcattggccttgggccgctctggccggcgtcttggcagcgctggcgattatcgtgctgattgtcgtgttcgcccgccgtaacgccgccgacgacacccctgtattctcgatggacgacgatctcaataccgagcacgcttcccgtctgttccgtcaatggcgcgctttgggccgtctcgccatcagcgtgctggtgcttgcgctggcgctggccattgtgctggtggctcgccccagccaagtggatgccggtgacgaacgcgcttccagccgagatatcgtcctgtgtctggatgtgtcgggatccacgctcccctatgatcgcgaggtcatcgatacctatttggaactggtcaagcatttcgagggggaacgtatcggtttgagtatcttcaactcgacctcacgcacggtgttcccgctgaccgacgactacgaactggtcaccaaacagttgacctccgccagcaaggcgctgaaaggcgtcgagtcgcaggatgacatcgataagatgtccgatgccgaatatcaggacatcgccaattggctcgaaggcacgcagaaccgcaaggacgccacctccttgattggcgacggcgtggtgtcttgcgcggcgatgctccccggtttcgcttatggcgaagccaatcatgcgaatgccgaccgtcagcgtgcggcatccatcgtgctggccaccgataacgtcgtgtcaggcaaacccacctattcgctgaccgaagcgttggacttgacccagcagaccaaaatcaccgtggacggcctgtattccgggccgaaagccagtgaatcggaccaaaccacaacggatatgaagtccgcgatcgagtcgcatggaggcatcttcctcacccaatcgaatggcgcgtcgatagatgagctggtacgggatattcagtcgcgtagagatacggatgtggagaacaaggcgaaatcctcaatggtggacgctcccagtctgtggacgcttgctctggccgtgatactcattatctggatcgtatgtgcatggaggttgagacgatgaacggattcaccttctcccccgccttgggctgggtcgccggcggactgctggcggccgggctcgccgtactggccattctcgaaatcgtattgtttgttcgccgccgtgcttccagtgacgagaccgtgtgggcttgcatacgacgtacgcttatgctgctcatcgtagcggtgatggtactgactcccagcgtggtatcgtctaccacctcacaggtcatcaatgccaccgacgtcatcgtggcggtggataccaccgggtcgatggcggtggctgatgccacatacgggtccgagaagaccattacccgcatcgatgccgcgcgtcaggccgtgcatgatgtgaccgctgcttacccggacgccagtttcgcggcgttacggttcggtgcttcgggaacacttgatgtgccgctgaccccggatgcgccggccatcgataattgggccaacacgttggcggtggaagccacatccgtgtcggcgggatccagtctggatgctccgatcgatcaattgctgctgaccgcgaagtcgattcgtgaagcgcacccggatgatgcgattgtgctgtacctcatcactgacggcgaacagacctcgaatgtgacgcgtcgtacgttctcgtcactgcgacagtatctcaatgatgggtttaccgtgggcgtcggctcgaccgagggcggcaagattcccgtcatcgccgatggcgtcagtgccggcgattccaacaccacggaccactgggtggtcgacccggataccggcgaacccggcatctccaagatggatgagaagaaccttaaagacattgccgacgagatcagcggcacatatgtggccgtggacgcttcacagactttggcggattcggtttcggccaagtcgtcgaagcagtggcgcatgaccaccacggtcaaggaacgcacacgcaccacgccggtggtatggccgttggccattgcgttggcgatattgcttgccatggaagtcggtgcatggatcgcaacctcaaggaggctgctgtgagaaacagtaacgaaatccacaagaacgatggctcggcgaatattcggatgcgggcgaaatgcccgctttgggcacgtatcgtcctggcttgtggcaccgtattgctgctgctggttgccggcgtggcggcagtaaacctgtccgcttcgattacgttcaatcaggccaccgcatcattgaatgccaatatcaaagcggctcaggatgagtccacggatatcaccacgctcaaggcgcaacagcagcagaccgatgcgcaattcgccgaggccgggcgaatgcgtacgcttctgttgccgcaagtcaaggacgccatcgacaccaatgcttcgatttcttccgagctgacgaagatcaccctgaaacaggccgaggcgcagaacagcggttccgattccgggcaagcccagtcggcgcagcaatccgagagttcctcagccaatgccaaaaagggcggcgcgttgaccgacgagcagaagaagcaggtcgaggagctgatgaaggccaatcagcaatccaccgatacccagtcgaacaccacccaatccgagcagaaggcgacgcagaacaagggtaccggggccaccaagccgtggtaagcagtcgttcacggttgctctttttctcacatcctcacgggtcatggccttatcgcggctgtttcccggtttcggctgtcggctttggcgtttgtctgatcccgatagcccatggctgatccaaggtgtgcccaaacaggctatttgtggataatcgttacggctatacacaacacttgtgaataacttcgcccaaaatcggcaagctagaaccacattggtcgttccggctggacaagcatgagtcctgtccttttagctggatatatgaatacctacaccagcaccccagcacccatcgatcccgccggcggctttgccggcaatacggtgacgccgttcgattacggcacttgcccttgccatgcggcggtacagcgtagtcgcgacctcgtgtccgtccaacgtgcggccacactggcgcaatcggaccagatggcggtggccgtgaaccgctcccgcaacatcgtgtggaccggtaaagccgccgacctattccgatcgcggctcagtcgcaccgcacagtattcggccagtctcgcgcaagacatggagaccacccaccgattggcttgggggtcatcatgagcgagcacgattactggcaggtggaatcgtccgtttacggcggagtgggatatgcgccagccactcttgaagaatatgccgccatagccaaggctctcgatgacgaggcggcaggatttgcggccatagccacggcttgggaatcggccgcattacagttgcagtcacatcggcatagtgcgccgatgtgcgtcaccttgcagtcgggcgatccgagcgccgttgttcccggccatgtcactgcaccatatgccgcgctgggcaatcggtgttatgaccatgcaacggcatgtcagcggttgagcgatgacctgcgtggcgcggccgatctgctgattcgcgcacactctctgtattctcaggcggagatgacggctcggcgcatgtttaccgaattattgcaggccggtacacaggccaaaccgggatatgccgcggtgggtgttgccgctgtggcggcgggcggctttctggccggctgggctattgacggcaaaccgaacccagcatggatgtccacgttcacctatccgttccaggaaggagtgctcagcggcgcgggcggaatcattggcggcgtacctatcggcaagagcattgcgcacaccgatgaggtcaacaaggctgcggggaaaatcgccaatttctccggcccggcgaaagacgtcgtccaaggcaatcatctgaacgtgcgcgaggtgcaggcgaatgccgacgtcgtccgtgcaagcggatcggtggccgagtcaatggagaatctgcgcaggctcgccgaagaacggctcggcaaaatcgagctgaacagcggactcgaatatgggaccatcgccattcaacgctatgaacgggctgatggaaccaactcctggctggtcaccatcccgggtaccgatggacaacctgactcaccattcggctgggcgcagaacgtggaactgatgagcgccgatcaggagcgccgcaggaaagcggacagcgctcgcacggttgccgaggcgatgcgtcaggctggtatcggcaaggacgagcccgtggcactgatcggccactcccaaggtggcatcgttgccgccacgcttgcctcggattgggcagaggaatataccatcgagcatgtggtgacagccggatcgccggtggccaatcatccgattccgcaacgcacgtgggtcaccagcgtggagatcgatgatgaactggtcgccgcgctggatggtgccgccaacccggtcaccgataattggctcaccgtgcaagggcatgtatcgcccgcgcccacggcaacaccatccacagtgcattcggacgtctcatgcactcccggcgcaacgcccatcaacggtctgaccccatatgacgccgcatccgtggctggttcgaccaacggcagggagttgtcgcattggctcaaataccatcaggccgcttatcagaacgccaccgacctcggctcccccgccgtgcagcgccacgaagcgcattttcaggaagtcatcaacggagaactcaaggaaacccgctattaccaaggccgcatgacccagtccacaaccattgctcccggcgagcgcaccaccgagttcagcacgttcggcggttaaaagtaaataccacacttgacagagttgtcaagaaaggagttaacaatataatgacgagtaggagatggctcatcaaactgatgaagcaagcggcgaaacgcaagaatattacgtttgagagtatcaggcaaagagggagtcatgagatattccaactcgatggactcatgattcccatcccacgccataacgaaatcgacaacgacctcgcgaacatcatttgtaaggaagcagaagccaaactcgggaaaggctggtatcagcagtgaaaacatatcaggtcatcgttcgtcctggcgaaaaatactggattcttgagattcccggtatcggtttcacgcaggcaagaacaacagcagagattgaaagtatggcacgcgaccttatcaccgtcatgacgcaagatgctgatttcgcactcaccatagagacaaaactgccgcaatccgtacaagagcaccttgatgaagctcggcgactgcgcaaggaagaagcggaatgcagatcgaacgcagcgcgggaaactcgcgccgcggcacaagaactacatggcatgggtctcgccctacagcaaataggcgatatactcggggtctcacggcaacgggcacatcaacttgtcaatgctgtcaatgcttagcatcaatcggctaccccccacaatgcaatcaccgcagagacgcggctagcgccactttcccgggattgttgcgctagcatgcccgaaaccccctctatcagcgcaacatccccgggaaagtggcgcgcaaagagtgtcaggcgcgtcgctcgatgagtgcgcggccggatgcgaggcggtcgagcacaccggttttggcgatggccagcatcagataccaggccatcacgccgctgataagcacgccgccggtgacctcggaaatcatgtgcacgatgccacgcgggctgacgaatgacacacccacgtagcgaaacagcatcagatatgtgccgtattccaaggcgaccaacgcaccggatgcaatggaaatcggcagattgaacatgcggtaacgggtcaaagcgaacggaatctcagcgaaaacaccctgcagcagcgccgagataatcacgaagcccaaatcgaactggctaccaatcaccgtttcgaccagcgtgccgataaggttcacgtacagcgccgctccgggtttgcgcagaatcagcaccgccagcgtaccggagaaataccagacggcgtgcacgatgctggcgaaaccgggcagaatcgcgccaaacaccgaagagatcggcatgtacgcgaagttgaatccccagaagatcacgccgcaggccgcgcccagtgtggcaccgaccgcgatgtccaacggctgccatttcagcgacgatacggcgaccgaacgtttcggaagagtatgaatggtggttgcaggcatggtgatctcctagccttaaaggccgcacacagtaatcgaatcacgggcgttccttgacctgtgcggctcgggcgggaacgccacaccacagtgtagccgctcggttcacggctggaagtacccttggaggttatgaagcttaccgatatttcccccgcaatcgcattgaccccgctcgacggccgttaccacaaggccaccgccccgctcgtcgaatacatgagcgaacctgccctgaaccgcgaacgcatgcgtgtcgaagtcgaatggatgattcttctggccaacggctttgagggcaacggcaaccagccaatcgttgacggcgtcaagccgttcactgccgaagagcaggccttcctgcgcgccattcccgaggacttcggcgccgaaggcatcaagcagcacgccgctcatgaggccatcacccaccacgatgtgaaggccgtggagtactacatcgatgatcagatcgacaaggctccggccgagctggccaacatcaacgacgagctgaagaccctcgtgcacttcgcctgcacgtccgaagacattaacaacctctccatcgcccgttgcgtcaagaacgcgatggaaaacgtgtggaccccggagttcaagcgcatcatcgaccacctcgccggcaaggccgaggaattcaaggatatgccgctgctctccctcacccacggccagccggccacgccgaccacgctcggcaaggagctcgccgtctacgtctaccgtctgaaccgtcagctcaagcacatcgaaaaccaggagtacttgggcaagatcaacggcgcgaccggcacgttcggcgcccacctggccgcatgcccggatgtcgactgggtcgccgtctcccgcgaattcgtcaccaaccgcatgggcctgacctggaacccgctgaccacgcagatcgaaagccacgactggcaggccgagctgtactccaccgtctcccacgccaaccgcatcatgcacaacctgtgtgtggacgtgtggatgtacatctcccgtggagtgttcgcccaggtgccggtcaagggtgccactggttcctccaccatgccgcacaaggtcaacccgattcgtttcgagaacgccgaagccaacttcgaaatcagctgctcgctgctcgacaccctctccgccacgctggtggaatcccgttggcagcgcgatctgaccgattcgaccacccagcgcaacatcggttccgcgctcggctactccttgctcgccctgaccaacctcatgggcggccttgagtccatccacccgaacacccacgtcatcgagcgtgagcttgatgagaactgggaggtgcttggcgagccgatccaaaccgccatgcgcgcctgcgagctcaagggcctgccgggcatggacaagccgtacgagaaggtcaaggagcttatgcgcggccacaccatcaacaaggaacaggtcgagcagttcatcgaccagcagtccttcgacccggaaaccgccgctcgcttgaaggctctgacccccgccacctacaccggtgtggccagccagctcgtcgctttcgaccgctgaaataggtgcgatgcgagtccctcgagcccatcgcatccaccacactactgcgctgagtcacaaaccaaaccgcaaactgaaccgaacaaggacaggcgtcaggtaaccatttcatgactactgaacaggagcagtccactacggaagatcgcccggacaaggcgacctcctccactaccgaccggccgatcgcctctggtgacggccggtcggccagttttgctgtcagcggaccggacagcccggcaaccgacgacagcaacgattccggaccgtacatcgacgacatcgctccgcgccgcacgcgcgacttcggcgatctgacccgggccggtctgtcgctgttgatggccgccgtggtcatggtgttcgccgtgtatctgggcggcatgacgcgcggcgtcgaatccgacgcacacaccgcagcccaggtcatcaactggttggctgacttcccctccaccgtgctgacgcagctggccaccatcgtcatcgtgatcatcgtgctcgctcaattgctactggcccgggaatggctgcaggccgcggtgtccgcgctggccatgttcgccggctacggcatggtgtgggtcgtatcgacggcaatcagcagtctgaacgatttcaccctgccaatggcactagtctcagccgccacctcatacggctccgggctgttgcccgacatctacaccggcatggcgtccttcctgaccgccgccgggccacgccgcacccgctccacggtcaaatggagctggaatatcctgtatgccatcgctgcggtgatggtggtgctgtcgtggcattcggtcaccggcatgctggtgtcgatggccgccggccgcacagtgggcatgctgatccgattcgtggtcggcacgcagaacaagggcgtgtggggccaagatctggtcgccgccctgaaaggcatcggactggacaccgcctcgctgattcggcatcaggagcccggcgtcggccacggttcactggccgtcacgctggacgacgatctggccgaaggctcgcgcatctacgatctggataccacggacaaccgtcgtttcatcgtttccgtcatcgacgcgcaaacccataccgtcggctatctgaagcagttgtgggactgggtgcgtttcaccagtgtgtccatccgacgtgaccgttccgtgcgtgacgccgtccagcatcatttcgccatgctgctgggtctgcacaatatcaaactgcccgcgcccgcaccctacggcatcgccgataccgacgaatccgcgattctggtgctggatgcacacaccatcgaactgcccgccaacctgaacacgcttaccaaggcggatgccgtggcctacatgcgctacctgtccgtggcgagccggcgcggctatacgcaccggcgcatcacgccggacacgctcgcccggcttgaagacggcaccgccgtgattgccggctggctcaacggcgacaacgcttccggtccggccaacaccgcgctcgacaaagttcagctgctagtgctgttcgccgcgctgatcggcgtggaaccggcggtggaggccgcccgcgaggcgtggggagacacgactctgacggccttggccccgttcattcagaaggtcgcggtcccctcccccacgcgcgcgctggaatcctgggacaagcagctgctcaagggcctgaggagtcgtatcaccgcgctggctgacgaggagacggtggaatccgccgaaccggtgacgctggcccgattctcctggcgttcgatgatcaccatgctgctggtcatcgtggccgtggtcgtggtcttcacccaactgaagcccgaggagatcatcaccgcgctgaccaacgccaacccgttgatggcggtggtgacgctcgcgttcggtgtctgcggctggatcggctcgtcgatttcgctcggttccctgatggcgcggcacaagcgtgacaatatgggcgtcttcatgagccaggtggcaggcggcttcgccaccgtatccatgccagccggcgtgggcccctcgttcgtcaacctgcagttcctgcgcaaatccggctatcgcaacacccaggcgaccgcaattatgagcgccgtgctcgtggtgtattacgccgtgtacttctccatgctggtcatcatcggcctgttcaccggccgcaacatgttctccggcgcaatcccgacaaacacgttggttatcgtgctgggcgttgtggtcgtggtgctgtccattgcgatgatgattccaccgttgcgccactgggtgacccgtcgtcttatgccgctggccaagacgtatatcaaccagctgctggacgtgctttcccagccccgacagctcacagtcagctgcctgggcgcgctgttccagaacgccaccactgggctcgctttctgggcggccctgcaagcgttcggccattcatcgaatccgattgaaacgacgttcgtcttcctgctggcctatgcattgggttccgcagtgcccactccaggcggtctgggcggtgtggaagcggcgctgacattcgcgttcgtggcggtcggagtgccgcagggcgtggcgctttccgccactttgctgcaccgcgtggtgttctactggctgcgcattccgctgggcgcggcggccatgaagtggcttgacaagcataatcttgtctgattcgtctattttcatacccccttcggggaaatagatgtgaaaacccttataaaacgcgggttttcgcagaaacatgcgctagtatcattgatgacaacatggactaagcaaaagtgcttgtcccctgacccaagaaggatgctttatggcatacaacaagtctgacctcgtttcgaagatcgcccagaagtccaacctgaccaaggctcaggccgaggctgctgttaacgccttccaggatgtgttcgtcgaggccatgaagtccggcgaaggcctgaagctcaccggcctgttctccgctgagcgcgtcaagcgcgccgctcgcaccggccgcaacccgcgcactggcgagcagattgacattccggcttcctacggcgttcgtatctccgctggctccctgctgaagaaggccgtcaccgagtgaccttctgctcgtagcgattacttcgagcattactgacgacaaagaccccgaccgagatggtcggggtctttttgttgtggtgctgtgacgtgttgtccaaccgtattattccggactagttcagcgcttccataagctgctcgaatcccagggtgggctcggcctcgaagggatcgaggagtatggcttcccggcgttcgggggcggtcagggtcaggtgggtccagtcggcggagaactgggctccgacgttcagggccgcgtccacgaaccggccacgcagggcggcacgggtgtcggtcggcggattgtgcacggcgtattccacgttgtctcctgtcagcagctcacgcatctggttgcgggctacgagcgaaccgtacaggcgaccgttggcgatgtcgtggtagtcgagctcaagctgttccatctgagcgaaggtgacgtccgggcgacggcgtttgagcgcgtcgaacagacgcttcttggcggcccagtccacgcggtcggcgagcgcatcgtatgcaccacgctccagcgcgtccagaacgcggctccactcccccataatcgcgtcgatcgtggtggcaggcagcgaacttgccagcgcatcgccatgggtttcgatgaaggccttgaccgccgcataataccggcgctgcagacccagtgcggacacggattcgcctgattcgagcgtcagttcggcgcgcggattgtcaaggaatcgactgaccgtgcgattggcggcagccggatcagcaaaggcatactgctcgaatccggacggaacgccatggcggaaggcgtcttcgatcgcgcacagcacaaggtgcgtgacggcaagcttcatccatgtggaccattgcgaacggttcgagtcgccgatgatcacatgcagccggcggaaggagtcggggtcggcgtgcggttcgtcgcgcgtgttgaccatcgggcgggagcgggtggtggccgaggagacggcctcgtccaggaagtccgcgcgctgggtgatctggaagccgtccggggtcatgcggccggcaccggtgtacagctggcgggtgatgaggaacggcagcagctggtgttcgatggtctccaacggcacgaagcggcggaccaggtagttttcgtggcagccgaaggcgtggccggcggagtcgacgttgtttttgaacacatggatcgtggcgtgtgcgccgtaggattcgcgcagcttgcgctgggccttcagggctaggttgcgcatcacgtgttcgccggcgaggtcctgggccagggcctcgcgcgggtcgcgcgcttcggcggtggcgtattcggggtgggatccgacgtccagatacagacgtgagccattggccagatacgtgttggtggagcgggaacgggagacgatgggctggaacatggtcatcgccacctggccggcgtccacggggcgttcggcaccggtgaccgccacgccgtattcggtttcgacgccgaaaatacggcagaacccgtccatctcggcggatggtacgggttccgtggcgtgcagggagcgggtgccgctgtcacgcagttggggcatcactcgccgcctttttgcacgaagctgttgacgtattcctcggcgttggtttccaaggcggattcgatgtcgtcgaggatgtcgtccaacacgtcggcttggtcggtggactcggtttgggcggcggcctgcgtggtggcgagggcgtcgtcttcctgggtcgcggcctgctgtgcttgaggttgttcgaattgttgtggcatgttgtcttctttttgggctgtcaaactcccctcagtcagccttcggccgacggctcccctcacccgaggggagccggaggagtcaaaaaattatcgctggttgatggagtcgagccacggatactgctgcaggtaatgctgcagttcgcggatgatgagtccattggaggccactacatcgttatcgtgacgccagtggatgcgttcgccgtcccaacggctcagcgtgccctgtgcctcccagaccactacggtgccggcggcgatgcccgcgatatcccacacgtgcagcatcggctcgaagtaggcatcataggtgccgtcggccactttgcacaggtcgagcgagacggggcccacgcgcttgatgtcggccgggcgtccggcgagcgaggaggccacgtcgagcgcacgctgcgattcgctggggatgaaggacatgccgtagctcagcacagaaccatccagcgaggaggtcatcgacggcacgaccttgtcgcgcttctcgccgaccgcggttttgtggatgcgcacggcacccgctcccctggcggccaggtaggtcaggccgagggccggggcgtgcacgatgccgatgatcggcttgggctcgttgtccgggccgaattcgaacagggcggcggtcaccgtccattcgctcatgcgacgtacgtagttgatcacaccgtcgatcttgccgatgtaccagtaacgctggccagggcggctttcggcggggcgggtggtccagaagccgtcgaagtgggcgatgtcggcgattctggcgctcatgaagcgcatgatcttgttgtccacttcaagcttgtagcgggggccacggtccgcgttctcggtgctcggctgggcgaggttacgcggattgagttggtcgtggagggcatgctggccggcttcttcgagcaggccggcgactttgagcgcaaggttgcgcaggtcctgtggggtctcttcgcgtgtttcttccatagctaccaagtctatcgttcggcgttgatggccagcgacttcagcagatcgatggcgtgttcggctgaattgagttcggtttcgcagtgcgccttggtgaaggcgagcggatcggagatgtcgagggagaacaggtgatggtcggtagcggccatatggccggcattgccgtagaattcgaccgcctcgccctcgtctgcggcgcgcgggtcgcgaacagtgagtcgggaccagctggcggcggccacctcatcgccgaattgcgccacgagttttgccctgagccaggcgcgggtgtcttccggcggttcggtggtggcgcgtgcgatgtcggcggcgctcaccacccgttcggtgcggggttcgagtttggtgaagatgctgtccgcggggtcgagcgccgcccatttcaggtcgatgaccttcagtcgcggatcattccatccgttggccacgccgggtgcggacgttgtggtgattttgcggcgcagtttttcgagcagctgccatttgagcagccattcgatgcggctggcctcgccggtcatggccagacgttcgtcatcgtcggcggcatggcggatggaggcgcagtcgatgagcgcctgctgccacatcgccataatggatgtggtggatttgtccggccaggcgggttcgccggcggtgtcggtaccttcgaccagtgcggcaacctggtagacggcttggcgcagtttgagctggataagccatgcgttggtttcgccgccgttggccagcggcaagattgcccccagcgtcaggtcgcgggaaacggtgtgtatggcctcgactgggtcagacagttcgagttcgtcgaggaaggcgttcaggtcgaatccggcctcgtccgcatgttcgagcagccacagcagcatgctcgtggtgccgagtttcagtgcctgcggcacctccatgcgattggcgtcgccgacgatgacgtgcagacggcggtatgcatcggtggagtgggattcgtcgcgcgtattgatgatcgggcgttcgaaggtggtttgcaggccgactttggcgtggatgtagtcggcgcgctggctgagctggtagcccgggatctcgctgttctcgccaatccctacgcggccggagccggcgtagatctggcgggtgacgaagtggagggtcatcaggcgtgtgaccaagtcgaatggcaccgcgcgggccatcatatagttctcgtgcgtgccccagcaggagcccttgccatccacattgttgcgatgcagggcaatgggagtaccagtctgtttgcgggcgcgttcggtggcggcctgcatgatgaggtctccggcgtggtcgtatcggaccgcttcgaacgggtcggtggtttccggcgccgagtattcggggtgggcgtggtccacatagacgcggccgccgttgagggcgatcacgttggtgatgttgagctgcggggcgtcggtgagcatgtccgggcgggcggcggcgcgttcgagacgggtgccgcgcgcgtcgttgaccgggtcctcctgccggtagtcccagcggatggatttgctgtggctgtccgcggcgccgttcaccacgtcgaaggacagttgcaccggattgtagcggtccggggtgttcagggataccgcgtattcggtttcggtgcccatcactcgtttaacggtcatgtagtgctccttgagcttgagctattcggcggtgcggatgcggcggatcgggtccatgccgttgatgcgcgaccattgttcggggtccacgtcggccatggaatcgcgggtctcgcggtattcgtcttccacggcggcagcgagcagcggcacggtgagtgccacgtccaagccggtttcgatggattccttgaccgctcgggtcttggcccggtccacgatgttcttgagcatcgcgccggagaccacgtcggccaggaacaacgcatgccactggccgttctcctcctgcacgtcgcatagatggcggcgttcggaggttccgtagatgtcatgcaccagcacggcggacaaggcgtgcgcgtcgacgccatcttccagaggcaggtcgtcggtgaggtaatggtccacgatggcgatggcctgattggttttgggccggccgacgcgaatcttgacgtcgagacgccccggtcgcaacacagccggatcgatcatgtccacgcggttggaggcaccgattaccatcacattgtcgagtgattccacgccgtcgagttcggagaggaactggggcacaatcgtggtctccacatcggaggagacgccggagccgcgggtgcgtagcagcgaatccatctcatcgatgaacacgaccaccggattgccgtccgcggcgcgttcacgggcgcgctggaaaatcaggcgaatcagtcgttcggattcaccgacgtatttgttgagcagttccgggcccttgacggacaggaacacgcctttaacgcgggtttcggccggactgattgcgccgtcgccattcgaatcgtaaccaccctcgcatagggcgttcgccacggccttggcgatcatcgtcttgccgttgccgggcgggccgtacagcagcacgccctttggcggcttcagatcgtagcgctcaaacagcgcacgatgctggaacggcagttggacggcgtccctgatacgaccgatctcactatccaggccgccgatgtcggcgaacgtgacatccggggtctcctccagcaccagatccttgtcgccctcggcgggcagcacttcgatggcgaggcggacggacggatcgacgataatacggtcgccctgattgatgcccgcatacgcgagcgcgccggaacggcggatgagcacgggattgccggaggcgtcggtaacgatcagtcgaccgtcgtcaagtacctgcttgacactgcgaatctggcccacggtgtcagcatcgcgctgctcgaccagcacgagcttctcgttgagcatcacggtggccccggcggtcaggcgggcggcgttgacgttggaggccacaggcaccaccatgcggcgggtgccggaaatgacttcggccgacgcgtgctggatgccgtcttcatcggtgcgggtggaatcgaccttgaccatggtggcgaaggtgagcggcggctgagcgagctgggcgagctgtgacttcgccttggtcagttccttgccggcgcggctcagcgcttcggcgagcgcatggttcttggccatcaggcgatcgttcagcgcggcgagatcttcggtgtcgctcatgcgggttcttcgcttcccttctatccgggattttcggcaacttatggcagtcggcagaccctattcgttgccgtcggcggatttcctgttacgtataacagtacgcacttttcgcaccacgaaccatacgatgaccacaatcacggccgcgatgaccacgtcctcgaacacgccgagcgcgccttgaatcgagcaccactggtcgccgagcaggtaaccggcggaaacgaggatggtgttccacacggccgagccgagcagggtccagccggtgaagtgcaggaagttcatgcggttgaatccggcgggaatcgaaatcagcgagcgtaccacgggaatcacgcggccgatgagcaccgaccatgtgccgtatttggtgaaccagtcgttggctttgctcacgtctttgcggctgacgccggggattctgtctgccgcgagattgatgcgatgcaggcccacccagcgggagatgccgtacaaggtccaggcacccagtacggagccgatggtggcccagatgattgcgcccggcagactcagggtgccgcgtgcggcggtgaagccggcgagcggaagaatgacttcggacgggatgggcgggaagatggattcgagggcgatggccaaggccacgccgataccgccgatggtttccatcagcatgatcagccagtcggtgatggtgccgatcaggccgggttcggtggtggtgcagatgggtgtggggtcggttgcaagaatagtggcggctgccatggaaaaactcatagagggcattgtcccaaggttttcccagaatcaggagcatgacgcaagaagatgtgcattttgttgacaagtccgccgagagcgaagttgggagcccggctggttctgcggtttctgtgccgacgctgagcgagcccggcctgctggttatggatgtggactccacgctcattgacgaagaggttatcgacgagttgggcgtggtggctggctgcggtgaggagattgccggagtgaccgcacgcgccatgcgcggcgaactggagttctgcgacgccttgcgcgcacgagtggccctgttggaggggctgccggtttccgtgttcgatacggtgcatgacaagctgcatttcaccaagggtgcgctggagcttatcgacacgctgcatgaacacggttggaaggtcggcgtggtgtccggcggcttccatgaagtggtcgatatgctggcggccgagggccatatcgactattggattgccaaccggcttgaggttgccgatgggtgcttgaccggcaaggtgctcggcgaaatcgtgagcaagaccgtgaagttgcacgccttgcagacatgggcggaccgtttgggtattccgatgagccagaccgtggctgtgggcgatggcgccaacgatattccgatgattcaggccgccggtctgggtctcgcgttctgtgccaagccaaagacccagctcgccgccgacaaagccatcaacgaccgcgacctaacccacgtactcgattacctgcgccggtaaaattttaccgacctcggctccggcacttatagttgagccatgactacttcaggcgcagaacagttgacgcttgcggggctggctccccgcaagcggcgtaaacgtgcgcctgcggagcatacgccggccgagcagcatcccatagcgcaagtcgtgctggatgtgcaggcgctccacctcggccaggcattcgattacttcattgatgaaaaagacagcgaggccgcacaaccgggtgtgctggtgcgcgtgcggtttggcggtcagagggtcagcggcgtgatctgggcacgcaccgataccagcgatacgccgcgctcttcgattcgctatatcgagcgagtgctaagccccgatgtactggttcccgcttcgatgcgtgaggatatcagtctggttgccaaagcctatggcggcacacgggccaatattctgcgtttcgccgtgccaccgcgcgtggccaaggtggagaccgagcagcggttggccgcatcgttccgtcggccggtcggcggctcattgccggataatacgcagggtggttttgccgggcgtggcaccaatcccgatgggaccaaacctgctggctctacctttgccgttgccagtaccgtttcggagggagctgcgcaggggtatcgtcgtctgaccgccaattacgccgatgtcaatgtgcttcatgacgcgcttaccggtcaacgtttccaatcttttgtgtttgattcgttgcccggtgcacaggagtggcaacggaacatggcatggatggtggccactgcgctgagtgccggtaaagctgccgtggttgaattgcccaccatgcgcgaggtcgaagacctgatgcctatgctgcgcaattatggactcaaaccgttcgccccggcacccgccggcggctgggtgggcgacgtcgccgtgctcaatgcggagaccatgcctgcggccgaccggtatcgcacgtatctggccgtggcgttgggccaggtgaaggtggtgatcggcacccgcgcggtgatgtatgcgccggttgcaggcccggcactgttcgccattctggaggatgccgcctatcagaacatggacggtatgatgccatatccacaggcccgtggcgtgatgcggctgcgcgccaagtcccatggcggcgtgttcgtggccatggccaatgcgcgcaccccgcaaagccagtgggaaaacaccggtccaggtacagtggagaccccagtgagcggctattccaccacaattcatccgctcgcctcgccgctgaaggacgccactccttgggtgcgttggctcaatcgcgatgaacttgcgcgtcttgccgacccgtccatcggggcgcgcgtgccgcatacggccgtccgcgtgctatctaaggctttggagagcggccccgtgctgctgtccattccgcaagacagcgtcagtgagactctgagttgtgcgaaatgccatcgtcaggtgcgctgcgccaagtgttccggaccattgcaactaccggccgaccgccgggactccacaccgcgatgccgttggtgcggggctgccgccatcaactggaagtgtccgggctgtgggcatgaacgtatgcgcgtggtgcgcgtgggtgctgcaggcactgcggcggagctggccggattattccgtggcgtgccagtagttttgtccagcaagacgcagggcctggtgcgcgatgtggcttgtcagccgatgatcgtcatcgccactcccggtttcgaaccgcgcgtgcgtccgatcagtgccgagcagggaacatccggtcatgagtatcgcgcagtggccgtgctcgacgcttggaccagcctgtatgcgttgggcgtggatgctcggttggatacgttgaccgcgtggatgcgtgcggtgtcgttgtgcgcgccgcgttcccgtggcggccaggcgttgattctcggcgaaaccgacccggccatcgcccaatcgctgatgctctgggattcgaggattcttgcagccaaggatcttgaggagcgtgtggagaccggtatgccgccggccgtggccgccgcctgcgtgtggggccgccgtgatgcggtgatgatgctgatgcagcgtatcggcgccctgggcggcgattggacggcctgcggcgagctgcccggcatgttgggcccggtgccgatcgcgcaaccggacacggtcgacgcccgggagctcgaagccacggccgaccgggtgaaggcagtaatccgtgtgccgcagagtcggcgagccgagctggcggcccgactgcaccgggaaaccgctcgtcatgtggcgtcccgcgaacccggcgagcttcgcttccgagtagatcccaaggacctgatctaatcgtcttcaacacgtgaaacgataattacagaatgaacatcgctagaaggaggacactatgaagggttggcctggagagccggatatggattacgacgtgctggtcgcggatggcgaggccgctgcgaacgccggcaagccgatcaccgacgtgatcttcgatttcggcaacgtgctgatttactgggatccggtcgccgtactcatcccccgctacagccagaagaccatcgacgaattcctcgacaacgacatctccggcttctacgatgtcaacgacctgatggacggcggcaccagcaccgacgaggccatcgccatcatgcgccgtgacaagggcgataagtgggcggacatcctcgactactacatcaagaacttccgcgactccctgaccggcatcgtgccgggcgcgcgcgtgctggtcaatgacctgaaggctgccggcatcggcgtgtggggcctgagcaactgggaatccagtctgttccacgtggccgaggaacagtgcgatattttgcagcagcttgatggcaagctcgtctccggttttgtcaagctgcgcaagccgcacaaggaaatctacgaggccgcgttggaccagttcggcatcaaggccgatggcgcgttgttcatcgacgacaaggccatgaacatcgtcggctcgaatgcggccggcatccgtggcgtacgtttccaggatccggtcaagctgcgtgaactgctcatcgccaatggcgtgaacattccggccgtgcagtgagcatcgacatttcaaggaggaccatgctcaaactcgtgttcgccggcacccccgacgtggcggtgccctcgctcaaggcctttgccaccgatccacgttttgatgtggtcggcgtcattacccgccccgatgcgcctaccggtcgcggccgcaagctcacgcccagcccggtcaaggcgacggctctggagctcgggttgcccgtcatcgatctcaaaccccgctcccccgaattcatggaggcgttgaacgacctgcatgcggatatcgccgctgtcatcgcctatggcaatatcctgcccaagaacgtgcttgatgcggtgcccatgggctggtacaacctgcatttctccaacctgccgaagtggcgtggcgccgctcccgcccagcgtgcgatttgggcgggcgacccgaccaccggcgccgacgtgttcaaggtgggcgagggtttggatgatggcccgatcgtcgcttccctgaccatcgaactgaccggccgtgagacttccggcgaactgcttgaccgtctggccgaggaaggcgcgcccatgtatgtggatgcgctggccgccgtaggtgaaggcaccgccacattcaccgcgcagccggccgagagcctggaatacgcgcacaagatcacggtgaaggacgcccgcatcagttggacggacgaggccgaggccatcgaccgtcagattcgcgcctgcacgccacatcccggggcatggaccgaactgtttgcggaagggccaatcgccgataatgacgagtcaaccgctaaatccctcgccctgcatattctcgccgcacaaccggccgaccagtccaatcccaacactccggccgagcttcagcccggcgagctgaaggtgggcaagaagaacgtgtgggttggtaccggcagcacgccgctggaactcacccaagtcaaggcgcaaggcaagaaggccatgcgcgccgccgactgggcccgaggcgcacgcctctcccccgccgcctgcgtgcgataacaagcaatatcgctcccgccttcggaagcacagtaaaggcccggcatcttcataaagaagatgccgggcctttcagctatgcaatcggcgatcagttgagaccggagagcttgttgatcagctccgggtcacgcgtcgcacccttgtcggccgagcgggcgaaggcggcgtacgccttcagcgcctgggagacgtggcggttgcggtgagccacgtagccgtcgccagcctcaagctcgcgacgacgctcgtccagctgctcgtcagtcagttcgacgttcacggaacgggcttcgatatcgatatcgatgatgtcgccgttcttgatgagcgccaccgggcccttgttggcagcctcaggcgccatgtggccgatggccagaccggaggaaccgccggagtagcgaccgtcggtgagcatggcgacctgtttgccgatgcccttgcccttgacgaaggaggtcgggtacagcatttcctgcatacccgggccgcccttcggaccctcgtaacgaatcacaagcgccatgccaggcttcagggtgtcgttcagaatgacctcgatggcctgctcctgggagtcgaccaccagagccggtccacggaacttccagatctccggcggaacaccggcggtcttgaccacgcagccgtcgggggccaggttgccgcgcagcacggcgaggccgccttcgtgaatctccgggtggttgatgtcgtggatggcgccgttggtgcggtcgcggtcgagcgagtcgaacagggtggtgtgcgtccacggctccggggagatgatgtggccaggagcggccttgtacatctgctgggcttcctcggtgcaggtctggcgcatgatgtcccaatcggccagcttggcttccagcgtcgggtagtcgatggaatgcacgttggtgtgcagcttgccggcgcggtcgagctcgccgaggatgccggtgatgccgccggcgcgatgcacgtcggaaatctcccacttgccggacggcgaggccttgcagatgcacggcacggtgtgggaaatacgctcgatgtcgtccagggtgaagtccacgtcggcggactgggccatggcgaggatgtgcagcacggtgttggtggaaccgcccatggccacatccatggtcatggcgttctcgaaggcttccttggtggcgatggagcgcggcagcacggaatcgtcggaatcgtcgtagtactggtgagcgatcttgacgacttgcttggcggcacgcttgaacaggtccttgcggtaggagtgggaggcgaggatggtgccgttgccgggcagagccaggccgatggcctcggtcaggcagttcatcgagttggcggtgaacatgccggcgcaggagccgcaggtcgggcagacggtcttctcatagttgagcagttcctcatcggagacgctgtcgtcagcggtggcgtacatcacgtcgataaggtcggtgctcttgactgtgccgtcggcgagcaccgtggtgccggcctccatcgggccaccggagacgaacacggtcggaatgttgaggcgcagggctgccatcagcatgcccggcacgaccttgtcgcagttcgggatgcagatgagggcgtcggcgcagtgcgcgttgcactgatattcgacggtgtcggcgatgatgtcgcgggaaggcagggagtagagcatgccagtgtggcccatggcgatgccgtcatccacggccatcgtgttgaactcgcgcggaatgccgccggcttccttgatagcctcggaaacgatgcggccgaccttgttgaggtggacatggccgggcaggaactcatcgaacgagttggcgatggcgatgatgggcttcttgcccatgtcgtctccgctgacgcccgcagcacggtagagggctcgggcgcctgcaaagacgcgccctgacataatttttgcagatcgcatttcagtcatggttctattcaagcctttgcgagggacacgccatttgtcaagagtcgaataatggaatttgcaaaaacgtaatgtttctcacacatttttttggaatacattcctctggcgagagtccggtatagggctgacagaagtccccccaaacggctacacttgcttcggttgagatagattttccaatgtttggagataagaacaatggcttttggtactgacccgacacccgacggtcttgcgaacccgccgatcgacgatctgatgaagcacgccgattccaagtacgcgctggccattttcgccgctaagcgcgcacgccagatcaactcctacttcacgcagctcaacgagggcctgctgcagaacgtcggcccactggtcgaataccagaacaacgagaagcctctgtccatcgccttccgcgagatcgacgagggtctgcttgaggagaccttgggcgaggacgacgccaacgagggcaactgatcgattcagacgattcgtttggattgtttggacagttcgtcgccgaatgatggtgtgagagttctctcacaactgattttgagcgacacgcttgcctgagttatcgcaatcagctataactcatcatcaggagcgaacaagacgtaaggctcgagccaccgcgctggttggcacgggcctttatttatgcccgcttccgcagtgacaagtaaaaattgacaccgtatcattgtgcctcgcaccccgcggggcgataagtcctgaagaaagggatgatatgacagaagaacatcggcttatctccgccgaatccgtgaccgaaggccaccctgacaaggtctgcgatcaaatctccgacgccattcttgatgatctgctggcccaggatccgtccagccatgtggccgtggagacctccgccgccaccggcgtgttcctggtcttcggcgaagtcacgtccaaggggtactgcgacgtgcagtccaaggtccgcgaaaccctgcgcaacatcggctatacctcctccgaagtcggccttgacgccgattcctgcggcgttgtggtggccatcaccgagcaaagcgccgaaatcaaccagggcgttgcccgtctgactggcgatcaggagaccgccgccagccgcgaagaacgttacgaagcacagggtgccggcgatcagggcgtgatgttcggctacgccaccgacgagactccgacgctgatgccgcttccgatctatttggcacatcgcctcgccttccgtctgaccgaggtccgcaagtccggtgaagtgccgcacctgcgcccggacggcaagacccaggtaaccattgagtatgacgataacgataagcccgttcgtctggacaccgtgctgatctccacccagcatgatcctgaggttacgcaggattggcttgctgttgagctgaagaagcacgtgattgacccggtgcttgatgaggtgctgggttccaaggtgccgcatgacaactaccgccagctggtcaacccgaccggttcgttcatcctgggcggcccggcggccgacgccggtctgaccggccgcaagatcatcgtcgacacctacggtggcgccgcccaccacggcggtggcgcgttctccggcaaggacccgtccaaggtcgatcgttccgccgcgtacgccacccgttgggttgcgaagaacatcgtagctgccggcttggctcacaaagtcgagatccagatcgcctacgctattggcgttgccgacccggtgtccgtcaacgtggagaccttcggcaccgagcaaggcgtgacgcgcggccagatcgccgccgccgtacgcaaggtcttcgacctgcgccccgccgcaatcatcgacaagctcgacctgaagcgcccgatctacctgaagaccgccgcttacggccacttcggccgtaccgacgttgagttcccgtgggaaaagaccaacaaggtcgaggagctcaaggccgcgattgctgcggagtgaggtgctctaattaggacagagagatcataagaataccataagaatagggtgctttccgctgttgatggcggaaagcaccctatttgtttttcgcagtgtcctacgaatctgttcttatttcaatccacgcaccccagtggggtgcgaccttctcgaaatcagcatccgtgggaatctcgtcgttatttcaatccacgcaccccagtggggtgcgacgacatgcatattcatgttgcgccatattttttatatttcaatccacgcaccccagtggggtgcaacggaacgcgatctcgtcgttcttccagaccgtgtgatttcaatccacgcaccccagtggggtgcgacgcggcatgctcgccgcattgggtgtcaacaatacatttcaatcca

SEQ ID NO: 3952 - DNA, 5487 bp, Unknown
  R22_24m  MAG No. k141_26609
atcgatggcgtcgatgcgcgcgaggcgcgaggccgcgtgggactggtgcttcaggacccggactcgcagatcattcttgaacgactgggcgatgacgcggccttcggctgcgaaaacctcaacgtgccgcgcgaggagattcggcagcgagtgcgcgaatcattggatatggtgggactcggcggactcgaactggatcggtccacccgccatctgtccggcggtcagcgccaacgtctcgcgttggccggcgtgctggctatgaagcccggtctgctgttgttggacgaaccgaccgccaacctcgaccccgaaggcgtggtcgaagtgcatgacgcggtcaaaaaggtcatcgaggccaccgggcagaccatggttgtggtcgaacatcatatcgatgtatggctcgatctggtcgatcgcgtgatcgtgctcggccgacccgatgcaagttcgcccacgggcgcggtcatcgccgacggcaagccggacgaggtgttcgccgagatgggcgacgcattggccgccggtggcgcgtgggtgccgggccgtgcgattcccgattactcgccgaagcaggagcctgcgcacgatgcgccggtgctcagcactgagaacttaagctttggccgtggaaccgctcttggcgttggcatcaatctgaatttctatcccggcgaagtaacggctctgatgggtccgaacggcgcgggcaaatcgaccttggccctgaccttggccgggctgctcgagcctatcgccggcaaggtgctcatcgccgacaacctcaagcccgcgcatgccgggcgtgagccgattgactggaaaagcaaggaactgctgggccgtatcggcatggtgttccaggagcccgaacaccagttcgctgccaatttcgtgcgtgacgaagtcgccatcggccccaagtcgatggggcagagccaagacgaggcttatcggaccgccgaccgcatgcttgagcagatgaatctcacgcgcttcgccaaagccaacccgtataccttgtctggcggggagaagcggcgactgtccgtggcctccatgctggccgccgcacccaaagtgttggtgatggacgaaccgacattcggacaggatttcagtacgtggaatgaaatggtcaagctgatcgccgccatccgcgaccaaggctcgtgcgtggtcatggtgacgcacgatgaggcgctggtggatgcgctgggcgcacgacgcgtgatgttcgaggaggcgaggcatgagtgacgtggtaaccgtcagcccgcaggaaacgcgcgtggagccggtcaaagcctcatcgccctcatggttcatagcgcgcatcaacgcggtcagccgcatcatcggtgcgctgttgctgtgcgttccgatgttcatcagtctggatgtggtatccgcatccacggcgctcggcatcgaattcgtgctgctgtggattggtggcgtggctccgtggatcgtatgccgtaagacctggccggtatggatcgccgccgccggcagttttatctccgtgtttctctacggccgtacctcgggcgagatcctgtggcagggtggctggattgtgatcagcgagggatccattaatctggccatcgccacggctatcagggtggcggccattgccgtacccggcgtgatcctggccctgggcctcgatcccactgatttggcggacggtttggttgagattctgcacttctcaccgcgattcgtatacggcgggttggctggattgcgcatgtttacgctgctgcaggaagattggcgcgcacttggcttgtcccagcgttcgcgcggccttggcgacggtaacgccatcgcccgtgccctctcccaagcgttcggactgctggtgctctccatccggcgcgccaccaaacttgccaccgccatggaagcgcgcggcttcggctccagcgccccacgctcccaagcccgtatctcgcgtctgaagcctatcgactggatcttctacgtcatctgtctggctgtcccgctggcctccataggcgtagccatcggcaccgggaattggcacttcgcctttcaaggtgtctgaaaggcgacagactggcacagtgcctttcaaggtgtctgaaaggcttacgatgcctccgccagcgggagcgagccacgactgacgtaatgacccggcagtagggtagtggctatgcccatcaacgcccagattcttgataatccgaaatccgaccgcgttcgccgcatcgccgatctgacccgcgccaaaggccgcgaacgttcgggccgttttcttatcgaaggcccgcaatccgtgcgcgaggccgtcacttggcggccggacgtggtgcaggacctctatgtggaggtttcgcaggcgttggaacatccgcgtatcatctcctccacgttggagaagatcgtcgaaacctcgcaggatgccacgatttatgtgcactactgcaccggcgacgtgatgcaccgcatcagtccggacgcccagggcatcgtggccgtcggcaatgccgagtccatgcacgccggtgccgatgacgtcgaacttggcaagaacggccggggcccgcagatcgccgccttctggcaggtgcgcgacccgggcaacgccggcaccgtgatccgtgcggccgatgcggccggctgcgacgccgtaatcttcgtggacgactgcgtggacgtgctgaaccccaaggtcatccgctccaccgcaggctccctgttccatctgccggtactcgccatgagcaccgacgaattcttcacctggacaggcgaccataatatgggcgtctgggccgccgacgtatacggcaccgaagaatgcaagccggaaagcctgcccgcagtactggcggacaaggcggcggtcgaggctccgaaagccgtgctgttcggcaatgaggcgcgtggcttggaaccggacatcctcacacgctgcggccgcatcgtctccatcccgctgtacggcaaggccgaatcgctgaacctcggcacctcggccgcggtgatgttgatgtcgctgtctatgtcgggtcatgttgaaagaatgtgaaaccggtaaaaacgctgtgaaacgctgagaaaacatcagacgaaagggttctcgtggcagaacaaatggtgttcgacgccgaccaggtgaccgctgaggttgccaagggcatcgagaaaatccagaacgcctccaacctggaggagctcaaggccatcaagacaacgtacgcaggtgccgattcggcgatgaccaaggccagcaaggccattggctccctgcccgtcgaccagaagaaggaagccggcaagctcatgggcaagctgcgcgccgacttcggccgtgcctatggccccaaggaagtcgagctcaaggaagccgccgagaaggccgcactcgccgctgaaaccgtggacatgacgctgccggtgaaccgcaagcctctgggtgcccgtcacccgctgcccaagctgatggaagacgtcgaggacttcttcatctccatgggctggcagatctcctccggtccggaaatcgaagccgaatggtacaacttcgactccctgaacttcggcccggaccatccggcccgccagatgcaggacaccttctacgtcaagggcaatcaagccaaggacgccgccggtttcgtcggctccaacatggtggtgcgtacgcagacctcctccgatcaggtccgtgccctcctgacccgtggcgtgccgctgtacatcgcgtcccccggccgtgtgttccgcaccgatgagctggacgccacccatactccggtcttccaccagtgcgaagccctcgccgtcgacaagcacctgaccatggccgacctgaagggcgtgctggacaagctcgccgtcgccatgttcggccctgaagccaagacgcgcctgcgcccgagctacttcccgttcaccgagccgagcgccgagctcgacctgtggttccccgacaagaagggcggccccggctggctcgagtggggcggctgcggcatggtgaacccgaacgtgctgaagtccgccggcatcgacccggacgtctacaccggtttcgccttcggcgtcggcatggagcgcacgctcctgctgcgcagcgacatcaacgacatgcacgacctggtcgaaggtgacgtgcgtttcgccgaacagtttgtgatgggggagtgattcagccatgcctatgatcgatatcgattggctcaaggaccatgtcgaggttcccgaaggcctgacctacgaacagctcgccaaggaccttgtcaaggtgggtcttgaggaagaggagatccactcctcccaggtgaccggcccgattgtggtcggctacgtggtcgacgccacccccgaaccgcagaagaacggcaagaccatcaactggtgccacgtggactgcggcgacgaatggaacgagaccgacgaagacggcaacaaggtgccgcgcggcatcatctgcggcgcgcccaacatgaaggccggcgaaaaggtcgtcgtcaccctgcccggtgccgtgctgcccggcgacttcaagatcgagccgcgcaagacctacggccacatctccaacggcatgtgtgcctccgaacgtgagctgggtctgggcgacaaccacaatggcatcattctgctgcgtcagtacggcttctccgaggctgaatatgaggctctgaagcctggtcaggacgccatgcacctgctgcacctcgaccagcctctgcttgagatcaacatcaccccggaccgtggctacacgctgtcctaccgtggcgtggcccgcgaataccaccactccaccggtgccgcctacaccgatccggccgtggcactgaacgagaaggccccggaacctgctgactaccagcccggcaccccggtggacatcgatgttgaaatcgacgataacaatccgattcacggcgtgcccggttgcgaccgctactacgcgcgtatcgtcaaggacttcaatcccaacgcccacacgcccaactggatgcgccgccgcctgattcgcgccggcatgcgctccatctccttggccgtggacgtgaccaactacgtgatgcttgacctcggccagccgatgcacgcctacgacctcgacaagctcgaaggcccgattgtcgtgcgccgcgccaacgagggtgagaaactcaccaccctggacggcaaggaacatgacctgagcgtcgaagatctgcttatcaccgattcgccgaacggcgaacgcggctcgcgcatcctcggtcttgccggtgtgatgggcggcctgtatggcgaagtgaccgccgacaccaagaacattcttctggaggccgcgcacttcgatcaggtgaccatcgcccgttcggcccgtcgccacaagattccatccgaggcctcccgccgcttcgaacgtggcgtcgacaccgcgctgcagcccgccgccacccagatggccgccgagctcatggccaagtacggcaa

SEQ ID NO: 3953 - DNA, 9368 bp, Unknown
  R22_24m  MAG No. k141_27692
atacagtatagtttaatcgtctaacttattggttgtggcgcgccgaaacttgcaagcgcgaccctcatcgaggaggaatgcatgacgagagtactggttgccggcgtagatacgtcaactcaatcaacaaaggtccgcattacggacgccgccaccggcgaacaggttcggttcgggcaggccaagcacccggatggcacctcggtcaacccggaattctggtgggaggccttcaccaaggccgccgagcaggccggcgggcttgacgatgtcgcggccctcgcggttggcggccagcagcatggcatggtcattctcgacaagcagggcaacgtgattcgcgatgcgatgctctggaatgacaccagttccgccccgcaggccgccgccctgatcgacaagctcggtgcaactccggccgagggcgacgaaccggacgacgtgaccgcccgcggcaagcagcgctgggtcaaggccgtcggatcctcccccgtcgcttcctacacgctgaccaaggtggcgtgggtggccgagaacgagcctgagaacgccaagaagattgccgccgtctgtctgccgcacgattggctgagctggcgtatcgccggctatggcccggtggccgagggcgaggacgctcatctcgaagccctgttcaccgaccgttccgacgcttccggcaccatttactacgatgccgcgcatgacgagtaccgccgcgatctcatcgccatggtgctgacccccgccgagggcgaggaagccgccaaggcccacgccgacgccattgtgctgcccaccgtgctgggcccgcgtgaggcagccgccgtcaaggccgaccccgccattgccggcaaggacgttgaaggcggctgcatcatcggccccggcggcggagacaatgccatggcctcgctgggcctcggcatggccgtgggcgatgtgtccgtatcgctcggcacctccggcgtggccgcggccatcgctgaaaacccggtgtacgacctgaccggagcgatttctggctttgccgactgcaccggtcattatctgccgcttgcctgcaccatcaacggttcgcgcattctggacgccggtcgcgccgcccttggcgtggactacgacgagctggccgaactggcctttaaggccgagccgggtgccggcggcatcaccctggtgccgtacttcgacggcgagcgtacgccgaaccgtccggacgccaccgcctcgctgactggcctgaccctgcacaacaccaccaaggagaatctggctcgtgcgttcgtcgaaggcctgctgtgttcccagcgcgactgcctcgagctgattcgttcgctgggtgccgagatcaaccgcatcctgctcattggcggtggcgcgaagtccgtggccatccgcacgctggccccctcaatcctcggcatggacgtgacccgtccggccaccgacgaatatgtggccatcggcgccgcccgtcaggccgcctgggtgctgtccggcgaggccgaaccgctgacctggcaactcaccatcgagggcgtggagaccggcgagcccaccgaagccgtgtacgaggcatacgccaaggcgcgcggctgatacgctgccagcacaatccatgagataacaactgaataacgattcctgatgaatgccgccatggcaagcatcgcgaagagccgctgttataccgcgctcctcgctgaagcacacatggcggcatttttcgtttcccacgcaatccacaaatacggctataatcaagtcgtttgaacaagtctggagattcttctatgaacgaccgctcccgtatgatgctgtacgccctgaccgccgtcgcatgcgtgatttggatatggcaatctgccaaagaagcaatggccgacggcacgatgatcagcacctcgaacatcatctttttggtatgcatcggcattgccgccgtctactgcgccgccaacgcattgatattgtggtggcgccaacccagcaaggaggatgcggagaacgatgacgccgcggatacgcctgacggtaccgataccgacaccgcagatgccgagggatccgaggacgacaccgatgacgatgtcgaaaccgacgtcgcaaccacggatgccgatgcaccgccaaccactaatcgccagtaaccatcgttatcgttcgcccgaatcaagcgaatcatcccacttcagcaaaggaacattatggaagtaacaaccgtgtcaaccgtgatcagcgtggtgctgggcgtcatatgcgcgccttgcggcctgtttctggggctcgttcccatgaaggccgatctggtgaccgccaagcagtcaaaggcctcgcagatggtgagcttcatcgttgccatagtgttcatcggcttgctggtcgcaggccatgatctggagacctgggccatggtaatcggtctggtcatcggcttcgccgttgccaagattcccgcgctgcacgcctgggctttgcacaagtggccgttcttcgagcccaagaaagcggctcccgcccccaagcgcgtcaagaaagccaagaagaagtaaccataaatatcctgaagcatcacattaaccattaaaggctttccgcgcagcactgtatatgccgcgtggaaagcccttaatggttcggaagaggagatggaagaactacaacagaccaatcaaaccatggtcccgaccatctcgcgcaaaggcagggaccgtgtcgattgctgcagacgactcgatgctctgcccacccgcgtatacggcgccgtctcgcaaatcagtccaagtggtcgtctcatcgccaggaaggtagacactacgggaagcagcaccggcctcgactacgggagccacaagaatgtcaggaccgtacaggtattcgtccgcaatgtcggccacgtgttcatcggtcggaaactcgtagaacagtcctcgcaccaacggctgaccctgctcatgggcagactggaacagttcacgggtatacgggcgcatgacctcgcgcacggcgatgtatttacggaatatggactccatttcagggccatagctccatggctcgttgtccgcgcccgaaggcgaacggtgctcaccggttgccttggtgatggtttgcttgccggtcgactcccccaggctgcggtcaccatggttgcgcatgacgggcaggaagcaggagaacgcgcaccagcgggccagcagctccttgaatgaatccgaatcgatcaccccatcatggaagccgcccatgtctgtagtgaaccaagggatgccagccatacccatgtgaatagcacaggtaatctgcgatttcagatcggcgaatgtggagccaacgtctccagaccagaccaacgacccgtaacgttgagatccagcccacgcacatcgagtcaggttaacgatctcgccttccatgccggcttctatctgcccctcgtagaatccgcggttgtaagcctgcggatagacgttacccacgttgaggtcgctgcccatgtggtagcggtagttgcgaaaatcgtagacaccatattcgggttcggcctcatccagccagaaggcgcgcacgcccttgtcccaatagttggccttgcacttgtcccacacaaatttgcgagctcccgggttggtgggatcatagttgacgcacggctcttcgaacatcatgtcaagattgagcccagcttcagcgcttaccagatagttgttgcgcttcatctccacgaagttctcggatgagaccgagacctgcggccacacagacaccatgagcttgacgcccatgctgttgagctcggcgaccatggcctcgggatcaggccagaattcgtcctcgaacttatagtcgcccaaatgaggccagtgaaagaagtcaatgacgatgaggtctagcgggatgttccgggatttgaagcctcgggccacgtcaagcaattgttcctggttccagtaacgcagcttgcactgccagaagcccataccccattcaggcatgactggcgcatgtccggtggcgtcggcatattgcgattcgatctgcgcgtaggagtcaccggcggtgacccagtagtcaatctggtcagtggactgagccgcccattcggttcggttgcgtccaaaagtggcgcggccaatagccggattgtgccacaggaagccgtaccccttggaggagacgacgaacggcacggaggcttgggaattacggtgcgcaagttcaaaggtggagcctttgaggtcaagcacgtcctgttggtattcgcccatgccatacagccgttctttgggatcggcgctgaaagacgtggtcacggcgaagctttcaccggacaccggagtgtagtcacgcgccttgagcaaaagcgacccaccttgtggatattcgcggaacaggagttcgccttcggcgttccagaagctcaggtcacaccggaaggtttcatatccggcagacagcaatggagcatgattcgaatccgctttaacggtgatgctgccgttggtcaggctggcgtgttcgccgtcctcgccgacggcgatgtctgcgacacggccggattcattcttcggttccagaagcgcccaatcgaccgggccgaagccacggttgcgggtggcgcgtacacgtacgctgttctcttcccaaggttcgatgcgcagggtttcgccgtccccggtccagatcagggcgttgccgtcgatggtgaatgaagttgtcatggttgtcgtccttgtggttgaagtgtcgtactgtcttagtccttaacggcaccggcggtcacgcctgcggcgacgtacttctgggcgaagacaagcaggatggtcgcgggaatggatgcaagcactgcggtggccatcatcggcccccattcctgggtctgcgcaccgatgtagttgtacagacccatagtgatcgggcgcatcttgccgccgccggagtcaagggtggaagcgaacaggaagtcgctccaagaccataggaaagcgaacagggagacggtcacgatcgaattgcgcgataacgggatgacaatggaaaagaagcgacgggtacgtgaggctccatccacttcggcggcctcaagcagggaccgcgggatgccggccatgaaagaagtcaggagcatgaccgcgaacggcaccgcaatggtcgagtcggcgaggatcaggccgggcaacgtatcgagcagaccaatgttgttataaatctcgtagaagccgagcgacatcacgacggcgggaatcatctgagccacgatgagcaggaagctgagcgcgccgctgcctggacagcgcagcaaagccagtgcgtaggcggcaggcagtgcgatgaccagcgttagaatcacgcagcataccgctacgaggatggaagtgcccagatagggcatttggtcggcgattacgcgggcgtagttgtcaaaggtgaaatccttgggccacaggtcgccggaacgaatggatgccttaccagtgaacgagatgttgatcatccagtagacaggaaacatcatgatgagcgtcaatatgatgccgagagcggttttccaccaggtgctacgatgcgtcattgcaatcatctccctttagcaggtttcctgggtcttctggacccgcaggtaaatcagtccgaaaatcaacgccacgatgatgagaatcgtgccgagcaccgaagcctccgagtatttgatagtcattgaagttcccttgccaaatgccatcgaataggcccaggtggcgagggtacgcgaggtgccggttccctgggacatcatccagatcacgtcaacgaccttcaatgtatagacgaagccgagcaacagggtgatcgaagtgacgggcttcaggagagggaaggtgatcttccagaagcgctgccaggcgttgcagccatcgagggaggcggcttcatacaggtcgccgctgatgttctgtaggccggaatacaggatcacgaggttgaaggggattcccagccagatgttggcgatgatgacggcccacagcgagttatccgcctggagccaccagatgggttcgatgtcaaacagaccgaggaacatgttgaggatgccggagtcagggtccatcatccactgccagacggttccagaaacaatcagcggcaacagccacggaaccagcatgatgccgcgcaacacaccagagagcttgaagttatcgttgaagaacaccgccagggccaagccgattacatattggaatatcagcgagacgaccacgaacacgaaggtctgccccacaaccggccagaactccacggaggaaatgacttccttgtagatgtcgagacccacgaacagcgcatctccggtaacgaaggttcgtcgcgtgtatcggtgcaggctcattgacacgttctggatgagcgggaacgcgtaaaagattaccaagtagataatcagtggggcaatgaatccggcgatggccagtttggcccggaccggagtgccggactttgcccggcgaacggggcttgttgttgaggctgtcatggtttctcctgtatgaaccgggcggacaatacccgcccggaaaacgtcatctggtacgttggcggagcggtaatcgggaccgatcaagccgcgttaagggccgccagcagggattcggagatgcttgcggaggcttcctcgtatttgagacccaagtcggaggtacggccggcggcgttctcgatggattccttccactgagccaagccgtcgctagccgcgagctgctcggcacgcacggccttcttggcagcgaggttgctcagagcgttgcttaccttaagcagagtctcgtcctcggaaagacattcgataacctgattggcgagcttgtagtgggattccgcatccttcttgtggtaggcgaccatggcgaactcgccaccggtcggcacggtggccacgccgccatcctttgcggggatcggaataagtttggctccggcctcgtctgcctcggactgcatccaggtgccgatttcagcaaatccgtagtcgccagccaggaacagatcccaggaggccgactgggtgttggtcgtggcggacttgggagcccatcccttgctgatccacccggaaagcaggtcttcggcgtccttctgcgcctgggagtcaagcttggacagatcaccacctgcgccccagaaccaaggcaggaactggaagacgccttcctcacccgagatgcccgagaacgtaatgcccttgtatccggcgtcaacgaccttcttgatggccgcgttgagcgaatcccaatcggtgatggtggatacatccacaccggctgcctcaatgatggtggggttgtacataagacccaacgtgttggatccgcccagcggcacgccatatgcctggccgtccactacgcccggagcctcaaggttctcatcccaggcagaaacgtcaagaccagtttcgtcggaaccagcaaccaaacccgcatcgacggcggacggaatcatcgggttgtcgatgaccgcaacatccgggccattgtcttccttgattgcggtggtgaggttgttgagcaggtcggaagtggcgatggcttggcgctcaattgtgtagccttcgggcgcacacgccttgaccagtttgtcgaactcggagccatcctcgtggcgggtccagtcatcccaccattcgatcaccttatcatccgtggcgctgttgctcgaaccacaggcgctgacgccgacaagcatggcgcaggagcataatgcggcggttatcttaagagcggtattggacttcatatctcctccttgagagaccgttccttttgaccatctggtcctttgcatcgacccaccgtcgggtctttaccgcaccagatgcaaaccggtttgcataaataaatataaatcagataaacgaaccatgcaaaccggtttgcattatcggcgcgccgcgattggtgaaccgttctaaagccctgaaaacacaggggtcaaaccggttagcacaatttgagaaaagatattaggatacattcctatacaggcatggcgattcccgcatagattcgcaaaggcacataccgcaatgtcgacaaaagacgaagggaaaacgtatggtgaccatcaacgacgtggcgcgggaggcaggagtctccaaaaccacggtctcattcgtgctttcgggctcgcgccccgttgctgcagccaccgaacaacgtatccgtgaggcaatggacagactcggctataccgtcaatcatgccgcccgcagcttgtccacttcgaagaccatgaccatagccgtggtgaccagcaaccggcaggacgcctactttgacattgcccgtggcacatacatcaacggcttatcccgagcagccgccgaaaccggctacgacatgctcatcactaacgatccagacggctccgctacggagaacgcctgccaatcacacaaggcggatgggctggtttttttagacgtcaggcagaacgatccgcgtgtgccgattgccgctgaatccggcattccaacagtctcgctaggagtcccagtcaatccaatgaatcttgatgtggtcgacaccgacttcacggacatggcggcctcgaccatgcgtacactgcacgatgccggacaccgccgcgtcagcgtcatcacgctcagtagccgggtgattgccgaacaactcaacgacaccgctcgattcctcagggaaatcgaacgttccggagaacgacttggcatgcatgccactatccgacattgctctacaaggcccggaatcatcgacacagacatcgctcgcattcttgacggtcgaggtgaggacaccgcattcgtcatccataatgaatcggccgtattggtgttcagacgggcagtggaacatcgcggactgcgcatccccgaggatatctccgtcatcgccatcaatgaaaagcagatgtcggacgctctgtatctgccatattccgcctacgaaaacgacgtggaactggtcacccaatctgccgtcaatacgcttgtggaccgtatcgaacatcccgagctgacgccgacacgaacgttgatcaaggcctcgtacatagatcgagactccgtggccaatatctgaaatccttgcgtctctgccgccgcagcaatgatttccgcattgcataacggcaggggacgattgggttcaagccaacatggcatcaaagccactaatggtgcggccaacattccgcttcattatccccgcgagatgcgaagcgtgagagacagtgtcatcaggcatgacgagggctttcctcaatcttgatttatttgattgcccagtcccgctgggtaagttgaatcacgggtgcccgcagtagcaccaaaaaggtggcggggg

SEQ ID NO: 3954 - DNA, 8824 bp, Unknown
  R22_24m  MAG No. k141_28037
cgatcaggtgaccatcgcccgttcggcccgtcgccacaagattccatccgaggcctcccgccgcttcgaacgtggcgtcgacaccgcgctgcagcccgccgccacccagatggccgccgagctcatggccaagtacggcaacggcgagttcgccgtaaccgcgccgagctggcgtccggacttgaacgagccgtgcgacctggtcgaggaaatcgcccgactggtcggctacgaccagattccgatcaccgtgccgccggcaccggtcgagggtctggtgggcctgaccccggaccagcagcgtcgccgtcgcgtggcggacgagctcgccgagttcggcatggtcgaatcgctgagctacccgttcgtgggcgacgacgattacaaggccttcggcttcgacccggaagccaccaagaaggtcagcgtcgagatcgccaacccgctctacggcgaccgtccgtacctgcgtcgcgagattctgccgaccctggccaccaccgtgcagcgcaacatccgccgcggcatcgaaaacgtgtccctgtatgagctcggccacgtctacctgtgggatccgaacgcgcccgccatcccggcactgcccggcggcgtgcgccccaccgacgaacagctcgccgcgcttgacgccggtctgcccgaacagcccgaccatgtggccggcatcctgaccggtctggccgaggacgatggctggatgggcggcaagcgcccggtcgactggtccgacgccgtcgaggccgtgcgccgcatcgccggccgtatcggtgccgcaatcgaactcgaccagcccgccgccgacgatgtgcccgtccaatggcaccccggccgcgtcgcccgcgtcatggtgggcgacgtcttcaccggctgggttggtgaactgcacccgcgcgtcaacgaggcgctcggcttcccggcccattccgcggccttcgagctgaacctcaccgcgctgttcgccacgctgaccggcaagcccgtccaggccaagccgatctccacgttcccgccggtcaagcaggatttggccttcaccgtggacgagaccgtgaccgcaggccagcttgagaacgtgattcgcaaggccgccggcgcgaacctcgaatccatcgaactgttcgacgtgttcaccggcgaacaggtgggcgagggcaagaagtccctggcctatgcggtggtgttccgttcaccgagcaagacgctgtccgccgaagacagcgacgccatccgcaaggccatcgtggctgaggccgccgaaatcggcgcccagctgcgcgcctgacccaaccgatcatccgaatcgaggagcgtcatgagccaaccggagcaggacaagccgaaatacgggcagtaccagcagcctgaatatggtgctatgtctggccaatacgggccgaattacaacccgtatatttatggcgctcccgagccggataccaagaaggattccgccgcagccgctggcatcaacggtggcgcggcgcaatcccagcaggccggccagccgtacggtcagcagccggcgtggcccggcaatcagcaggcgggcggctggccgtatgctcaaggcggccaacagtccggtccgggcgcatatccgggcgggtacccgggcatgcaggggcagtcgtatggtcaacagccgaacggtcagcctcaccagccgcattattaccacggcatcgacctgaacgatccaaaccagaacccactctacgggcactgggattcgtatgcgatcatctcctttatcctcgccctgttcttcccggtgccagtgctctcggcactgatgggcgcggtggcaatgtggcgcacgcgcaccttccatatgaaaggcttcggtttggctgtggccgccgtggtgatcaacgtgctgtacaccatcgccgtcatctggatggccttcaatggctatgacgccatgagcctctaccaggaagccctccagcaactcaccggcggcaccggctcctcctccgactccatctccgcataagtggcgttcacataccaacacacccactgcataaatatgcaatagtctgcataatcgcgtatactcatcccaagacacatcagtgaaaagagatgagtatggcgaaatatacagtggccgtggccggtgccacgggctatgccggcggtgaagcgctgcgcattctggccgcgcaccccgacttcgacatcacctgcgtggcaggccattcctcagtgggggagtcgatggccaagcacatgccgcatattccccaactggccaatctggtcgtcgaagataccacgcccgaagtgctgaacgggcatgacgttatcatcctcgcactgccgcacggtgcttcgggcaagctcgcctcgcagctcgatccgaatgccgtggttgtggatttgggcgccgaccatcgtctcgaagagcaggccgcttgggatgagttctacggcggcgatttctatgagcattggacctacggcatgcccgagctcatcaccggcaaagccgcggacggctcatacacccgccagcgcgcggcgcttcctggcaccaagcgcatcgcaggccctggctgcaacgtcaccgccaccacgctggccctccagcccggcatcgccgaaggactggttgaatcgcaggatatcgtggccgatctagtcgtcggatactcgggtgccggcaagaatctcaagcgcaccaacctgcttgccgccgaggccctgcaatccgccctgccgtattcggtgggcggcaagcaccgccacatccccgagatcctgcagaacttcgcccacgcggccggcaagagcgcggccgaagccagcgaattcacgctcggcttcacgccgattctcgcccccatgtcccgaggcatcctcgccaccgtgtccgcccgcatgacggacaaggccaaggcactgagcgatgaggagattcgcgccgtatggtccaaggcctatgaaggtcaggacttcatggtgctgctgcccgagggcacactgcccgccaccggcaacatcatcggatccaacgcagcccacctgcaggtcgtcgccgaccgcaaggccggccgcatctacgcttttgccgccatagacaacctcaaccgtggtaccgccggacaagcggtccaatcactgaacatcgcactcggcctgccggaagacgcgggcctgaccaagatcggagtagcaccgtgagcgttacatttgcacaaggtttctccgccgccggcgtggcggctggtatttcatccgtcgaaggcaagaaggacttggccctcgtggtcaacaacggcccgctcgacgcggctgcaggcgtgttcacctcgaaccgtttctgcgccgccccggtgcagtggagccgtaaggtcgtcgccgacggtcacgtcaaggccgtgattttgaactccggcggtgccaacgcctgcaccggcgaggccggttacgcccagtccgtcaccaccgcggaaacggtcgccggtctcatcggcgccgaaccgaatgatgtggctgtctgctccaccggtctcatcggtgaactgctgccgttggacaacgtgttggctggtgccaagagtgcccatgaggctcttgccgccaccgccgaagccggcgccgccgcctcccacgccatcatgaccaccgacaccaagccgaaaacggtcgaactgaccggctccaacggctggaagatcggcggcatggtcaagggctcgggcatgattgccccgcagctggccaccatgctgtgcgtcatcaccaccgatgcggtcgtctccgccggccagatgcaggccgcactcgccgtggccgccgaacattcgttcaaccgcatcgacgtggacggctgcatgtccaccaacgacacggtcctgctactcgcctccggtgcctccggcgtcgaaccggacaaggacgaattcaacaagctggtgcgtgaggcctgcgtctccctgtcccgccagatcatcggcgacggcgaaggttcctcccacgacatccgtatcaccgtcaccggtgccaccagcgaagacgcggcacttgcctgtggtcgtgccgtcgccgcctcgaacctgctcaagtgcgccatctccggcaacgatccgaactggggccgcatcgtcagctccttgggcactgtgccgcctgaagtcgcgccttacgattcgaacaaggtgaccgtggacgtcaacggtgtgcgcatctgcgagaacggcggcgccggccgcgaccgcagcgaggtcgacatgaccccgcgcgaagtccacatcgacatcgacctgaacaccggctcggacgccgaggccaccgtctggaccgacgacctcacccacgaatacgtccacatcaacgccgactacgaaagctgacaaacagcccagtgggctgtttgtagcagccggcagcgatagcgtcgccggcgtcgcatataacgcaaacagcccagtgggctgtttgtagcagccggcggcgatagcgtcgccggcgtcgcagaaaagagaaaaattggctacagaattgaagggacctgggttccatttcgacgtgcacaccgatttgcgcgccgatcagaaggcagaagtgcttattgaagcgctgccttggctggaggagttcgccggccagcgtatcgtcgtcaaatacggcggcaacgccatggtcgatgaccatctgaagcagtgcttcgccgaagacatggtcttcctgcgtcaggtgggcctgcatccgatcgtcgtgcacggcggcggcccgcagatctcccacatgctcaaggccctcggcatcaaatccgaattcaaaggcggcctgagggtcaccacccccgaggccatggacgtggtgcgcatggtcctgaccggcaaggtgtcacgcgaactggtcggcctgatcaacgcgcacggcccgctggccgtaggcctgtccggtgaagacggcggcctgttctcggccatgcagcgcaggcccatcatcaatggcaagcccaccgatatcggcttggtcggcgatgtggtttccgtcgatgcctcggcagtcgaggatctggtggccgccggtcgtatcccggtcgtctcttccgtggctccgaacgaagaagatgccactgaagtgctcaacgtgaacgccgattccgccgccgccgctttggctgccgctgtgggcgcacgcaagcttgttatcttgaccgatgtggatggtctgtacgccgattggccggacaagaattctctgattggccggatcggtgtggaaaacctgcgcgatatgctgccggacctggaatccggtatgcgacccaagatggaggcctgtgtcagggccatcgacggtggcgtgccccaagcccatatcatcgacgggcgcaagccgcattcgattttgaatgagatattcacctccgcaggcatcggtaccatggttatgcccgatgaaggactggaaatgaggagctcttatggctactgagcatgaggaaaaactaggtacggaagacagcaagtggctgggagagtactctcaggtccacatgaatgtgttcggtacgccgttgcgcgtcatggatcacggccaaggtgcccacatctgggatgttgacggtaacgaatacctcgatttcctggcaggcatcgccgtcaattccctcggatacgcccaccccaagtgggtcaaagcggttgccgatcaggctgccaaggtggctcatatcagcaactatttcgcgtccgagccgcaaattgagctggcatccaaactggtcaagctggctggtgcacctgaaggctccaaagtctacttcggcaactccggtgctgaaggcaatgaagctgccctcaagcttgccaagctgtatggccgcaccttgcctggtgccctgccttccatcggcggcaagcccgcacgcattctcgcaatgactcacggcttccatggccgtacgatgggtgcgctgtccgccacatggaaacccggtatccgcaagccgtatgatccgctggtgccgaacatcgaattcgtgcgcgccggcgacaaggtcgccctgcacgacgcttttgcacagaccggtctcggtcgctatggcaagggtccggtggctgctgtgattctggaacttatccagggcgaagccggcgtgcagccgttgggcgccgattacgtcaagttcgtgcgcgaactgtgcgatatcaaccacgcgctgctcatcatcgatgaagtacagaccggtatcggacgtaccggcaagtggttcgcattccagcgtgacgatctgtccggcggcgtgacgccggatatggtgactttcgccaagggcgtggcaggcggattcccgatgggcggcatgatcgctttcggcgagaaacttgcggctctgttcactcctggttcccacggctccacctttgccggcaatccgctgggtgcggctgcgggactcgccactcttggcgtgattgaagacgagaatctggtggccaacgccgaagctcgcggcgaacagctgcgcgatggcattatggccaccggtaatccgctgttcgtttccgtacgcggtcgtggtttgctggacgccgtcgagctcaagcatccctgctcccacgcggtgatgaactactgcctcgaacacgggctcatcgtcaacgcggtggctcccaatgcgctgcgtttcgcaccgccgctgattgtaaccgctcaagacgtggatcaggcacttgccatcctcaaggatgtgcctacggacctgcccgacgactgatttctcgccgtcactgccgacccaccgatccaaggagatcatcatgaccccagaacttcgccacatgctgcgtgacgacgacctcaaccatgaggagcagaagcaggtgctcgaacttgccatcaagttccaccatgaccgcttctacaagcagccgttcgccggtccgcaggccgtcgccgtactgttcgacaagccatccacccgcacccgttccagcttctccatcggcgttgccgagcttggcggctacccgctggtcatcgacaagtccggctcccagctgggccgtggcgagcccgtggccgataccgctcgtgtgctcgaccgcatggcttacggcgtggtgtggcgcaccttcggccaggaccgcgtcgaagaaatggccaagtactccacccatccggtggtcaacgccctgaccgatgacttccatccctgccagattcttgccgacttccagaccatcgccgagcaccgaggcggcgtcgacaacctgaagaaccagaccatcgcctacctcggtgacgcggccaacaacatggccaactcctacctgctcggcggtgccgtggccggcatggacgtgcgcgtggccggcccccacggctacctgccccgcccggacatcgtggccgacgccaagcgcgtcgcggccgagaccggcggttccatcctggtcaccaccgatgccaaggaagcggtgaaggacgccgactgcgtgttcaccgacacctgggtctccatgggcgaggaagccgaatacgccatccgctccaaaccgttctgggattaccaggtcaacaccgaacttatggcattggccaagccggatgcgctcttccagcactgcctgcccgcctaccgcggcaaggaagtcaccgctgaagtgatcgacggcccgcagtccgtggtgtgggatgaggccgagaaccgtctgcacgcacagaaagcgttgctgacttggttgaccggcaaggcccgtggagatgaaagcctgctcgcatgagtgaaaccggtccgtccctgcagcgccctgccaccagggcggcgcggctgagtgccatagaacaggcgctcgccacgcatatcatcacctcgcaatcacagctgtccaaaatccttatcgacgagggcattgcggtgactcaggcgaccctgagccgcgatcttgatgagatgcatgcggtgaagacccggctgaaggacggcacggtggcctacacggtgggtcgcagcgtcgttgcttcggaaggtgaggatgtaggggagcgcggtgaggcacagatgtcccgcgtgctgaacggactggtcacctcggtggccgccgccggaaatctggttgtggtgcacacgccttccggtgccgcacaatacgtggcctcggtgattgacaggcagccgatcgaaggcgtgctgggcaccatcgccggagacgacaccgtcatggtgatttgcaccaatgacgacaccgccgtctcccgctccgactggctactaagcctcgcttccaaataaccaacacgccgtgcataaatatacagtcctctgtatatacttgcatcagtttgtttttcagaccttgaatgaaagggaaccaatggcagataacaagcgcattgttctggcctactccggcggtcttgacacctccgtcgccatctcgtatctgaaggagcgcaccggcaaggacgtcgtggccgtgtccctcgacgtcggccagggcggcgaaagcctcgagaccatcaagcagcgcgcccttgcctgcggtgccgttgaatcctacgtggtcgacgcccgtgacgagttcgccaacgaatattgcatgaaggccctcaaggccaacgccatgtacgaaggcgtctacccgctggtctccgccatctcccgtccgctgatctccaagcacctcgtgcgcgccgcccaccagttcggcgccgacaccatctcccacggttgcaccggcaagggcaacgaccaggttcgtttcgaggtctccatcgcctccatcgacccgacgctgaaggccatcagcccgattcgcgacctgtccctgacccgcga

SEQ ID NO: 3955 - DNA, 13214 bp, Unknown
  R22_24m  MAG No. k141_28326
caggaaatggcgtatctggaaagaagcggaggaaaagctgctgcgtgagtgcggcgttgatgaagcgaccattgagcagatacgcatggcggacagggcagacttcaattccaacaggcggttttaccgatggacgaatgagcatggacaccctgaaaacccgagatctgctgcgccgcgtcgacgtcataggcctgaggcttggggagtcctccgacgccatcctcgacgggctcgtcaaacgcgggctgtgactcactggaataccgcaaagggaaaggcgcgaatatgcgcaggaaactgattcttgatttggatacgggcatcgacggcgcgctggcgatcggatctatcttctcgcgtcacagacagtgggccatatacaacggcaacttgatgcgttctccatccacttcgagttggcggggatgcagaacgtattccttgcccaatcgttgggcataccttttgcggaatttgtcgagcgaagatacgccgtatcgtttcgtggatttcacttcaatcgggctgatgcgaggcttcatcgcggcattatcgtattcccgaacgatgaggaagtctatttccatggttttcgtggcatccgccctatccgagcgcgagaagaaatacagtttgcgcccattcgcccggaattgctgagccaccgcattctccaccagcatcccttcgttgagcgagagtttatcgaacagaatatcccggtacacatcatccggcgttgtctctcgatcggcaaacgcctgcgacaccagcaaaccggtatccgccatatagcatttgaatgaatcgttatcttcgtacaatcccagccccaccaaagggtcagtcgaattacggcacaggttcaccaagcgggcgtcttccaaccagaagaacgccgaatcgtattcacgagatcgagcatccttgtcgaccgatgccagagtgaatcgtttctcatgcttggacagctgccctggaatctgagcgaaaatgccccgcacgcggccggcatcgccattggcgaacttgccgatatcatcactgtacagctgcaggatgccacgcttgatcaaatccacatcgccaaaatcgcgctgctcgacataatcggcaaccgcctgcggcataccgcccaccagcagatattcgcgccacagcctcatcgctcgtttgtgcagcgcatcgggcaacgggaccagacgctcgaacgatttgcgaatcgtttcagcaagcagctcctcccccatggcccagcagaactcctcaaaatcgagcggccccatgtccattttccgttcctcggaggggatgacgatattcgccacattcctcttgatggagatcagcgaaccagtttccacatagtcataccggccatccgcaaccagatatttgatgagctccctcgccgccggataccgctgcacctcgtcgaaaataatcaacgattcacgctcgtacagtcgcttgcggtaatacgcagacaacagcatgaaaaatgtgtcaaagtcatcacgctggttttcgaagatgtcgcgaacgtcgcgcggcaaacgtgtgaaatcgatgagaatatatgacttgtactgagtgcggccgaattcctcgacaatggtgcttttgcccacacggcgagcgccttcgatgagaagagcctcacgcccacccgctttttgtttccatgcgatcagcttatccagcatcttgcgcttcaacatgagcaatcacctcattacacgaaaacaacagtatgggcatatgctattctacacgaaaacagaagtatagaggtagccgattctacacgaaaacaacggtataaggacgcaagccgaaccggctcacccccaatctctcccccatcacaccggcggcctgttcgattgtgcggttttgtgcgaatggctcacacggttcttagtgagaaccgttctctgcgcacctgaccctagaaccggatcagcgccttgatgaccttgcgctggtccatcgcctcgtaggcgtcctggatatggtcgaggtcgtactcggcggtgaacacgcgaccggggttgatttcgcccttgagcaccgcatccagcagaccgtcatcgaggtcatagtggcgcacgggagccgggccgcccttgatgccgatgttgccgtagaacgtgccttcggcgctgatctccacgtcgtgcggcaggcccacacgaccaatcacgccaccgcggcgaatcaggccaatcgccgtgtcgaaggactgcttggagcccacgcattcgagaactgcgtccgcaccatagccaccggtcatctccagtaccttgtcaatagcctcttggccacgctcgggcacgatatcagtcgcaccgaattcgcgggcgagcgccgcgcgatcctcgtgacggctcatggcaataacgcgcgtggcaccgcgcatcttggcggcaatcacaccgcacaggccaactgcgccatcgcccatgaccacggcggcgtcaccgggcttgacctcggcagaaaccgccgcgtgataaccggtggacatcacatcggaaacggtcagcagcgaagcgagcgtcgcgtcatcgtagtcttccggcgaaccgggcaccttgaccacggtgccgtccgcctcgggcacacgcaggtattcggcctgacaagcggagaagtagccgccgtgcgggcacacggattcgaagccggccttacataccgggcacttgccgcagctgtatgggaatggcacgaccacgaaatcgccgggcttgacggattcgaccgccgcgccaacctcttcgaccacaccgatggactcgtgacccacctggctgtgcgcggcctgtccgctcagcccacgaaagaaccacaaatcagagccgcacacgcacgtgcgcaccacgcggatcacgatgtcatcatcctgttcaagcgtcgccttcggcacttcttccacggtcatcttgccaggctccacgaaaatcgcagctttcatggtttcagacatacgttcataactccttgttttccggcatcgagcgcttaagagccgttatcctcgtgttctattaaacaataatcgccttgcattaaccaataagccataaaccatgtttcgccatacccatgaggtatggcaacaaccgagcaattcactgcgataggccaatatccgagatacgctcactgttcgattcgtcgccatgagtaatctggagaaccggcgatgggacccgcctgaacttgtttcgaaccgcacactgctgatagttcctacacacgatttgacattgcatggaatcgttgtgtcttcagcaggattcagcggtttcaggaaaggctactatgggctcgcaatccccatccgcagatgcccggccgggcacgcgcacggccactcccccggcgcgcaagctccccgatatccatcttgatattgtgttggtcgtcttctgcggcggtgccatcggcaccgcgattcgctatgcgttcgcgcagattcccgcagccggcagcttccataccggcacgtttgtggccaacatgctggcctgcttctgctatgcgggtctgaccgcctatttggccggctcttcccggttcgacacgcgtgccaaggagctcaccagccgtgggctcggcatgggcgtatgcggcggtttgtctacgatgtcgacgttggcattggaaggcttcaccgcgattcgcgacggtcaggtggcggccggcattgcctatctactggtgacgttcgcgctgggtctggtttgtgcgtctgccggcgtgtgggcaggaacgcatctggccggctcctcgaacgcatccgccgaagcgtccgctgatacgaatgccgctacgaccagcaagggaggtaaggcgtgatgaccgtattcctaccaatcttggtctgcctgtgcggcggcgtaggcgcctcctgccgctatctgcttgacgcgaccatcaaaacgtattggcaacgcgcattcccgctgtccacattcaccatcaatctcatcgccggattcctgaccggtctggttgcggcgctggcactgggcgggacacttgatgaaccgtggcggctggtgctggccaccggtttcctcggcggattctccacgttctcgaccgcgatcaacgaaatggtgacgctcttccacaaacgccgctaccccacggcaacggcctatctggtgctgtcgctgggtgtgccggtcgttgctgcggcctgcggttttctcgtctgaccgccacgacgattcccgacgcggtcagcggtatcatcgcgaggtcgaacgtcacaggtacatccgggaggtatatgggcatggcgaacaatggagcggatgtgaagcacaatcagggcgcggacgtcacgaacgcctcggccacgacgaacactgcggaaaataccgtgggcacggcaaccccgaagcaaaatggactcgccgtgttgggcaagtatatgggtgtttccgccacgcagaccattgtggagtatgcgacgttcgccatcctgcacttgatcggcgtgccctcgcagatctccaacggtatcgccgtggtgtgttcggcgacctacaacttcgtgatgaaccgcaacgtgacgttcaaatcgtcaagcaacttcacccgttccgtgatgcttttcgtgctgctgtggatctggaacttcacgttcagcacactgctgatcggctggatgccgggcgcgacggacctgagcccgtatgtggtgaagttcattgcgatggcctgccagttcggctggggttatccgttgtgcaagtacgtgatttttaggtgacacattccaattgctcactgtcgttcgccttcgcctatttgtatttggagcgcttatcagaagaacagcatcgcaacacctgcggcgaagcacatgagcagaatcgatgtcaggaagctggcgagcatcggcttcttgcccttggaagcgatggccttgaagttcacgttgatgccgagcgcggccatggccatgccgagcacgatgtacgcaaagtccacgagctgcggggtgatggaggcgatgagcggcacgaaggtgccgatgatcgaagcgccgatgaagccgagcatgaaccacgggaaggccacagtcttcttgccggtgttctccacctcggagtgcttcttctcccaccagatagcgatgatgatggccgcgaacacgagcatgagcacgcgggaaagcttcatgatggtggcgatgtccaccgcgccgaaagcgtcgccggcggcgaccgcgtgggcgatttcgtgcagggaagcaccggcggtgatgcccagctggtccttggtcatgccggccagcgggccgagcgcgatctccagcaacgcgaacacagtacccataatggctacgatggccacggccatggtcacgtcgttgtccttctcgtcctgcttgtcctcaggcaccttgatggaaccggctaggcccatgacggcggccgcaccgcagatgccggtgccaccggcggtcaggatggcgagcatcgggtcgacaccgagcttgcgggcgatggcatagcacacgatgatggtcagcgtgacgaccacagctgcgatcggcagacacttgatgccctgcgtgaacagcacggcgaggttgagcttgaaaccgagcaggatgatgccgaggcgcagcagcttgttggaaatcaggccagcggcgtccttgacgcctgccttgcggccatcattggaaccgacgtaggcactgcggatcgggaactggatgatcataccgatgagcagcgcgatgataagcgcgccgaacaggctgaatccggggaactgcttgagccaggaggcgaacagcgaggccagcagagtcagaacgccaatgaacaacatgtcaacggtggtaatgcgcttccaccattttgtacagaactctctcacggtgtctattgaagctcaagcatttacatcggtcaaatcattgcaaccaatacatatcatcgattttgtcgatacctaattgatctccctctggtgagggaggtggccgccgcaggcggacggagagagagaaacaacgttcgcgacctcccctcagtcgactatctgactacccgcgcagcgcagcaataatcatctccgccaactcccgctgatcgtgcgtcagaccggatctcggcaccagcgcatagaaccgccgcacaaactcatcgccaagctcccgctgcaccggcacgcccgccggcacggcggcttccgaaatcaacgactgcccgaacccggcggacagcgccgccacaatcgccgcattactggacacttccatcgtgcgtgcaggcacaacctgagcggtcttgaaatacaaatccgtgtaataccgcacgccggaaccgtgctcgcgcaccatccacacgccgtcgggctcccccgccaacaccagccggtcctcgcacagggtgacgcggtccaccgaatcgttcacgatcggcttttccaccacgccgagctgcacggccttcatgctgacccgttcgagaatcgcatccgagttcatcacgtgtacggcgaagtcgaaactgtccatgttccgagccatcaccggcaacgccttcggcagcagaatcgccgcggtcgtgtgcgagaacgaaacggccagcggctcacgcgcctcctgcacgcgggcgatctgctcacgcgtatcccgccataatccgtcgatgccgatggcggtctggtacagcatccgcccggcctgtgtgggcgtcacgtcgcttttcgcattgcgcacgaacagcggcgcgccgaccatctgctccaattgggcgatacgcgacgacaccgtcgactgcgacaccttcagttcgtcggcagccagcgtgaactggcccacctcgtatacggcgaccagggtttcgagcagagggaacatggtttaactgtacgctgtatgatgcacgaatatttcaattagcttgggcgtagccctgggccacggacctggaccaccctcagtctcgctttgcgagccagctcccgccagcgggactccaatggttttcatatcactatgcttcgcgcagttttgcgagctgtgttttggccttgtggagcttggcatagatttcattgcgctgaacaggattcttgacgcgctgatggtcgcgggtgagcttgtccacttcggattcgagccgagcaatttcagtatggcgaatgatgcgcgcatccagattttcgatctccggcgtgcccagaatggtctgtgagcacagcgaggcccacagctcatcaatagtagagccggccagctccagctgggcctcccccgccggctgccaatcgccggcatatacccgatagatcggcgtgtggccggcacgccccggtatcgcccgacgcacggcgaacgcacattcctcacgtgtgctgccctcgaacggcacgtcgcgtacgcacacgaacacgatgcccgatttacgctgcccggcaatcaaatcgatgacctcgttcggtatgccagtggctttggccgtaagcttcagtccgatgaccaacacttccggaaccagtttgccgtccgcaagcccagtgttaatcgaccggaccaacgccagcatggtaatggattcgatttcgttcaccaatcgctgcttgagtttgcctgaaatcggtgccttgcccacgaacaaggctttcggcagtgtgcctttggcttcgggaatcgccgtggagacgggcagtcccagtgaaagcgcggatacggaaccacagtgtgcggcttgcgaaccagtcatcatcgaccttctttcccggcctgccatcagtgtcataccctcgcagtgcagcagtccgtttatctattggaaagcaacactagcgcatccaggccggaagtcgtggtacatatccatatcctgctgcggttataggaaatcccctccgagtttcctcgaaggggatttcttaagtcgctagttcaagcgaagattcttgtctgatgataatcaggcgaggatcttggtcacacgaccggagccaacggtgtggccgccttcacgcacagcgaaggtcaggccctcctccatggcgatgggctgaatcagctcaacggtgaaggtggcgtggtcgccgggctgaaccatctcgacgccttccggcagctcgatgacgccggtgacgtcggtggtgcggaagtagaactgcggacggtagttggagaagaacggcgagtgacggccgccttcgtccttggtcagcacgtagacttcgccctcgaacttggtgtgcggggtgacggagcccggcttggccacgacctggccacgctcgacatcctcacggccgaggccacgcagcagcagaccggtgttgtcgccagcctcgcaggcgtccatggtcttgtggaaggtctcgatggaggtgacggtggtctgctgggtcggacggataccaacgatctcgaccggggtgttgacggccagctggccacgctcgacacgaccggtgacgacagtaccacggccggagatggtgaagacgtcctcgatcggcatcaggaacggcttgtccaggtcgtgaaccggggtcgggatgtagtcatcgacggcggccatgaggtccttgacggactggacccacttctcgtggtccggagcgtcgtcgtgcagggcgccgtaggcggaggtgtggatgaccgggcagtcgcgatcgaagccgttctcgtcgaggaggtcacggacctcttcttcgacgagctcgatgagctcttcatcgtcgaccatgtcgcacttgttgagggcgacgaggatcttcgggacgccgacctgacgggcgagcagcacgtgctcgcgagtctgggccatcgggccgtcggtggcggccacaacgaggatggcgccatccatctgggcggcaccggtgatcatgttcttcacgaagtcggcgtggcccgggcagtcgacgtgagcgtagtgacgcttctcggtctggtactcgatgtgggcgatgttgatggtgataccgcgggcggcctcttccggagcggaatcgatctggttgaagtcgtactccgggttgacatccgggaactcctcgtgcagcaccttggagatggcggcagtcagggtagtcttaccgtggtcgacgtggccgatggtaccgatgttaacgtgcggcttagtacgctcgtacttttcctttgccattacttttgtcctcctggacgtctcgtgagtttcctgcgccctttcgcacagggactcgcttattctactgggtttctgggttatgtgccactttgaagagccagaacccagtcagcggtatacgatattaccgctgactggagacaccggccacttcatgatgtggcgcgtgtcactcgccgcgctgggccttgatgatctcctcggagacgctcttcggcacctcgtcgtaggagtccatctccatggtgaacatggcgcggccctgggtcttggaacgcaggtcgccgatgtagccgaacatctcggacagcgggaccttggcgtcgatgaccttgacgccgacaccgtcggtcatggactggatgttgccacggcgctggttcagatcgccgatgacttcgcccatgtactcttccggcgtacggacttcgaccttcatgatcggttcgagaatgaccggcttggccttcggggcagcttccttgaagcacatggaacctgcgagcttgaaggccatttcggaggaatcgaccgggtgcatctggccgtcggtgacggtggccttgacgcccacgaccgggaagccggcgagaacaccggactccatggcctccttgacaccggcctcgatggggccgatgaattcggcggagatgtggccgccggtgaccttgttctcgaactcgaaggtcttgccctcggtggtgtcgagcggctcgaagttcatcaggacctttgcgaactggccggaaccaccggtctgcttcttgtgggtgtagccctggtccatgacggccttgcggatggtctcgcggtaggcgacctgcggcttgccctggttgcactcgaccttgaattcacgacgcatacggtcgacgatgatgtcgagctggagctcgcccatgccggcgatcagggtctggccggactcttcgtcggtcgtgacctggaaggtcggatcctcttcggccagcttggacagggcgatgcccatcttctcctgatcggccttggtcttcggctcgacggccacctggatcaccggatccgggaaggtcatggagtcgagggtgatcgggtcgttgatggagcacagggtgtcaccggtggtgacgttcttcaggcccacgaaggtgtagatgttaccggcgtcggcgcggtccatcgggttttccttatcggcgtgcatctggaagatcttgccgatgcgttccttcttctcgcgggtggagtcgagcacggagtcgcccggcacgacggagccggagtagacgcgcacgaacacgagcttgccgtagaacgggtgggtggagatcttgaagaccagagccgagaacggatcggtcttgaccgggtgacggtcgatctcgacggactcgtcgccgggcttgtagcccttgatggccggcacatcctcgggggacggcaggtagtcgacgacaccgtccagcatcggctgaacgcccttgtccttgaaggcggagccgcagaagaccgggaaggcttccttggcgatggtgagcttgcgcacgccggcgcggatgtcttccttggacaggtcgccgtcctcgaagaacttgttcatgagttcgtcgtcggcttcggcggcggcttccacgagcttctcgtggtactcctgggccttgtccttgagatcgtccgggatctcggtggtgtcgtacttggcgccgagctcctcggtgccgttccacacgtaggcctgcatctcgaccaggtcgacgacgccggtgaagtcgttctcggaaccgatcggcagctgcatcacgatcggagtagcgcccagcttctccttgatggtgtcgacggagtagtagaagttcgcgccgagcttgtccatcttgttgatgaagcagatacgcggaacgccgtacttatcggcctgacgccacacggtctcggactgcggctccacgccttccttgccgtcgaacacggcaacggcaccatcgagcacacgcagggagcgctccacctcggccgtgaagtccacgtggccaggggtatcgatgatgttgatctggaacttgtccttggtgtcgtgggactgacggctccagaagcaggtggtagcagcggactggatggtgataccacgttcctgctcctgcgccatgaagtccatggtggaggcgccgtcgtgggtctcgccgatcttgtagttcttaccggtgtagaacagaatacgctcggtagtggtggtcttgccggcatcgatgtgggccatgatgccgatattgcggacgtcgtggaggtccgaaatctcttcagccatctttttccttagttttactcagggcgagtgattaccagcggtaatgagcgaaggccttgttagcctccgccatcttatgagtatcctcgcggcgcttgacagaagcaccgaggccgttggaggcatccaggatctcgttggcgagacgctcggccatggtcttctcacgacgggcgcgggagaagtcggtcagccagcgcagcgacagggtgttggcgcggttcggcttgacctcgaccggcacctggtaggtggcgccaccgacacggcgggagcgaacctcgagggacggacggatgttgtccagggcgcgcttgagcacagccaccggttcctggtcggacttctccttgaccatatcgagcgcggagtagacgatgtcttcggcgatcgacttcttgccgtcaagcagaatcttgttgatgagctgcgccaccacggtggaaccgtagatcggatcgggcagcacgacgtgcttcttggaaggtcccttacgtgacatatctcttacttcgccttctttgctccatacagggaacgaccctgcttacggtccttgacaccctgggtatcgagcgcgccacgcacgatgtggtaacgcacacccgggagatccttcacacggccgccgcgcacgagcacgatggagtgctcctgcagattgtggccttcgcccggaatgtaggcggtgacttcgatgcccgaggacaggcgcacacgagcaaccttacgcagagccgagttcggcttcttcggggtggtggtgtagacacgggtgcacacgccgcgacgcagcgggctgcccttcagggccaaagtcttggacttcttcggctttgcctgacgtcccttacggacgagctgttcaatagtaggcaacttgaattctccgattcagtggtttctcttgcttttgtgtgaccgccgcactgcgcccacacttttcagcacactcgcttggcatccgcctgttggcgacacccgacgaatcggaaaagatagcccagtccaccggcccgatggccttcgcccctcccgtcggcgcattactacgtgcgatcagcggtttgaaggatatcccagcatgctcgcctgttacataaggcgtgctgctggcacacacgaatatctatactacgattccgccggacaacgacgcgccgggcctcgactcactggtttggggacctcctgcgccctgtacttctcccctccccccaacgcaacaatcccgggaatgcgtcgcacaacacacgcacacacgccctcccaacgcaatattcccgggaatgcgtcgcgaaaaagcgaacgccacacagcaggtgcccccgcggagactatgtcacacgggggcaccgccaaggaggttacattatgtttcttttcaccacatgccgcttctgtgttatctgtttccagcacaccctcgtgctcttccatatccgatgggaacctctagcgacccggcctctttgccgtatcaccttgccgctttctgcattactaattatagcaaaaccaccctcgcgaaacgcccgatacatcaatcgggagtaagcgggagcggctatgttatgcgaggtaggaaaggtgagtgaccgactgactggagtcgtgccttacccgacctttctcaccatctcaggatttcaggcagcgaccttggcggccttgtcggcgtcgaacgggtgggccacggaaacggtgctcttggcggagcccttctcgccgttgtc

SEQ ID NO: 3956 - DNA, 30196 bp, Unknown
  R22_24m  MAG No. k141_28330
cgtggacaaccatcgcgtgttcgccgaaacgctggaaccgatgctcaccactgtggaactgccgcatttcgagatgggctactgggccgtggccaagctggtgtcaattatcgaaggacgctcgatggacgacgtctcacggccagcgaccaccgctcccctgccgccgatcgacgcgccgattccggcgaagatccactgcacgctgatcgaaaaggcctcggtgaagtaaccgaggcccacacgatttctcaaggcctccgtccagcacggaggcctttttgcatgtcgaacaggtacgacacgccgatgacgtcacgacatccgccggactgatacgatgcccgcatcgtcacagcgacgcacggcgaccgggaggtgcatggtgagaacatacgagaacgcgcaggagctcaaagaggagatcagtgcggcgttccgcaaatacattgcggagttcgacgatattccggaagccctgaaagacaagcgcatcgacgaggtcgagaggaccccggcggaaaacctcgcctatcaggtcggttggaccaccctgctgctgcagtgggaggatcgcgagcggaggggccttccggtgcgaacgccgtcggatgagttcaagtggaaccagctcggaaagctgtaccggtggttcaacgacacctacgcccacctttcgctgcgggagctggagggcatgttgaccgacaacgtcgacgccatatatatgatgatcgatgcgatgagcgaggacgagctgttcaagccgcatatgaggcaatgggccgacgacgccaccaaaacggcggtatgggaagtgtacaggttcattcatgtgaacaccgtcgccccgttcggatcgttcaggacgaagatccgcaagtggaagcggatggccctataggttcggcgcggcccgcaacccctttgtccagttcgtctacgccccgatgatcaacgccggaggcgtcacccgctgggctggtgccctgattggctccatcgtcctgtccgccggcttcatggcagcctgctccctgtccgaggctgtcaccgaacgctactcccgtaagttcaacttcgaatacggccagtcccgcgcctggggctccttcagctacgccatcgtggccctgtgcgccgacttcctgttcaacatcagcccgatgatcaacttctggatcggcaccgcctgcggcgtcggcatgctgctcatctacctgttctgggttccggccgagcagaaggaagaactcaagaaggaagccgatccgaacgccgagaagaccaacccctccttcaaggagatggtcggcgtgctcaagatgccgaccctgtgggtgctcatcgtcttcatgctcctgaccaacaccttctacaccgacaagcagctgcgtcagatggaagctgccaaggcctgaaaggacacaccatgactgacttcactcccgaaacccctgttctcacccccatccgcgaccacgctgctgaactggcaaaagccgaagccggcgtggccgagatggccgccaagcgcaacaaccgctggtacccgaagttccacatcgcatccaacggcggttggatcaacgatccgaacggcctgtgcttctataagggccgctggcacgtgttctaccagctgcacccgtacggcacccagtggggtccgatgcactggggacacgtctcctccaccgacatgctcaactggaagcgtgagccaatcatgttcgccccgacccttgaagaggagaaggacggcgtattctccggttccgcagtaatcggcgacgatggcaagctcaagttctactacaccggccaccgttgggccaacggccacgacaacaccggcggcgactggcaggtgcagatgctcgcgctgccggacaatgacgagctcacctccgccaccaagcgcggcatgatcatcgactgcccgaccgacaaggtggatcaccactaccgcgacccgaaggtctggaagaccggcgacacctggtacatgaccttcggtgtctcctctgaggacaagcgcggccagatgtggctgttctcctccaaggacatggtccgctgggaatacgagcacgtgctcttccagcacccggatccggatgtgttcatgctcgaatgccccgacttcttccccatcaaagacaaggacggcaacgagaagtgggtcattggcttctccgccatggggtccaagcccagcggcttcatgaaccgcaacgtcaacaacgccggctacatgatcggcacgtgggagccgggcggcgaattcaagccggaaaccgagttccgcctgtgggattgcggccacaactactacgccccacagtccttcaacgtggacggccgtcagatcgtctatggctggatgagcccgttcgtgcagccgattcccatggaggatgacggctggtgtggtcagctcaccctgccgcgcgagatcacccttgacgatgacggcgacgtggtcaccgcgccggtcgccgaaatggaaggcctgcgcgaggataccctcgaccatggttcgatcacactcgatatggatggcgagcaggtcatcgccgatgacgccgaggccgtggaaatcgaaatgaccatcgacttggccgcctccactgccgagcgtgcgggcctgaagattcatgccactaaggacggtgcctacacctacgtggcttatgacgaccagatcggccgcgtggtggtggatcgtcaggccatggccaacggcgatcgcggctaccgcgccgccccactgaccgacaccgaactggcctccggcaagctggacctgcgcgtgttcgtggatcgcggctccgtggaggtctacgtcaacggtggccaccaggtgctgagctcctactcctacgcctccgaaggcccgcgcgccatcaagctcgccgccgagtccggtagtctcaaggtggattccctgaagctccaccacatgaagtccatcggactggagtagctctctcacctccctcacagagggaggttttttgtgtgcccctgtcgttcgccttcgcctatactgatggacggcatataacacaatccatcacacgaccggcaggcgcgcaggctcctcaccttactgttccacgccccggccgcaagcgccaccagcaaaccggactggcgcggaaagcaaggtgacatcccatgtccatcgccaagcgcctcaagcgccgcatgcccaccgtcatcgccgtcatcgtattgctggcagtctgggaaacgtgggtggatctaggacatgtctcccccacgatgatctccgcgccaagcgagattttcgccgccaccatcgaaacgtggaacacgctcggcccggccgcggcgatcaccggctatgagggcgtggtcggcttcctgttcgccgtgttcttcggcattatgatcggcatcgcactgtactgctcacacacgttcaacgcggcgttctatccgctgcttgccgccgcacaaaccatgccgctgatttccatcgccccgttgttcctgatttggttcggctttgagatttccggcaaaatcgtaatcgtggcggtattcggcctcttccccatcgccgtgcagaccgtgcgcggactagaagcggtgccccagttctattccgacgtcgcattgacctgcggcgcgaccccggtctggacgctctggcacgtgaagctgcgcgttgccgcacgtcagatctatggcggtatccgcgtatctgccgcatacatcttcgccacggcatccaccgctgaatatcttggcgcgcgcaagggcctcggcatctggctgcaggctgcctacaattcgttccgcacgccactgatcttctccgccaccatcgtcattatcctgatgacatgcgtactgatgctggcggtgaacgccagcgagcgcatcctgctcggcccggccggcgatgacgaagaccccgacgcggaccagtagttctttttaccgtcaaagacacaagccggcggccagaaccgactgaacggggcggcttctcatgaggtctccagccctgtctctataatggaacagctttaccagcgtgtggcaaaccggctttcttgagctttcatagggaatgtcgggggcgctggtcgaacggaaatcaaggccctccatatcgttttctgccgacttccgttcgaagcaatcccagagaacgatagagagacaacgaattagggaaccatcattatgaagaaaagccttgtatccaaggccgctgccctcgtaggcgcccttgctatgactttcggtttcgccgcatgtggtcagaccaacaccgccgactcctccaactccaacacctccgacctcaagaaggtcactttcatgctttcctgggcgcccgataccaaccacatcggcgtgtacgtggccaagaacaagggctacttcaaggacgccggtcttgacgtggatatcgtggccgtggcccaggccggtgccgaacaggccgtgaacaacggtgtggccgacttcgccctgtccaacttgaccaatgtgggcatctacacgctgaagggcgctcacatcaagcaggtgctgcaggtgcagcagaagccgagcgccatttggtgcgcactggcgtccaacaccgccatcaagtcccctaaggacttggatggcaagaccttcgccaccttcggctccaacgagtccgacgccgtggtgcgccgcatgatccagaccgacggcggcaagggcgagttcgacaaggtgaccgtcggcacctccaccttccagaccatggaatccggcaaggccgatttcggcggcttctacgccacgtgggaaggcgtgcaggccgacatgtacggcccgaagctcaactgcttcaccgagcctgactacggcgtgcccggcaacgccgacgccatcggcatcatcaccaatgacaagaccatcaagaacaatcccgacctggtcaagaagttcactcaggccactcagaagggttacgagtacgcgtacgccaacccggatgacgccgcgcagattctcgtggacgaagcccctgacgccaacctcaagcccgaattcgtcaagaagagcatgcaggttatcgtcgacggccagtactggggcgatccggccaagatcaaggacggctctttcatgctcggcaccaacgacttcaagggcactcaggaatacttcgacttcctggctgaagaagacgcctacactgacagtcatgacaaggtgattcatgaggccccgcaggccaaggaccttggcaccgacgaattcctcggcaagtaatttccgatattccgagtttgaatctacgcaaaaatgcgtccttcccatgaggaaaggacgcatttttgcgtatcggccgataaggttattcatagcgaatcatgctaacaaggaggcgattccatggcccaacgtcctgaccgcattattgccagcatggataccggtgttgatgatgcgttggcgttggcgtatttgttggggtcggcggatgagtgcgagctgagcggtgtgatcgccagttatggcaatgtggatgcgaacacggcttatgccaatacttgcgcggtgcttgatttgtttggccgggcggatattccggtgtttttgggctccgagcatccttcttgggctgatgcgtttattcccgatgcagggtgtgcccagtttcatgggaaggatggactggggaatacttggctggcaggggccggggctctggctgatggagctggtgtgcctggtgatgatatgtctggggatgacatgtctgaggatgtgcccgatggggttgtttctgttggcgggtatttggtaggggacgctcatgctcatccggcgtcggggtcttgttctcgtgtgggtcgctctcggcctgtggaccgtccccagtcggctacatcgacagctctcgccagctggggcaaaaggaggcgctccgttgatgctgcggatgggattgagtatctgattgagcaggttcgtgagtttggccgagacgttaccgtgctggctaccgggccgttgacggatgtggatgcggctattactcgggcaccggatattgcgtcgaaactcaggctggtgatgatgggcggtacgcttacccaacccggcaattgttgggatgcggtggccgagacgaatatcatccaagaccctgaggccgcgaatcgtgtatttcattccggcgcagacatcacaatggtgggacttgatgtgactcaccagtgtttgctaccgcgatcggcggccgaccagtggcgtgcgacggggaccaagcgcgggcggttcttggctgatctcgcggacttttccatcaaggcaaatttggaagccgaccccgcactgttctctggcggcatgccgttgcatgatccgttggcggcggcggttgcacttgattcttcactggtcgattgttttgatcttgcgttgcgcgcggagaccaataccggtgatttcaatggagtacgaggccggaccaccggagacccggttgggctggtgaatcattccatgccgcatgtgcatgtggcacttggtgcggattcgggacgttttttggatgagtttgcagagaggatggctgaggtgtgccggtaactcccctcagtccgctacacggacagctcgaccgcaattacggacaagctgccgctcgcattcttctggctcgactctcgtctcgccttcgcctacaaacagcccatcgggctgtttgttttacggctcagccccctcaattttgaggggcttaacaaggactatttcacacccccagcaatcaaggaccggcttcgccggactcatcattacctggtcatgtcctatcggcctcggccaggcggcgtgaacgaacagtccataggactgttctttatttcacgccgccaaatcggcgatcgcggtggatgtaatggtcgatggagcgccatagcacgtcacggccgcagtccgggaagagttcgggcacgaagtcgagctcggcgtaggcggcctcccacggcaggaagttggaggtgcgctgttcgccggaagtacggatcaccaagtcgcaatcgggaacgtccggattgtacagatggtcggcaatcatcttttcagtcacacggtcgccggaaatcttgccatcacgcacttcgcgagcgatggcggcgcaggcgtcggcgatttcagcacggccaccatagttgatgcagaacaccacatcgatgaccttgttgttcttggtacgctcctcggcggcctcaagctcgtcgatcaccgacttccacagcttggggcgacggccggaccaacgcacgcgcacaccccactcgtccatctgttccacgcggcggtggatgatttcacgcgagaagcccatgaggaagcgcacttcctggggcgaacgcttccagttttcagtggagaacgtgtacaggctcaaataccgcacaccggcttcgatggcaccggcgatagtgtcgaacaccaccggttcggcggcctgatgaccattggtgcggaccatgccgcgctgcttggcccaacgaccattaccgtccataatcacaccgatatggcggggtaccttgttcttggggaagtcgggaatacgggcagggtcgctgaacggagctgcgggaatgtccaacgacgtgtaatcaacgttctcaaaagccatactcatgaatctatcaagcgcagcgaacgaatcgggcgttcgaggtaatactccccccaatcttcaaccaactcctgcacaacccgctccacaggcgcggcatcaagcaccgaccaatcgccacgaatcagtgcatcgaactggtttaacacgaacggcgcgatacggcgcgcatcggtagtgtggtcggcttcgcacatcacgccgccggacgcgatggacaggtacgccggctccgccttgccgcataccacgcaagtacccaatcgtggcgtccaaccggccaaggccaaggcgcgcatcacataggagtcgcctatggcttgcggggcgtgggattgtttggcgagcgcgttcaacgcgccgatgagcagccgatattggttcgtcagctgctcgtgttcggtgctggcgagtttatcgatggtctcgacgatgacgttggcggcctcatacgccgcataatccgccgcgatcggagcaccgtaagcggcgaccgcttcagcctgggagaccacgtcaagcgagcggccttcagcgataagcacatcgactcgcatgaacggctcgagcctggcaccaaagcgtgatttggtgcgacgcacgcctttggcgaccgcccgaatcttgccatgcccacgcgtcaggatggtgatgatacgatcggcttcgcccagtttggaggtgcgcaacaccacaccttcgtctcggtacagcgacatctcatctcctttccccgcgacgcccggcagactctactcaatgaagtagtcagtaaataaacaggccccagaaggcgaacaccaacagtatgtacagcatggtgaaggccaccagccagaacaggactcggcccagacgggtggaggcgagtaccgggtcggcaccggtgacgatgtctcgaacggattcacgacgagggggtatctgaatcagtccgcgggcggaagcgacctctatcagatgcataaagacgcgggaccaagcccatagcaccagcacggacaccacttggatgaccggccagctccaatacatgacgcccggcgtctcggtaggagcgctgccccatgcaagtttgaccacacccataatcacctgtccaagtccggcaaagaagatgagcagcgtggcaagagtggtgagggtcaaagtcagcagcgcgttgccgaaaccatgtgcgaaaccgagtatcacaggccgttccggtatcagcatgcccgcacgtttggcctcgcgtttctcgcgccgccatcgggcatccgccgcgattttgcggcccagcgccaccagtgccagcacgatggatgcgagcagcagcagtaccaccgtgacgtgcaggatcacaccatatatggtgccgacgcgtcttgccttcaaagcgcccggcagaccgattgattggtacagattggtgccggccaccttttcgctggtctgcgtgagtccggcggaagtgccgacggcccaatcgatgagatcgtccacataggcgtccgcaaacggggtgcccgcttcggactcatcccccaaacgcagcacatggttggcgaccggatagctgcgcacggtcacgttccagttatcggctttgtgggcgttgtagagaatcgcacgcacgccgtcgacctgcgccgtcatcacgtcttttgaaccgtaagccacataggtgggtacggcgtaagcggcgggtttgagcgtggcgagatcggaattgttcagtccgaacaggccggtgtccgcgctgaacacgcgttggacgatggatcgatagccctcgttcgcgccgacaagagtgaagtcctgggtgacgaaaaatcccagtgattggcgtgggctgaacaccatcgggctcagaagaatctggaaggcgacgtccggatcgtcctcgagcagatatgaggagatccatgtcgattcggaggtggcatagatgccgaccttggcggcgtctacatcgctttgggctcgtaggtattcgatgacctgatcatatgccttggctgaggccggataatcgcggttgatgtcggtggtgctccagacgggtttgtcgagcactgcggtcacaaagccggccgaagccatatcggaggccacgtcgccaaaggagttgtcacaggtgccgtatccggcaccgtgcatgaacaccacgccggggcgcttgcctgatgcgttctgaggttcccgaatcaataccttgatggcttggacgccgtccgcattggccttgccccgatcaccaggctccttggtcagattgccgtcgctggtcatgttcagcgtgatgtatcgctcggtgacctcatacgtgcctttcgccggcagcgtttctccggacgggttatcgaaggtgacttcggtatcgtcggtgagcgtggccatcgactggccggtgggttcgatgttccaaggcaccgtggtcaggttggaaatggagaccagcacgccgatcaggataatgaagatgggcaggctgaccatcagccggtgggtgctggtccacggcttggatcgaacagtcaggcgatgctcttcttcttgcgacacgtgcgctattgtaatctgaccgcgatatttacgccgagggcctattcggccgaatcagtgaccgggatgctggattgggaccacgaccgggccggtggaattgacgggcacttggccgtcggcctccatttgggcggcgatatcgttcgctatggtgagcagcgtgtcgacgatctggtcttcgggcacggtcttgatgaccttgcccttgatgaagatctggcccttgccattgccggaggccacgccgaggtcggcttcgcgtgcctcgcccggaccgttgacgatgcagcccatgacggctacacggatcggcgcggtcacgtccttcaggccttcggtgacggcggatgcgagctggatcacatccacttgggcgcggccgcagctcgggcaggagatgatgtcgaacttgcgggggcgcaatcccatgtattccaggagtttgcaccccaccttgacctcttcgaccggcggcgcggaaagggacacgcgaatcgtgtcgccaatgccctcggccaagagcgcaccgaacgccaggcaggatttgatggtgccttgccaggcggggccggcctcggtaacgccgaggtgcaacggccaatcgcccttggatgcgagcagtcggtacgtttcgaccatggtgatgacgtcatggtgtttgacggagatcttgaaatcgtggaagccgacgtcctcgaacatgtgcgcttccttcaaggcggaggccaccagcgcttccggagtcgggccaccgtatttggcgtagagttccttgtccagcgagccggcgttcacgccgatacgcagcgagatgcccgcgtcggtggcggccttgcagatgtccgggccgacttcgtcgaacttacggatgttgccggggttcacacgcacggccgcgcagccggcgtcgatggcttggaacacgtatttggactggaagtggatatcggcgatgaccggaatcggcgatttgcggcagatttccggcagtgcgtcggcatcgtcctgactcggcacggccacgcgcacgatgtcgcagccggcggcggtcagttcggcgatctgctgcaacgtggcaggtacgttggccgtgagcgtgttggtcatcgactgcacggagatgggcgctcccccgcccaccggcaccgggcccaccatgatgcggcgggacttgcggcgcgggtgcaagggcgattcgctggtcaggtcgaccggatcaccggttttgcggaacggcttttcgatgggattttccgtattcaaggtattcatcattgcttgtttatcaggttgtcggcgcgtcggcgggcttcaagctcaagctggttcatttcctccacgtccgtgaacagcgggttaccacgaagctcggcgtccatctggtccagcacggctttgaccgtgtccacgatgccgaggtacggcagccgatgatcaagaaacgcatgcacggcctgttcattggctgcattgagcaccgccgtatgcttctcggaggcggccaggcagtggcgggccagttgcacggcggggaacgcctcatcgtccaacggctcaaaggtccaagttgcggcttgcgtccagtcgcacgcggcggccacattggtcatgcggtccggcgcggacaggcccagcgcgataggcagacgcatgtctggcggcgaagcctggcaaatcgtggcgccgtccacaaattcgaccatggaatggacgatggactgcgggtgcacggtcacgtcgatgcgttcaggcgacacattgaacaagcgggacgcctcgatgacttcgaggcccttgttcatcagtgtggaggagttgatggtgacaaccggccccatgttccacgtcggatgatgcagcgcctgctcgggagtgatgttctccatgtcgacacgtttccagccgcggaatgggccgccggaggcggtgaccacaagcttggcgacttcggcgtgggttccggagcgcagggattgccagatggcggaatgctcggaatcgaccgggttgatctggttctcgcgcacttgcgcgctgaacagcagatgaccgcccgcgactacggactccttgttagccaatgccagctgggaaccggccttgagcgccgcgatcgacggttcgaggccgatggagccggtgatgccgttcaatacgacattcgcaccggatccggccatggcgatgaccgaatccggaccgccggtcacgcggacaccttgtgcgccggcctgtgcgagagccgcttgcagtgctggaaccttggtctcatcaaacaccgcgacttcgggcacatggaactgtgcggcctgttgcgccagcagctcgatatgtgctccgcccgccgccagaccggtgacggtaaatcgttcagggtgacgcgagatgacgtcaagtccttgggtgccgatggatccggtggatccgagaatgatgacggtggagttggaggctatgctcacttttccttcttcgtatcgtcattgttcagtgtggggaacgacaggtcggggatatccgaatcgaagttaccgccaagcgggaacagcagcgggaacgaatcgttggaatcgtgcttatcctgtgacggctgagctgcttccgtgtcgtgggaggcggcaacgtattcagatgattccacagccggacgggagaccgtgctgtctgcaggctgactatcggatacgcgaaccggaatggagttcgtgttacgatccggcttgctggtgggagcaaaggagaccggcatggcagcggacgcagcctcgtcggcagtgctattcacaggttgcgctgccggggcggagggtgccggggatgaaaccgaacccggtacctcattcaatttcagcgcattcggtgtatcaaggctgggcatcttgggagcgaaggacggcgcatccaccgccggaagttcctgagaaaccgcagccatgtgggcgagagcggccagagaggaaccgtcctgtaccatatccacgggctgttccgcgaacaccgacggggtcgatgacggagctgcggattcgtatgacgactgtgccggagcaaacgagggggcgctgccagcggtcacaccggaaaccggtgcggacggggcactggcgggaggctcagccgcaacagctgcggtaggagccacggaaggcgtctcggagacgggcttcgccgcagactcgttggacgtatgcaccgggtatgctgcgggagcaaaggaaaccggctgttccgcattgatgttattggtgcttgtggaagcatcgaacgatgcaggagccggcgcataggcgatcggtgccgccgcggccggcgccgcgggagcaaccggagccggagcagtgaacaagctctgctcggcctgatgcagggcatcgaatgattcgtcatgagcaacggcagacggcgcaaaacgttcgtcagttgccgggcgctgcgttccggaagcgaacaatggcgagacgccgttcgcttgaacggtcacgttcgtggcggtctgggcaggagccgtgggctcgccggacacgaaatcggccacacgtgcataggattccaagcgactcagcaactgcacgcaggcgttcaggaagtaatcgacctgtcgctcgtcatagcctttcttgcccttgcgctgggtgaagatcacattgttgaccgtattcgcattgagatcggccaaagaccgtacatcgtcttcggtcacgccgtcaacgcccaatgcggccgccgccttgtccacaatctggtcgaccagacgatccacctgcttcttatcgtacgaaggctgcttgggcgctccggacttgaagcgttcgcgctcgtcacgctccgcatggttctggacttcgtgatacagcttctcggtcttcgccttccacgtcacacgcccatgctgtgcgatctcccatgtggtctgcttatcgaccacggcacgttccagacgtccaagcgcggcgtcaacctgtgcgatcacatagccgttcttgcgcaaatcaaaggacacgttctgaatgtcatgctgggtgagattcatgccctcgctgtcatacagagcatgggcgcgctccaagaaagcgtccacctgagcggggtcatacccccacttgcgcttgcccgcacgtgcgatgcccgacttgccgtccccttcacgaagttcctgcgccatcggctattcgacctcctgctggatataaacactctgccacaactttacgtgactattgagacgcatctgaccaagaagaccgaaattcacgattttgtagcagtactgccggtttccttctgcgcgcatctcactgagatttcagaaccccttgccgaagactgtcagggaatatcgtcacagcccatgtctgtggaatgaggggattgcacgaagtgatgaaaaatgaaagtgggcaatgagggactcgaacccccgacatccaccgtgtaaaggtggcgctctaaccaactgagctaattgcccgcaaatgacaacaatagcgtatggccggcactgcgcgacacgtggtgtcgcatacgcgtgccgtagcgctcaatcgcgatgacattcagtcacgcccagcagcactacgcagcacgcgacgccagtcaacacgcttaaagtcaagcgtattgattgaggcttatcagcggcccctgccgaatgcgcgcaggcggatgccgttccagtccgagctgacggtcagcggggtggcggcgttcataccggcggtctgtgcggcggactgcacggtggaggagctggcggcacccgggcggccgggcttgggagtcagtatccacagcgggccgtcattgcccagtaccgcgtaggcgtcaacgatcgtatcggacaattcgtcctcatcatcgccgtcgcgccaccatacgatgacgccgtccacagcggagtcgtagtcctcgtccacgagatcctcgcccgtgagctcttcaatctgggcacgaatggaatcgtccacatcgtcgtcccagagccactcctggacgatatcgccgggctcgaaaccaaattcttcagcgttctgtgatgccgtttgattcacaggggacacattagcaagtcttcgcgaacaaatgcgttaacgcggccgaaaatcgccgcattgtgggcagacccatgcgagtcgtctcaccagaaacaacgactggccgcgcgtgtcatgcctcgcaatgaggcaaatcgtcggtctgccccttgccaatggccaccaacgcctgatacgcctcgtccagcgtggcgaccttgacgtcgcgcagaccatccggcacgcggccggccaaatccgaacaattcgatgcgggagccaggaaccatgtggcgccatcgcgcttggcgccaagcatcttcagctctatgccgccgattctgccgactttgccgtccttgtctatggtgccggtgccggcgatggtcttgccgccgctctcgttggcgggggtgagtttgtcgatgagaccgagcgtgtacatcatgcctgcggacggtccgccgatgctgtccacgtgcatcgtcaccttgacgtgttgcaatgtactggcgtcaatgcccagttcgtccgcatgggctttggcatacgccagaccgacggcactggccgaatcctgggaaccggccatgtcctgttcgactttcttctgatactggtccgcactctggcccaccggtaccgtggcctcacgcggcatgacctccacctgcggattggcccaaccccagacggcctgcgcgttgatgatcgggtacccgggcacgccggacgcgttcaccgtggtcagcagcagcttgccggaatccttatacgtcgtcacgccggtaccggtgatgtcgataaccgcaccatcctcgaccttgcccagcacgtcttgggtgggtccgggcatctcgatgacgtacgggctgggcagcagcagaatcaccacaccaagcaacacggcgaatgcaccgacgaaatggcgtttcggacgagcggccgcataggcccgagcacggctgattccacgagataggcgcgaatcatgcttcacttcgaacgatggcatgcgcccatcccccgcttccgaatccgcagtcgggctcttctgctcctggacgaagtctggttcctgattcctgtggcgtgcaaacataccctacagtgtaagcggagggccgaaatcagccgaaaacgaacataaaccgaaaatattgctcggccacgagcgaacaggcccgggcagaccctacacttggggtaacacaccgcggcaaagaaggatacgcatggacgacaacgcgattcacgagtggctgatcaaatgcttcggccccattcagggcgagatggcctggcagcagatcagccagttgcctgaggagatccgtgaacagctgatgagtcaggaccccagccgactgcccaatccatccgaagtccagcagatgatggccgcgttcagcgccggcggactcaacacgatgggcgatatgcagcgcactgtcgaggaagggccgatcaacgtcaagctcgccaagtcgattgccttgcagcaggccaacgcctccggttccgcgtccagcgtgtccgccgtggatggcgaggcggctcgccgcgcgatgagtgaggcgaacctgtggctggataccgcctgcgagttcaatcccgcgcccggcgatccggatgtgctgacccgcgccggctgggtggaaggcaccatcgaccagtgggcgaagttcgcagctcctgtggccgagtcgatgaacgacgctttggcttcggtgatttcggagcgtcttggcggcgcgttcggcgatggcgagattgccggcatgttcgccggaccggtgccgattccgattcccgacggcatgaaagatccagcccagctgatgaagctgctgggcaacacgtcctttgccatgcagttggggcatgcggccggcaatctgagccatgaagtgcatggcagtttcgatcagggcatcgcattgctgaagaatccggctggtggactgattgcccagaacgccaccgaatacgcgaggatgctgaacggtgaggcttctgcggccaaggccgacacggccggcacctcggtggacgcgaccaatccgttctccgcctccaccgacgcttccgccaatcccattggcttcacttcggccggcaacagcgatactccggcaactgacggtaccgcccaagtctccggctccgatgcttccgccgacgccgccgcgttcgaggctgcgctctccggattcgagaccaccgagaaaattcccgaatctgaagtgctttccttcctggccctgcaggaaatggctcacgcccgcctgtatgcctcggtaccgtggctgatgccgcgtttcgaggcgctcatcggcaagtacgcacgcggcatctccatcgatctggatgcgatggaggaacagctgcgtgacgccacgtcgatggatccggagtcgatttccggcgcggtgaatctcaccaaggtcggcatccccgacactcccgaacagcgcgaggcgctggcttcgctggaatcgctgctggcgatggtcgagggctgggtggattgcgtggtgtggcgcgccggtatggcccatctgcctcatatcgaacagttgcgtgagatgatgcgccgcgagcgcgcgatgggtggccccgccgagcgtacgttcgaaagtctgctcggtttgcagctgcgccccaagcgcatgcgcgaggccgccggattgtgggagatgatcaccgccgccgaaggccctgaaggccgtgacgccaagtggtcgcatcccgatctgctgccttcgctgcctagcgacaagcccgcagatggcgcgtctccgtcatccgacgccccttcaggctcctcttccgatgccaacggttccgcctcccaccctgccgcagatggcaagaccggcgatatcgattgggatgccgaactgtccaagcttctcggcgaagacggagaagatggcggcaacggcaactcggaggatacgcaggcatagtcaaccggccttcagccaattcccgctcctgaatgttcaggagcattcagtatgcatgaacgacgcccgtcacaaaaatcgtgatgggcgtctgtgttgcgctccataaccatccttggtccgcgcatacgacagatgcagcgaatcctcagctcgggtgatgcccacatacataagccggcgttcctcttccagcgcatcccccgtttccggcgaaccgtacggcaagagcccttccgaacagccgatcagaaacacgtgcttgaattccagacccttggatgcgtgaatcgtggaaatcgtaacgccgggatcgtcgtttgcggcaagtccggtggcgtccaaacccatcgcctccaatagcgcacgtttggacgcggcatcgtcggcgagcgcggatgattgccatcccgaatccttacgaacgcggtatttcagtcttgcagcgcgcaaagcggcaccgaataccggctgttgggcgttgatgcgggtgagaatcgcgcaatcggacggcttggctccgttggcgaccaaccgggcgatgcgtgccgccacgccctgcgcctcttccatatcgctctcataagcggttcgggtaacgcgcgggccggattcgcgggcggaaaccagtttcaggtaatcctcacggttcggcgcggccgcaagcacccggttggcgagattcacgacttccggcgtcgaacgatagtcggtgttgagattgacatcggcggcgagcggcccgaattcatcggcgaaacgcagcagatcccagctggaagcaccggcaaacgagtagatggtctgggccggatcgcccacgacgcatacgttgcggttcatcgcgctcttgccgtcaggccctcccccgcccagccacagggtcagcagcctgtgttgcaggggcgagacgtcctgatactcgtcgacggtgagccagccgatggtggaacgaatttgggcggcggcttcgggaaaatcatccatgatatggcatacgagcagcagaatatcgtcaaaatcgatttcgccacgcgaggtcttttcctgctcgtaggcgctgtagacgtcggcgaaccgagcggtgtcgagtccggcgggcggctgccgatgggcgatggcacaggcccgggcataatcttccaccgccaccaacgagattttggcccaattgatttcggcgagcacatcgcgaacggtcagcggatcggcatcggtacgtgcggtggcgcggatgatcgcgcgggagacgacgtcacgctgatcttcgatcacatgcgggaatggagcctcgcatatatccgcccagacgctgttgagctgatgcaatgccgctgagtggaaggtcgcggccgtgactccggcagttcccgcacccgaaccggaacgtccggcaccttcccctacgccgagctggcccaaccgtgcgcgcatttccgccgccgcttttaccgaaaaggtgacggcaagcacccgctccggcttccatgccccggtggcgcaggcataggcgatccgccgcgtgaccgtgcgtgttttaccggcacctgcgccggcgataatgcgcaccggcccttgcaacgtagtcgcggcggtacgctgccgctcatcgagcccctcaagaatcccctgcgcctgttccatgcgtccattgtggcacgattcgcgctcacggcacgactcacgcctatggctgaatcgggctcacgacaaaacatcgccagaatcatgcgttttgcgtgtcattctgcggtgcgaatcgccacggatgtattagtgtggaagggtgatgaaacgtagcgattatatgttggcggcactcgcctcagccgtcctgccgaatctgggggtggccggcgtacgcgagaacgtgcaggccagcgcaaccgacgaggccaaaggcatcgatcagaccgtgatccaagatgcctcgggcaagttgtacgacgtatacgccactgacagcaaggaagggcgtacacgtctgatccgccgtgtgaaagcggcgcagacactggcagccgcgcgcgagcttggtggcctcggcttcgatatggaccgtgtggtcgcattcgtcccgggagacgtttcccaacccggccagacggccaccgcacaggccgtggggcagcagacccaggcggagtccacaccgctgaccccgcgcaagcccggtcccacaggcgagacgaccgtgatgatcgccgtccaccgtgatggtcaggcacgtcctctcgacctgttgacattggatgactgcgcggccgtcggcaccgccatcggagccattcatcgcctgccttcgacttttctggccaatgccaaatatccggtagtcaccaccggtcagattcgttcgcagctgaccgcctggattcgccgcttacgctccgccggccatgttccccaagaaatcaccgacagctgggcgcgcatcatggacaccgagggattgtggtcgttctccacctgcacggttcacggcggattctccgacggcgacttcctgttctccggttccaccatcaccacggtgaccaactggcaggatatgcaggtcaacgatccggcacgagaccttgcctggattttcggcaagctcgacgaatcccatcgcaacgccgtgctttccgcatacggccgcatgatgggctctcgacttgacgatctcatcatgctcagggccaacctgtggctgcagatggaacaggtgggcgaattcattcaggcgttgaaccgtgcggacaacaatcgcatcatgcagttcaaggcacaggtcgaacgactcgcacaccagttgggcgtgatcaagcacactccggcaccggccccagccgcagggtcggccgccgcctcgtcgacgaagcccggttccccctccacaatcaccgtcggcacattgttgcaggacgaccgtcatcaggcacccgccacgcaggtacccgcacaaccgcagcagtccgaaaccggtaccgcggcggccgaggtctcggacgacacgcccgatccagatcgcaccggttccgctgacatcgtggccgctggcgacgtggatcttaccccggaagtcgaacccgatgctgaccggaccgccaatcacccgcaagcgagtgtctccggcaccgcaaccggtacgggatcgaccaaaccgcagccctcacatggcgcttcccattcttcggtgacgatcacgctgaaggagctcctcagtatgaacgggcatagcggcacgacgtcaaccgacgcttcccctgcatctcaatccgccgccccgaccgacgatgcggtgaatgacgatactccggacagtttcgttcagcacggagcctcgagtgcccaaaccacggtgattccgctgttggagcgggaagaacgcgctctgcgcgatgcccgtgccgggttggacgggtatgacagcgagggcaatccgctggccgaatcatccacatcatccaaataatgtcgtgtgcggtgttccgcgccacgccgagcgcgtaacaccgcacatgacgacgcagacacgcggcacaatagagtacagaacctcggccggtgacggccacttaccatgatgttcgtcacaaagacggcagaacaaggagccttatatggatatcgaactgggcattcagaacgtggcacgaccggtgaacttcagcaccgacgaatcagccgataatgtgagccaggccatcgcgcaggccgtggccgacaacgcgacgatcgatatgaccgatgacaagggccgtcgcatcatcgtgcccgccaaggcactcggttacgcgatcatcggctccgaaaccaagcacgccgtcggtttcggcacgctgtgaccgtgaatcgcgcataagcggccttgggcatcatctcaaggccgctttgtattgccgcgaatcaccgatataacgggagcacgccgcgatgaacgatctcttcgacagtggcctcgtcggtgaggttctcccccagtttgttcggtttgcctttgccatgccagtcagatccgccggtgaccagtagctggtgccggcggcagatggtgagcagccgttctcgttgctccggtgaattgcctcggtgccatacctccagcccgtccaatccctcgctgatcaacgcttcgatctggtcatcggacagcagtctgcggttacggctcacatcaccggcatgggcgatcagaatcacaccgcctgcccctttgacgacggccaccacttcatgagaggtcggcgagggcgtgggaatatagtatttggatgaggcgctgaccgcattcgcaaacgcttccgaacgagtccgatatacgccggcactcaccaaagcatcagcgatgtgaggccgcccaatggtggttttgtcaccctccttgacttgggcgagcacggattgccaggtaatcggataatcacgagacaacaattcgaccatgcgctgcgtgcgttgcaaccgtgcggctcgagtatcggcgaacaagtccgtgatgtgctgattcgtgggatcatactggtagccgagcatgtgtacggagacgttctcatccgtggcggtgatttcggtgccgcggagcaacggcaaaccgaccctatgggatgcggcttcggcctccggccagccggcggtggtgtcatgatcggaaatggccacgcccttgagtcccaatgccttggattgttcggccaatgtggccggcgtttccgtgccatccgagaagacggtatggcaatggatgtcccacccgacggcgggcggctccaaaggcatcacatatccagtcataccttccatcgtaacctcatctcagcattcccacgcaaggcgcagacaggtcgtcaccttctgccaacggccaagaccagacattcggcactcagctgacaaccgcagaggctaatctggagcgcagcgctatcgaaagggacatgatgactcgtaacaccgcaaccgacacatcatccagtaccacgaacaccacgccgcttggcttggcggaggcgcgaccgttgattggatggcgccacagtgccacttggacatatctcatcatgctgatcgcctcggcagtggcattgggggcctcgctcattctgtccgccgagactttgcagttggctaggcatccggagtccacgctcggctgcgatctgaactcggtggtgtcctgttcggcggtggcccagtcctggcaggcggaaatcgtgaagttcggcgggctgagctatccgaacgcgttcttcggcatcgccgccgaatcggtgttcattaccatcgcggtgatcggtttggctcgtgtgaaggtgccgcgttggttcgcgacctgcacgtggctgggcggactggccgctttggcctactcgtactggctgagcacacagtcgctgttcgtgattcacgcgctgtgcccgtggtgcctgaccctgatgttctccaccaccatccagttcatggcgttgagccatgcgaccgtggcagtgcagggattgccgtcacgtaaggctgtggctgctgatgatggcgacagcgaggccgatgtcgcggcggtgccggccggactcaataagtattaccgcctcaacatcgacctcatggtcgacatactgtggatcgtggcgatcgtggtactcatcatcgtcaccgaaggcgcggccctgttcgctgcctgattcctttacaacaaatcgatatcggcgaccagcgtggccgctccggtcagtttcacgtcgctgtcggtgacgtccacgcgcagggtgccgccacgtacggtgatgtcccagtggctgatgccggtcttggccctcagcacaacgcctgtggcgcataggccggtgccgcaggacagggtttcgccgcagccacgttcgttgacgcgcatcgtggcttcacccacgccggtgttctgatcgatgtcgtcgacccgcacgaattccacattctggtcggattcgatgaccggagccaccactggtttggtgaccaaatccagtgattcaaccactggcagggacgcgaaggcatcctcgatcaccgcgaccacgtgcgggttgcccatatccacgaacgtgccgcgcgccgagccctcagcgccggggatggtgacctcgtaggcgtcggtttcgccgatcttccactcccccatttcgacctggaacacgttggctccgtacggcctcatattgccgcgtggcgtcagaatcttgacgccggcacgggtgccgaggcggaacggctcggtggagtcagtcacgccctcgcgctgagcgaacaaggtgattgcgcgtgtaccgttgccgcacatctccgccaacgatccatccgcattgcgatagtccatgaaccatttcgcgcccccggccagtacgtccgaaagctgatcatcgcttaaatcagacacgaaatcaggccgtgtcaggcgaatcaggccgtcaccgccaatgccgaagtgacggtcgcacaggaatcggacctcatcggcggtgggctcgaatttgccggacttgtcgaggtacaccacgaaatcattgccggttgcgtgtgtcttggttactcgttgcggaagactcatggctttcagagtactctagggagcgaaacaacaccgcaaaacaatcggctttgtgatcggtcgcggcaacatacggttgcaggcatggctatagggaggattcaggcatgagctcttcggctccaatcggcgtattcgattcgggtcttggcggtatttccgtggctcgccaaatcgccaaggatatgccggccgagcatgtgttgtattttggcgattcggccaacgccccgtacggcgtcaagacgcctgagcaggtgagggccctgagtttcgatattgtcgaacggttcgtgcgtcaaggcatcaaggccgtagtcatcgcatgcaacaccgccacttccgccgcggtgaacgatctgcgcgaacactacgatattccgatcatcggcatggagccggccctgaaagtggcgtgcgaccgtggtgacgtgccttccgacccgcatcatattccccagagggtgattgtggcggccactcccctgactttgcgtgagcggaagttcgccaagctgatggatcgattcgattccaataacacgattttcaaggagccttgccccgacttggtggagatcgtggaatccgggcggctcggcgaccatgacctggtgatgcgcacgctgcatggctacttcgaccagtacgacatggagcacatcgactcggtggtgctgggctgcacgcatttcgtgttctaccgcgactacttccgcgagctgctgcccgaacgggctgctgtcatcgacggcaatgagggcaccgtgcgccatctgggcgtggtgctggagtccctgggcaaactggcacccgaagacgcgaccggcggcgtggaactcgccaattccgatctgtccgaacgtgttacacggctttcacgcgacctgctgaatgcgtgatcggatgcatgatgatgaataggaggctgatatggcactgaagacggcaatgattgatgtcggcggcgggttccgcgcgattttcggctgcggcgttatggaccgcatgctggaggacggcatcgacgtggacatgtgctatggcgtttccgccggcgcggccaatatgacctcgttcatcgcccgccagcacggccgcaaccacaccttctacaccagatacgcgttccgtaaggagtacgcgagcgcggaaagcttcttcaagaaccacaacttcgccaacctcgactacatctacggcacgctgagcaatcacgatggcgagaatccgttggatttcgcggcgttcgaggccaatccgaccgggttcaccgtggtggcctgcaatgccgagaacggctcgaccaagtacttcgacaaatcacgcgtacgttttgatgatttcgacatcatcaaggcctcgtccgccgtgccggtggcctgcgaaccgtatgtggtggatggcgtgccgtatttcgatggcggcatcgccgatccgatcccggtacagaaggcgctggatgacggctatgatcgcgtgatcctgattctgtcccgcttgcgtgacgaagtacgcaaacagcagaaggatctggctccggcccgcatcctcgaacgctcccaccccgccgcagccgagaggctgcgcatacgctacaagacctacaacgacgaactcgaactcgccaagcattacgaagcggaaggcaaagtgctgatcctcgcacccgaagacctgtatggtctcaacaccctgaagaagaacttcgagggcctggaaatgatgtaccgcaagggatacgcggcggccgaggccatcccggcgttcctcgggaagtgacggcaccggcgaagtacccgttcacgccaaaccgtatagccgttccgcattggcatgagcgatggcgtcgataacccgtttcgcctgattcgcgttccatgcgccatccgatacccagtcgatggcgattcgcgcaatatacctgcggaacagcaccgcggccagataatgcaattcactgatgccgatgccgtccgacgcatagagcaacttgtcaaatgggcaccacgccagaacattgcgcagcacttccctcacctgcgctcccatatgcggattggcaaggctgacatccatgtatacgttggcatgcaccgagcagagaaacgccgcttcacgctcgtatggcacgcaatgcagaagcggaagtgtcaaggtgcaggcgcagatcgccggacacgttgaatttctcgttttcggcgaacgagttgtccgcgccgaacaccacccagaccagggcggcgcccaatccgttgcgttcgaaggcttcacgcctgcgggcgggaacggatttggcacgggtcacgccggcatagtccacataggtgccggtgacgatgtccacgggcttgcgttctgcggaaacggtgttgggaatgaagttggacatggcgatttcctttactggtaagaagacaatgaatggattgttagtaagttatcgatatgagtagctgaggcggaatgcggatggacgacaagcccgattcaggcgaaatactcctgaaggttctcgctggcacccagcttcttgcggaagaagccggtgcgaatcgcaatgatgatcaggccgacgaccaacctctttctgtgtttccccaaaccatcgggggaggaacgttgtggttcactgtagtactcgcgaccggctgatggggccgtgtccttatttgaaaatcatcgcttttgatataaggcgtgccatctcccgcatatccgacgcgacccgcgttatgatcactcgcgcgagcctcgtcggacgaatctgtcggccggccactgagtttttaacaatcaaccggatatgccatcgagctcattcgaggctgtcgtgtgcgagccgggcgaaggtgccgttgcggtcgaccagttgacggtaggtgccggtttcattgacgtggccgtggtcgaggacgataatccggtccatgccggttagcacgcggggccggtggctgatgacgatcacagtggtgcccgccggacggttggcgatcagatcatggtagattgcggcctcggcggtggcgtcgaccgcggcggtcggctcgtcgagtatccacaacggcttgccggacaggaacgtgcgggccagcgcaagccgctgccattgcccgccggacaggccaacgccgccccactcctgaccgagctgcgtatccaagccgccgggaagcccatccacgatgtcgagcgcgcgggcgcgacgcaacccgtcacataactcatcgtccgattgccgcagagcgggatcgatgaactcgcgcacggtcacctcgatgtgcgtgaaatcctggaacaccatgctcgacgcgcccaaccgttcggcccacgaccccaaggtacgaccgttcccgccgtccgcgcccgagggcagggtcacggtgccgtccggggcgtcgaggatgccggcgatgagcttgacgagcgtggtcttgcctgacccgttctcgcccaccagtgcgacgatcgatcccgcttcgacatccaacgacacgtcgtccaacgccggagtctgaacggccggaaccgacgctgccgacgcgtcatccgcgtcatcgtcatgctttgcaacagtcggatacgcgtacgtcagatgctccacgtgcacgccgaccggaccggtcgtttcggggatcgcggggttcgcgcgcagcaggcccatgagccgttcgtaggcaagaatcatcggcgtggacgccatgaggttgccgaacgcctcgccagtggtgcgcgtgaccgacaatcccgtcatgatgcccaccaacgcggccgggatgctcgacacggacgcatggccggacgtcaggatcagccagaacgcgccgcccgtcagcacggcgaacacgagcgaactcacaccggtcaactgcaccgtgcgccacgagatacgctcccacatgccggccatattgaaatagcgcacgcgcgcctgcgcagggatgccgaacgaaccggccgtggccgcgatctccgtgctcgacggtggataatccaacaaccgctcgaaatagttcgcccgacgcgactccctgccgcgcttgggccataactcgttcgtgagcttctccacgccgaactgggccaacagctccgggaccatcgccaacgcgatcatcagcgccgccaacggatgcatatgccacaaggacgcggccagcatgaccatcgacgccagcgcgcccaccactgaggtcgcgtccgcggcctgcgaagccacgttgtacgggatcgcgtcgcgcgcggcccgcacctgcgtcgtcacctcgtcgtccaacgtctgcgcgggagtcagacgcgccagcgcgtcggtcagatcggactggtattcggccatcaatggctcctgcaacaagtcacgcatgttctgcgccaacgacgacgacaccgacatcaacaccgcgcccaccgtcagcaccgccaggatcactgcgaaccggcccacgcccagccccgaccccataccaagcccgtccgggccgcacgcccaaccgatcagccacacctgcaacgacggcatcgccatcatcaccaacatcgacagccacatcaccaccgtacgcaccggacgcctacgcaacgcatacgcactcgtccgccacgacgtcgccaccgcatcacaaaacggccgaaatcccgcgacaatcggcatttacgacgcctccccacaatagcgaaacacagatgcaatgatagaccgcccgagttctaaatagaagcgcaacacctgtctatggctgaaagtgttcaagttcataaccagagagaaagtgtcgcgctcgatatgagagtgtattcccacctgtcggcagaggaacgtgtccggatcgacgagctgaggacacagccgatcggcgaacgtccgaaacgcgtgggcccgcgccgcaagttcggccattatgagtccgacacggccgtcggcgcctccccgtcgaggcggtgcggcgacacgcaggtcgaacgcaagagccgccgtctgttcgccgggttcatccccgacaagagcgcgctgtccaccgcgcgcgccgaatacgacatctacaaggacatccccgcgcccgcgcgcatcgaccggacctgggacaacggcacggaatcctcctgccacctgctcgtggacgagtcgctcggcatgctcacctactatgcggacccgtactcgtcctatcagaggggcagcaacgagaaccgcaacgggcgcatccgccgctacctgcccaagaggaccagcttcgacgacctgacggacgcggacctgcaggccatcgtcgacgagatcaacgacacccccatgaaggtcctggactgggaaacacccaacgaggtttgataccgcgaactcggcaagctaatgtcgaagacaagctacccaaagacgaacgttgcacttaca

SEQ ID NO: 3957 - DNA, 20933 bp, Unknown
  R22_24m  MAG No. k141_28387
gaattggcgcgtatcgcccatgtggtgtggtcgtttgcggacatattgcgtaggggagcgctatagggagctcacagaaattcggtcctgctgagaacaaggtgaggcttacgcgccgtcaaacgcacatggtgatttcaagaaatggcgaattgctgccattcttgcacctgtgcgtttgatgggaaatgtgcgtatgcctcacatttttgcataaagcatgaaaatgtgtgagaccggcgtatataacgtatgataaagagtcaacattcgtggtgtggtgggtccattaagggggtgtggtggtggcaggtatcaaagatgtggcggcacgtgccggcgtatcgattagcacggtgtcgtatgtgatgagcggaaagcgctccatcaaagaagagaccaaacgaaaggtgctgaaagcggcgaaagagctgggatatatgccgagtcgcactcaggagctgcggcatagcggcccgaccaaggttctggcgttgagttcgccgctccatgaatacaccgattactcgaattacgccgtgttcttctttgcgctcgccatacgcgccaagcgatatgggtatgaccttctgctgctcatgcacgaatacggcgatcaggaactgacccgggtcgccgccgaaggcatggtcgatggcatcctgctgttggatgtgctgatgtgcgatgcccgtgccgatgtggctcgcgctctcgacatgcctgtggtggcggtcgggtacccgagcaattccgatgcggtgtattcggtggatttggatttcgagcgtatgggtcgcgaggcgatggagaaggcgtatgcgctggggcatcgccatgtgctggtgtccggcgtggacagcagcgcgtatgaagacggctccaattacctggtccgttttcttgacgccgcaaagaaaaagggcgatgatctcggcatatccgtgatcttcaagccctctaccggcaatgggcgtgacgacgtcaatctgatgttggatgagacattccttgaagacccggcgatttccatgatcatttgccagacgaatgcggcgcatgtggccaacgtgctcaacggtctgcaggatcgtggattgcgcgtgcccgatgacgtttcggtgatggccgcatgcacgcatgggctgggatctttgccgcgtggtgtggatgagatgccgatgatgccgaccgaaacctgctcgcgtgcagtggatctcatgatggaggtgctcaacggcgaccgtgacgatgtcggccgtgtggagatgcttccttcgcgttatatcgcacgtggcaccatggcgaaatgctcgcgcagctgacaggagctcgggtgtttatggctattcgccttatgtgaatagtcacattttatgcagtattccgaacatgaattaacagcgttaagaatgagagcgctcacatcgaaaagtcgttgaaattaacgtcgaaatttatcgaaataatttgagaacgtcgttgccaatccgttatatttccagtggatggcatttcgactggtttcaataatcgtcgaaatgttctctcatcagtaaagaagctgaaaaggagaaaacgatgaagtcgactcgcaaatttatcgccgctggacttgcagttgcgaccatgatcggtgttgctggctgtggtggcagcggtgaagtcgcacaggaggagaaccccacctccatcaagatctggcactacgaggaatcgaccacagcgcaaggcaaggcgtgggacaaggctatcgaaatcttcgaaaaggagaccggtgtcaaggtcgaattcgagaagaaggccttcgaacagattcgccagaacgcctcccagatcctcaactccgacgacgctccggacgttatggaatacaacaagggcaacgccacgtccggcctgctcgccagccaaggcctgctcaccaatctcaacgattacgtgtccgaatatggctgggacaagatcattaccggttccttggccgacaccggcaagtacgatgagcaaggcgtgatgggctccggcgactggtacggcatcaccaactacggtgaggactgcctgctctacttcaaccaggacatgttcgacaaatacggcatcgcgattccgaccaccttcgacgagctggaaagcgcgatggccaagttcaaggagaacggcatcaccgcactgtccgtcggctccgccgagtacccgacccagcacctgtggtggcagctggtgctctccaaggccgatgacaagttcatcaaggcctacgagatgtacgacggcaaggtcgattggaattccgaaccgctcacctacgcaaccgagaagatcaaggaatgggtcgacaagggctacatctccaaggattccaccaacctcaaggctgaggacgccggccagaacttcatgaccggcaccaatccgatcttcttctccggcacctggtggcacgctcgcttcaaggaagaggccgccggtctgaatgtttcctactccaagttccctgacaccaagaagattgtcggctcctccggtaacgtctgggtcattcctcagaactccgccaagaaggatctggctgccaagttcatcaacatcaccctgagcaaggaagtccagaattacatggccgagcagggtggcctggccatcaactccgacgtcgattccatcaaggatgagggcaccaaggaattcgtggcccagttcgatgacgccgtcaaggaagaccagctcggcttctacccggattggccgacctccaccttctacgatgagctcaatgcctccctgcaggagctggtcaacggcaccgccgacgtgaagaccgcgctgaaccagatgaaggacaactacgacaagggccttgaatcttccggcatcgtcgtcgattagcattcgattctttcctcttcccttcctccaataggcgaacgaaggcgtgtggtcggtttctccttcccttgccgccacgcgtctccgttcgtgtcccaacaatcttgcatgctctacgtttagaagtgtctgatgaaaacaaagaccaataaagccaagcacccggaagaaaccgcaatgtcgcgcatcccgggcagcccttcgaatcgtttctggttgtacctgattcccggtgtggcaatgctcacctggatcatcatcgttccgggcatctggaacatctatctgagtttcactaactatcgcggcattaggccgccggtctgggccggcctcaagaactgggtccgactgatgaaggacgataccttctggatttccttccgcaactcgatctggatgatcatcgccatggtggtgatcccgattctgctcggtctgatcctctcctcgctgatcttcgacgttgtgcagaagaagttcagccccaaggccgcgtccacgatgcgcgccgtctactacttcccgcagctgctgcctatcgccatcggctccctggtcatgggttggattttccgagctgagaacggtgctctgaactcattgctcagtgccataggccttggaagcctgcaacatgactggcttggcaaaccggatacggccctgatcttcctgatgctcatcatggtctggattcaggtcggctatccgttggtcatcttcatgtccggcctgcagcgcgtcgatccggaactgtacgaggccgccagcctcgacggcgccaactggtggcagcgcttcagggccatcaccctgccgtccatcaagccggagatcttcgtggtggccctcacctgcaccatcgcggcactgaaggtgttcgccccggtgtacatgctgaccaagggtggccccggcactaccaccatcgtgccgtcctactactcctacacccagttcttccaggtacagcaggtcggctacggcgccgcgattgcgaccgctctgacagtcgtcatcattatcgtggccatcgtgttcaccaaccttcagcagaaggtcgaagctgaggacggagagtgattgaaaaaatgagcactatgagcgcagctgaattgaagaaaatcgccaaagtcaagaagaaccgcaccgccggcgactggctgatcatcgtactgctgattatcggcggcttggtgatgctgttcccgttcgtcgttctttgcctgaacgccttcaagacttcggccgactacaacgccaacggcccgctgtcctggcctgcctcgttcacgcttgatggcttcatcaagttctggacccgcgtcaacttccccgaaaaggtgtggaactcgatctggacctccggcctggtggcaatctttgccgtggtgctgtccgtgttcaactccttcgccctcggcatcggccgagtcaagggccgtcgctggatcattctgttgatcatgctcgcgaacatgctgccgcaggaagccctcctgtacccgctgtacatcatgttcaaggaaatcggcctgtacaacaacccgtggtccatcgtcatcatcttcaccgtgatccaaagcgcattcggcacatacctgttgtcgtcggtgtacggcaccttcccgaaggcgattctggaagcggccaccatcgatggcgcaagccgctggaagattctcaaggatatcgtcttcccgatttcgaagccgaccctggccgtcatgctggtgttcttcttcatctggacttggaacgactacatgattccgatggccttcctgatcgacaactcctcgcagaccgtcccgatcgccatcgcctcgctgtccggcgaccgtctgatggatgtgacgaccacggcctccgcctcgctgatcagtatcgtgccgaccttgatcttcttcctcctcttccagaggacgctgtcgaacggcatcaccaccggcgcggtgaagtaaggtcattcgcacaacaggcaattcaatcaacaagcagtacatattgattttggtttcggccgccttgttccctgggggtcgaaaccacctctccaccaaggagcagcaacaatgaagttcaccaacggctactggatgattcgtgacggcgtcgacgccctctacgctcgtgaagcctacgaactggcggcggatgccaccaccgaaagcctcaacgtcctcgccccgacctccgtggtgcgcggccgatacgataccctgaacctgcccacattcaatgtggacatcaccacacctgcggaaggcgtgattcgtgtgcgtgccgaacactggcagggtgccaccgaataccccggattcccgctcaacgccgacaagcccggcagccgggattacgtgactgtcagggctgacggcaatggcgacggcgaagtcggcgtcaatggcgcggacgtcacgctgaccaccggcgggctcacggcgaaggtcgtcaagggcgcgccttggaaccttgccttccttgatggggacggcaaggtgctcaccgagtcagcaggcaagtcgctggcccggttcaatcttggtgccggggcgaacgtcaccgcccagccggtcggcgaattcggtgtgagcatggacggctccgcccatgacgagtccgacgtgttcaccgccatccagctgcatctgtcggtcggcgaagacgtatatggcctgggcgaacgcttcggcgcgtacgtcaagaacggccagagcgtcgacatctggaatgaggacggcggcaccgcttccgaacagggctacaaggacatcccgttctacatgacctccaatgggtatggcgtactggtcaacaaccgcggccacgtctcctttgagatcggttccgagaacaccgaggccgtgcagttctccgtgcccggcgaggccatcgacttctgcgtgatctatggccccacccccaagcagattctcgaccgctacaccaagctcgtcggacgcccggcgaatgtgcccgcatggagctacggtctgtggctgaccacctcgttcaccaccaaatacgacgaggccaccatcaactccttcatcgacggtatggccgagcgtgatattccactggccgccttccactacgactgctactggatgcgcgagttccactggtgcgatttcgagtgggacaagcgtttcttcggcgacatcgaatccacgctgaagcgcctgcacgaagacaagggcctgcacatctgcgcttggatcaacccgtacatcggccaacgcggcgaaatgttcaaggaaggccgagacaagggctatctggtgcgcaagcccaatggcgaagtctggcagaccgacttctggcaggccggcatgggcttggtggacttcaccaacccggccgcctgtgaatggttcaaggacaaggtcaaggtcctactgaatcagggcgtggacgccatcaagaccgatttcggcgagcgcatcccgcgcgacgtcgtctggtatgacggctctccgaagctctccatgcacaactggtacacccagctgtacaaccaggccgtgttcgaagccatcgaagaaacctacggcaagggcaacgcctgtctgtatgcgcgctccgccaccgtcggcggccagcagcagcccgtgcattggggcggtgactgcgagtccaccttcaacggcatggcccagtccttgcgtgccggcctgtcgctgacctcctccggcttcggcttctggagccacgacatcggtggcttcgaaggtgcgttcccggatccggccgtctacaagcgttgggtggcgttcggcatgctcggctcccactcgcgactgcacggttccaccgtgtaccgtgtgccgtggctgttcgacgaggaagacgagaagaacggcgtcgcattggtgcccggccagaccgccgtggatgtggtgcgcgagttcaccaagctcaagcttgaactcatgccgtatgtctaccagcttggcctgcagcctcatgtgaacggcaccccggtcatgcgttccatgttcgtggagttccccgatgacccggcatgccgcacgctggaccgccagtacatgttcggtccgtccatgctggtcgcccccgtgttcacctactccggtgaggtttcctactatctgccggacggcgtgtggaccaactggctgaccggcgagaaggcgcagggtggttggcgcaaggaaacccacggctacgattcgattccgctgtgggcgcgcgatggcagcgtcatcgtcaccaaccccggcgaaaccaagccagaccgcgtgtacggtgagaacgcgctggtctccgtgttcgtggatgatgtggagaccgccgaagccgttattacggaaatcgacggttccgccgtaaccttcaccgcgcgccgtacgccggctggcatcgaggtcgcgagctccgatggccgtccgttccgtgcacgtttgggcgcgtctggcgatatcgtcgacgttccggatggcagcgtgatgctgtgacgcgtgctgtgcgtgacgtgcgtggtgcatgtggtgctgtaacacttcggtgttgcggcaccacgcttttgcgctgatatagggatttgtgctagtcgaatccgcgaaatgttcagtaaatgttcacgtagcgaaatcggcatagaatgcgagcaaacgcataacggcacggtgctgttcctgcgtacgccaacgccaggcgaaccgccggaaagaaggggtctccatgattgagacagcggacgatatcaagacgattgcgaacgtcggcacgggaacaatgggccatgcgatcacgttgcagttcgcgctggccggatatccggtgcatctggtcggccgcagcgaggcctcgctggagaaggcgatgaaggcgatccgttctgatgccgaggacttcgccgaagccggactgctcaaggccggcgacaccgtggacacggtgctggcccgcatcaccggttacgccgactatgcgagcggcgtggcggacgtggacttcgtcatcgaatccgtggccgagaaccttgacgtcaagaagtccgtctgggccgaagtggagcacgccgcccccaaggacgcgattctgtccacgaacacctccggcctgagccccaccgcgctgcagtcggtgatggggcaccccgagcgcttcgtggtggcgcacttctggaaccccgcgcagttgatgccgctggtcgaagtggtgccgggtgaaaagaccgatccgaaggtggtggacatcaccttcgacctcatggccaagatcggcaagaagccggcaaagatcaagaaggaatcgctgggctttgtgggcaaccgcctgcagctggccgtgttgcgcgaggcgttctacatcgtccagcagggcatagcggacgcggccaccgtggacgacgtgatgaagtacagcctcggccgccgctggaacctggtcggcccgatcgccagcatcgacctcggcggactcgacgtgttctacaacatcagcacctacctgttcgacgacatggacaacggtgccggcccgagcccgctgctcgccgaaaaggtcaaggaaggcaacctcggtgccaagaccggtcagggcttcttctcttggcagggcgaggacggcaagcgcatcatcgaaacccgcaacaaggccctgctgcgtgcgctgaaggacgatgccgcggaagcgtaaagcgcgagcgacgaattctcgcgtaacgtgtgctacgatggaaggctcccttcggggagccttcgttgtgcttgcgttgttcttcggtccaacttttcgacatgcgtatacgttgttgatagcgacaattgcggaaaacgcttacagtatgatgtgcacacggacaacaagccgatgattgcaaggagcggtgacgacgatgacatccacagaacacaatacgcgagccgacatgttggcccacatgggcagccttcagcaggccgcctacgtgcgcccgatcgagtaccaggagggccgtgcccacggcctcaaggccatcgaggtgaagaacggcccgctacgcttcgtatccatggccgaccgcgccctcgacgtctgccagttcgaataccgcggcgagaacctcaccttcctgtccaagccgggcctgaacggccgcaaccagttcgacaccaacgggctggaggcgcagcgctccatcatgggcggcctgttcttcacctgcggcttcgagaacatctgcgcgccgtacgtcacgcctgagggcggcaagtacccggccggcagcttcccgatgcacggccgcatccgcaccacgccggccgagcatgtgggctccgacgcccactggaccgccgaaggcgactacgtgctcgaggtctccggcgaaatgcgcgaggccgaactgttcggcgagaatctggtgatgcgccgcaagatcaccagcgtgtacggccagccgtcgatcacggtcgaggatgaggtgaccaacgaatccttccgcgacgagccgctgatgtggatgtaccactgcaacttcggctggccgttgctcgccgaaggcgccgaagtcgtgatccccagccgcaaggccaccccgcgtgacgagaccaccgcagccgacaccacgccgtggaacgaaatccaagcacccgaggcgaaccgccccgaaagcgtgtacctgcacgagctcgccgccgacgagaacggccgcagcttcgccgccgtggtcaaccgcaagctcggacttggagtcgtcatcgacttcgacgccagcctcttcccatacttcatggaatggaagtcgatgggtgcgggcgactacgtggtcggcctcgaaccctcgaactccagcgtccacggccgcggctggcacgagcagcgcggcgacctgcacaccatcgccccgcagaccagcgaacgtaagtccctgaccttcaccgtcatcgaaggcgaggccgcgattgacgggctcatcgcccgccgcgacgccctgcttggctgaattgtgagataatatcggccgatatgtgaacggctgattagcgtggggagcatggttacccgggattcggaacagtatctgcgattcaaacgggagcacacgctgccctcgcatgaggcgattatggactggtatcgcggcaccggcatgcgtccgtatctgcaggcgcttgacgacgccggccgcaagaagttcgaggccgaagtgttctcccaagtccgcgaggaataccccacacagtcggacggcagcatcatcttccccttcccgcgtttcttcttcctcgcgactcggtagaagctcgccggattcgtgtactgggcggcgcgacctgtttcccgcgccgccagctgtgggttgacctcgctactgggcttgcggtgatgccgctggctgctgcgctgcttccgattgcgatggcatttgcatatgcggtgcgatgctggggagtgtgtcgtcatgcatgcactgcttcaatatgaggtctcgctgggcgatgaggtcgtcttcgatctggtcacgcacgtcgcgcacggacgagaaatacaggtagaacgtggcgtgattgtagccggcgagttcggtgatctgacgcaccgagatcttctcgatcggcttggtttcatacagcttctagaacgcctccttaaggcgattgaccgtctgctgcgtaagttgcgggttcttcttgattgcgattcgcggtatggtgatttcgcataagacgcacaaccccatcgattcgtcggtcaaattcgtgaccttctcgatgcgatgctgtcgctggtggtcacgcaggacgtgctgttggaatcccagggaaccgcgcacgcggcgcaatcctcgggactgttcggcatcgggctcggcgtggtggccgtgatcatcggcctgtggatgttgctgagacgtaagtggacggcaacggaataggaatagtgacagcggaatagcgcgcgtgatattggtacgcgacgtatcgtaaaagcggctacaatacttacggcaaaagtctttgcaacgagaaggaagacatgactgagcggcgtcgagcacggatgaggattcgtcgtcaacgaatttacgttgtacggcgcattgtggttgcggtatgcgcattgttgtgctgcgttcttgccgtcttctcgacgattgacgcccaacgggtgtggccccgcggtgagtcggtcgcacaggggcaggcagaggttcaggggcaggcgcagaaggtgagtcaatccgcgcaacagtcggcatcgcgagtgtctgcatcggcctcatccttggaccgccagcaggtaccggtctttaaccaggcgattcaggagcagcgtgacaaggaagcgcaacgtgcgcgatggacgaatcccaccggcaagcagcctgatttgtcgcaatactccgatctcagcgtgaaagtcagtatcgccaagcaggaagtgtatgtgcaatccggcggtgagaccatctacacgatgatcgccagcaccgggctcaacgatacgaccccgcgcggcaactatgttatcgggatgagaggcgatcacttctacaatcccgcagaaggcatgggtgctgattattgggtgcgattcaacggcccgttcctcttccactcggtgccgaccggggcgaactccggcgagtatatggaagaggaaggcaacaagctcggtcagccggcctcacatggttgcgtgcgactcactgtggccgatgccgaatggttctacaaccaaattccggaaggcacgccggtcaccatcgcctgaggcttggcctgagatcgatactgaggctatcgtgctttaggcgtctgatattggtcgtcggtagtgaagcaggtgcgatagaccatggccatgatcagaccgtcggccagcaaggtcagcgcggcgatggcaccgaagaccacgaactggtatttggcggcgttcagtggatctccgccggctatcacctggcccgccatcatgcccgggatggtcacgatgccgctggaggccagcgaagcggtggtgggcaacagtcccagccgaatcgacgagatgacggatggacgggcggactcccatgccgtcgcccccaaggccagcatcatatccacctcgtcgcggcgttcctccatgctttcatagaatcggctcagcccgacagcaagcgcggaaacggtgttgcccagcagcatgccggtcaggggcaccaccagctggggcgcataccatgggtgtgggcgcacgatgagttcggtgaccaacgccagcatgagcagcatcgtgatgaccaggctcaggaagatcggtccggcaagacctttggggatgccgcgcgcgcgggatatcacgatctgcaccgccgcgaccagcatgaccgtcatcagggcgaacaccatccacacgctgttcgaacgaatcacgtagctgatgatgaatcccatggcgcacagctgcacgagggcgcggcatgccgaccacatcagggtcctgccgatgcccatgtgcatgagttcgctgacgatggccgccacggccaccatgcccaacgccagaacaagaccccaggtgtcgatgtcgtaggcgccgttcatgggcgcacctccttatcccgcgtcagatcggtgagccgtcccgcatcgagcatcagcgtgcgggtggcgcgtccgtccggcggacggtgtcggatgcggatgatcgccatgccgtgtgcggccgcgtccgccatgatcgcggccactttggacgcgttgtcgtcgtcgagtccggcgtccacctcatcggccagcagcaccttcgggtcggtaagcagcgtgcgggccaacgccacgcgcgccgcctgaccgcccgacaggtcgtgcggggcgcgcgccaggtcgatgtcctcgcagcccatcgcgtccaacgtcgtgcggatgcgctcgtcgggcagcatctgctcggccttgccgcccttgccgcgaatcgcgagcgtccagggcaggcggatcgcctcggccacgtccttgccggtcagtatcggtttttgcggcaggtaggagacgtctcgccgccactgctgtgcgctgaattcgtcactgcccacgccgtcgaggacgaacgtgccgtgtgcgtgtgggttgagtcgggcgcatgcggtcagcagactcgatttgccggagccggacgggcccaccaggtcgatgatgtcgccgcgttccatgctgaaggacaggttgtcgaacaccgtgcgttcgtcgtccgccggcgatcgcgcggggatgacgcaggacacggatatggcttcgaagaaggatcgcatattcatccagtctagtcgggggccacgtgggaaaccccagcgttcacttcctgtatacccggtgtggcataatagccaaggcaatttttgggctttgcctaagctagtttgaatttgaaataggtgaaaaacgtggcacagactactaacgacatcaagaacggatccgtcctgaacctcgacggacagctgtggaccgtcatgaagttccagcacgtcaagccgggcaagggccccgccttcgtacgcaccaccatcaagaacgtgctctccggcaagatcgtcgacaagaccttcaacgcaggcatgaagatggaattcgagaccgtcgacaaccgcaccctccagtactcctacgaggacggcgacaacttcgtgttcatggacatgaccacctacgaccagatcatggttccgaagaccctcgtgggcgacaaggccaagttcatgctcgaaggcactgactgcctggtctccttccacgacggcaccccgctgagcgtcgatctgccgggctccgtggtcctgaccatcacccacaccgagccgggcctgcagggcaaccgctccaacgccggcaccaagccggccaccgttgagaccggagccgagattcaggtcccgctgttcatcaatgagggcgaccgcgtcaagatcaacaccgaggacggttcctacaccggccgcgagaacaactgatctccgcatccttaacagacgaccgaccgtataaaggactaggacagcagcagtatggcacgttccaccgcgcgcaaaagggctctgaacaccctgtacgaagccgacgaaaaaagtcaggatattctctccctgcttaacgaacgcatcgcacatcccggtgcccagaccccgcttcccgactatgccattgaaatcgtcaagggcgtggccgagcaccgtcgtcagatcgacatgaccctggacgaacactccacgggttggaaggtccgccgtatgggcgtggtcgatcgcaacattctgcgtatcgccgcttgggagattctgttcaacgatgatgtgccggacaaggtcgccatcgacgaggctctggcattggccaagaccctgtgcgatgacgattcgcccgctttcatccatggcctgctgtctgcagtgtgcaccgccaagaacgcagcaccggcaccggagtccgtgacggaagaggccgatgaggaatcgtccgattccgatgccgccgcatccgagccgaccgatgagggcgatgtttccgattcgtccgattcgtccggtgcatccgacgagcccgctgccccgtccgctgagattcagccgacggtcgattagtcatttgttgttcagcctccccattcgggaggctttttcatgggcggacacttgtgtcgccacacattctcaagtcggcaccttgccgacagccccgccagcggggtgagactttgcgcccaacggcgtgtgagtctgcgctggccgttaaccttggtacgaatacccgaaaaacataagggggttttggtgagccagaacgagtccgggaccatcgcaattccgatgtatgacaaggacgatgcagtcctcgttttggaagatggacaggtatatgtgggggcgccatacggcgccctcggcgagacgaccggtgagatcgtcttcgccaccggtatgaccggataccaggagacgctcaccgatccgagctacgatcgccagatcgttgtgcagacgttcccgcacatcggcgataccggcgtcaacagcgaagaccctgagtcctcccgcatctgggttgccggatacatcgtgcgtgatccctctccgaacgtgagcaactggcgtgccgagggcagcctggacgacgacctcgccaagaacggcatcgtcggcctgagccacatcgacacccgtaagctggtgcgtcacctgcgttccgcaggcgtgatgcgcgccggcatcttctccggcgacgccctgaccgaccaggccaccggcgcgctcaagaccatcgagcagctgctcgaagacgtcaagaacacaccgcagatgcagggcctgagcctgtacgacgaagtgtccaccaagcaggcctacaccatcgagccatgcggcgagtacgaaggcaaggagccgctgtacaccgtggccgccgtggacctcggcatcaagggcatgaccccgcaccgcatggccgaacgcggctgccgcgtgcacgtggtgccctccaccatcaccttcgccgaaatcgagaacctgaacccggacggcgtcttcttctccaacggcccgggcgacccggaacaggccggccccgaaatcgagctgctgcgccaggtgctcgacgccggctacccgttcttcggcatctgcttcggcaaccagctgctcggccgcgcgctcggcttcggcacctacaagctcaagttcggtcaccgcggcatcaaccagccggtcaaggatctgaccaccggcaaggtcgaggtcaccgcccacaaccacggcttcgcggtcgacgccccgatcggcaagcaggtcgacgcgccgtttgaaaacggcaagtacggcaaggtgttcgtctcccacatcgatctgaacgacgacgtggtcgaaggcctgcagtgcgtggacatccccgcattctccgtgcagtaccacccggaggccgcagcaggcccgcacgatgcggcctacctgttcgaccgtttctgcgaacttatgaagaacaactccaaggaaggtaagtgatatgccgaagcgcaccgacatcaaatccgtgatggtcatcggctccggcccgatcgtgatcggtcaggctgcggagttcgattactcgggcacccaggcatgccgcgtccttcgtgaggaaggcatccgcgtcatcctcgtcaactccaacccggccaccatcatgaccgacccggagatggccgacgccacctacatcgagccgatcgccactccgatcctcgagcagatcatcgccaaggaacgccccgacgcgcttctgcccaccctgggcggccagaccgcactcaacgccgccatggcgctgggcgaggccggcgtcctgaagaagtacaacgtcgaactgatcggtgcctccctggaagccatcgaccgtggcgaggaccgtgaactgttcaagaaggtcgtcgacgaggccggcgccgaatccgcccgctccgacatcgcccacagcatcgaggaagtcgacaagatcgccgagaagttcggctacccgctggtcgtgcgcccgagcttcaccatgggcggcctgggctccggcatcgcccacaacgaggaggagctgcaccgcatcgccggcgccggcatccattactcgcccaccgacgaagtcctgatcgaagagggcatcgagggctggaaggaattcgagctcgagctcatgcgcgaccgcaacgacaacgtcgtggtcgtctgcccgatcgagaacgtcgacccggtcggcgtgcacaccggtgactccatcaccgtggccccctgcttcaccctgaccgaccgcgaataccagaagctgcgtgacatcggcatcgccatcatccgcggcgtgggcgtggacaccggcggctgcaacatccagttcgccgttcatccgaagaccggccgcatcatcgtcatcgagatgaacccgcgcgtctcccgttcctccgcactggcctccaaggccaccggcttcccgatcgccaagatcgccaccaagctggccctcggctacacgctcgacgagattcgcaacgacatcacccagtccacgccggcctcattcgagccgaccatcgactatgtggtcaccaaggtgccgcgcttcgccttcgagaagttcccgggcgccgaccccaccctgaccacctccatgaagtccgtgggcgaggccatggccctggccggcaacttccaggagtccctcggcaaggccatgcgttccatcgacaagcgccacatgggcttcaactgggatggcgagaagccgtccgccgaggaagtggccgaactgcttgaggccatccacaccccgaccgaacaccgttacctgcagctcatgcgcgccatctggggcggcgccacgctggagcaggtgttcgcggccaccaagatcgacccgtggttcctgaagcagatcttcctcatcaacgagaccgccatgacggtgcgcgaggccgagaccctgaccccgaagctgctcaagaaggccaagctcgccggtctgtccgacgtgcaggtggcccacctgcgtggcttgggcgatgaaggcgagaacaccatccgcgagctgcgctggacctacggcctgcgcccggtctacaagaccgtcgacacctgcgccgccgagttcgacgccgccacgccgtactactacagctgctacgccgacgaaaccgagctgcgcccgcgcgagcgcgaggccgtgatcatcctcggctccggcccgaatcgcatcggccagggcatcgagttcgactacacgtgcgtgcacgccgtgcaggagcttggcaaggactatgacaccatcatggtcaactgcaacccggagaccgtctccaccgattacgacatgtccgaccgcctctacttcgagccgctcaccttcgaggatgtgctcgaaatctacgaggccgagaagaggatgggcccggtcaagggcgtcatcgtccagctcggcggccagaccccgctgtccttggccgcgcgtctgaaggccgccggcgtgccgattctcggcaccaccccggaatccatcgatctggccgagaaccgtgagctgttcggcgaggtgctcaagaaggcggagatgaacgccccgcgttacggcaccgccctgagcctcgaagaggccatggacgctgcccaccgcatcggatacccggtgctcgtgcgcccgagctacgtgcttggcggccgcggcatggaaatcgtctacgacgacaagcagctcaccaagtacgtggaccgcgcgcttgccgaggccaaggccgataccgtggtctccggccgcctgccctccccgctgctcatcgacaagttcctgcaggacgccatcgaaatcgacgtcgacgccctgttcgacggcgaggaactgtacatcggcggcattatggagcacgtcgaggaggccggcgtccactccggtgacgccgcctgcaccctgcccccgtccaccctgtccgacgaccagatccgccgcctgcgcgaaggcacctacgccatcgccaagggctgccacgtgcagggcctgatcaacgtgcagtacgccttcatggccaacacgctgtatgtgatcgaagccaacccgcgtgcctcccgtaccgtgccgttcgcctccaaggccaccggcgtggcgctggccaaggccgccgcccgcatcatggccggcgaaaccatcgccgaccagcgcgccaacggtctgctgctgcccaagggcgacggcggcgacatccaccccggccagcaggtcgcggtcaaggaatccgtgctgccgttcaagcgcttccgcaccccggtgggcaagaccgtcgacatcctgctcggacctgagatgcgctccaccggcgaggtcatgggcttcgaccgcgacttcccgcacgccttcgccaagagccagctcgccgcctacgatggtggcctgccgacccacggcaacgtgttcatttccgtgaacgacaccgacaagcgtcagctgccgctgctcgccgtgcgcctcgaagagcttggattcaagctctgggccaccgagggcaccgcctccgtgcttcgccgttacggcatcgagtcgaacatcgtggacaagatcagcacccgcgtggacaccgatccggaagccccggtcgaggtgcatcacgccgccggctccgtgggcaagaacgtggttcagctcattgaggaaggcaagatcgacatgatcctcaacacgccgaactcgcgcggctcccgttccgacggctactccatccgtgctgccgctattgcagccgatctgccgcagtttaccaccatcaccgagttccaagccgcactgctggctatcgaggccgtgaagcataatgattatcagatcatgagcattcaggagcattcgaagcagctgttcgaattggagcgacgggagttctgatgactacacccagcagtgaggaattgcaggcacaacgttcggatttcggtctgcgactgagcaattcaatggccaaatacggaccgctgtgtgtgggcattgacccacatcgcaagctcctcaccgactggggatacaacgtcgacgccgaaggcgccgaactcttctccatgcgtatgctgcaggccgccaacgggcgcgccgcagcagtcaaattccagacgtcgatgttcgagcgctacggagccaaaggtttcgaagcgctcgagcgcgtgctctacgcggcacgacaaatgggcgtcatcaccatcgtggactgcctgcacggcggcctgtccaccacgatttccgccatcgcggacgcctatttcaagcccggtgcaccgttgctggccgacgccatcacgctgctgccgtactatggcgcgcgctcgttgaacggcttgattaccgaagcgttggaaaacggacgcggcgtgttcatcgcctccctgacttccaatccggaaggcatgagtctgcagaccgcgttgcgccagagcggcgattacaagggacgtaccgtggcctacggcatcgcctccaccgcgcagaagcataacgtggatatcgaaggcatgggctcggtgggtctgatcatcggtgccaccatcggccaatggatgcaggattccggcgtggacccctccaagttcaccggtccgattctttcccccggttacggttggcagggtgccgaggccaaggatctgaaaaccgtgttccgcggtacgcgcggcaacgtgctggttaccgtgtcccgctttatcgcctcgcatgggccggatatcgccgcactgagccaagctaccgagtcgattgcgcttgacgtacgtcagtcgctgatggaagccactgccgaaggcgcagaaaaccagtaatcagaacggaatcagatgtcgcggcatgcgtacgtatctatctcattgcatacgtcgcatcacgattcatattcttccctgttcgtcggggctgtaacagttaccggtcatctcgccggtgagccgttaccacattggattcataatcgctgcacaccacatcatctccggaggaacccatgactgaaaacacccatgccggccgtctaatcgtcctgactggccctaccgcagtaggtaagggcaccgtggaagccaagctgcgcgccgaccaccccgaagtgtgggtgtccgtctccgccaccacgcgcgctccgcgccccggcgaggttgatggcgtcaactactggttcctcaccgaagacgagttcctggcccgcgaagcggcgggggagttcctggaaaccgccgtggtgcacggcatggcccactacggtacattgctggctccggtggaggagcatctggctgccggcgtgccaacaattctggaaatcgatttgcagggcgcccgccgcgtcaagcagcgcgccgccgaactcgacttggaagtggtgtacgtgttcatcgcgccgccgagctttgaagagctcaagcgccgtctgatcggccgaggcaccgaaaccgccgaacagcaggcccgtcgcctggaaaccgccaaagtggagctcgccgccgaaaacgaattcgacgtcaccatcgtcaacgaaaccgtcgatcaggccgccgccgacctctggtc

SEQ ID NO: 3958 - DNA, 4351 bp, Unknown
  R22_24m  MAG No. k141_28440
gcgcacttcgaggaaatgacctccgacctgctgggccgctgccgcacgccgttcaacaacgtgctgcacgacgccggcatctccgtgagcgacatcgaccacgtggtgctcgtcggtggttccactcgtatgcccgccgtcaaggacctggtcaaggaactcaccggtggtaaggaagcgaaccagtccgtgaacccggatgaggttgtggctgtcggtgccgccgtgcagtccggcgtcatcaagggcgaccgtaaggacgtcctgcttatcgacgtgacccctctgtccctcggtatcgagaccaagggtggcatcatgaccaagctcatcgatcgcaacaccgccatcccgaccaagcgctccgaggtcttctccaccgctgaagacaaccagccgtccgtgctgattcaggtctaccagggtgaacgtgagttcgctcgcgacaacaagccgctgggcaccttcgagctgaccggcatcgctccggctccgcgtggtgtcccgcagatcgaggtcaccttcgacatcgacgccaacggcatcgtgcacgtgtccgctaaggacaagggcaccggcaaggagcagtccatgaccatcaccggtggttccggcctgccgaaggacgagatcgaccgcatggtcaaggaagccgaggctcacgaggctgaggataagcagcgcaaggaagacgccgagacccgcaaccaggctgaggccttcgcctactccaccgagaagctcgtcaacgacaacaaggacaagctctccgacgacatcgtcaaggaagtcaccgacaaggtcaacgctctgaaggaagccctgaagggtgacgacaccgagaaggtcaagaccgctcagaccgagctgatgaccgccgcccagaagatcggccaggtcctctacgcccagcagggtgctgagggtgccgcggctggtgccggtgcggctggcgctgacggtgccggcgcttccgctggctccgcctccggttccgacgacgacaccgtcgaggccgaggtcgtggacgacgatgacgacaaggacaacaagtgatgtccgagttcaacaaggacgactacctgaacgacctgccggatccctcagatgctgaggctgccggccaggccgctcaggcctcttcaggggctgacgcctccgccgagtccgactctgcgcaggattcggctgcccaggctccttccaatgaaggagccgacgcggctcctgccgcagctgagggagagaagtcggatgccggagagaagaccggcgaaggccagtccgattccgaagacaccctcacccccctcggcaaggccaagaaggaagccgcagactacctcgaagccctgcaacgcgaacgtgcggagttcatcaactaccgcaatcgcacgcagaaggagcaggagcgcttccgccagcacggcatcatcgacgtgctgaccgcgctgctgcccgccctcgacgacatcgaccgcattcgcgaacacagcgagatggacgactcgttcaaggccgttgccgccaagatcgacaaggctttcgagaagttcggcgtcgagaagttcggcgaaaagggcgaggacttcgaccccaccaagcatgaggcaatcctgcacaagccggatgccgatgccgacaaggaaaccgtcgacaccgtggtggaagccggctaccgtatcggcgaccgcgtaatccgcgccgcccgagtagtagtagcctccccgcaaaactgataacggccagctcgttaacgagctgacattaccttggctcccgctggcgggagctggcagccgaaggctgactgagggtggtcaaacactgaatataaaccaccctcagtctcgtttcgttcgacagctcccgatgttttatgcgacgtgcgcaattgcgcactgctatgaacagcccactgggctgttcatccagcgggagccaaccataaagactcttcaagaaaggagacatgaatggctgaaaacgaatggctcagtaaagacttctacaaagtccttggtgtctccaaggacgcttcggacgacgacatcaaaaaggcgtaccgcaagctcgcccgcaagtaccaccctgacgtcaacaagaccaaggaagccgaggagaagttcaaggacatctccgaagcctacgacgtgctgagcaagaaggaagatcgccaaaagtacgacgcgattcgccagttcggcatgggcggcgcccgcttcgccggcggttccggcgccggcggcttcgacgcttccggtttctctgatatcttcggctccatgtttggccagggtgccggtggcaacggttcgcgtatccgcttctccacttcgggcggcggccccaacaacatcaacgacatcttctcgatgttcggcggtgctgcaggtcagggcggccagtcgtatggcggctacggccaatcgccgtacggcaatgccggcggctatggctatgaggaggccccgcgccccgaaaacggcgaggaccgcaactccaagatcagcctgaccctgcgtcaggcggtcaagggcgctaccgtgtccctgtccgtggacggcaagaagttcaaggcccacgtgcctgcgggcgtcaaggacggccagaaaatcaagcttgccggcaagggcaagccgggcatcaacggcggcaaggccggcgatttgtacctgcacgtcaccgtcaagcccgatgccgcgttctcgatgcgcggccacgacatcgtcatggacctgcccgtaactgtgggccaggccgtggccggtggcaaggtcgaggccaaggatatcgacggcaatcccgtcaccttcaaggtgccggcaggctccagctccggtgccgaggtcaagctcgcgggacttggcgtccagcgcggcaaccagccgggcgacctgatcggccgcgtgcagatcatggtccccgccaagccgggtctggccgtcaagcacgccgccaaagaattcgacgaaaaagccggcgactatctcagcctgtaatcaggaggtgaacaatggcgcggttagccaaccaaatgaagcagttgtacgcgatgtgcgcaaccgcgctggtgatgggcagggccgatctcgacggagccgatgacgtcggcttcgacatcgaactgcccatcttcaccgtcggccaggcagccgaactgggcaacatccacccccagaccctccgccagtacgaccggctgggtctggtccgtccgcagcgcaccgatggcggcgcacgccgctactgcctgcgcgacatcgcccgcctgactcgagctcagcgcctaagtcaggatgagggcatcaatctttccggcatcgcacgcattttggccctcgaagaagagaatcgccaactgcgccgcgaagtcaaacgcatgcaaaccggcgaccaggagagcgttttcgccgcaggccgtgacggcaatatcgtggaggtacaacgctccaaccgcgcccgcctctggcgcaacgccatccgccgcgaaacccgcgaactgcccggccgcgataccgctgccgacaccacgcgcgaatccgactccacccccgccgattccaaatccatggtcctgtggggttggtgatttgctgttcggctgtcgtgcggagttggtgagataggtatatcgaatacgaatagttgaggattcactgcgacgtacggaggtaaccatgctgctcaaggccgtgttttgggatttggacggaacgcttatcgattcggagccgctttggcatgacggtgaaatcgagattgcgcacaacaatggcggcgagtggaacgaggacctcggttgggagtgctccggcactccggtgccacacgtggcagaggtcatgattgcgcatggctgcacattgagcgttcccgaaatcgacaaacagctcaaggattatgtgttcaaggcggaggtcgaacgtctgccgtggattcccggtgtattggacgtgctgcactcgctcaaggaggccggcattccgtccatgctggtcaccacgtcgccgcgccgtatggcggagaacatcatgaagcagtccgagggactgttcgccggctacgtctgtggcgacgatccgtacgaacacaagccgaaccctgcgccctatctggccgcagccgacaagcttggcatcgcccgtgaagacatggccaagtgcgtggtgctcgaggattcctcggttggacttcaggccggtgcggcatcgggcgcgactctgatcgcgcagactggctggattcgcacggatacttccggcctgggccagttcgcgtccatcgaatcgtatgacggtatcgatgcggccgcgctggacggtttcgtgcgccagcgtcttggtgagta

SEQ ID NO: 3959 - DNA, 4798 bp, Unknown
  R22_24m  MAG No. k141_28624
ctctccacatagtaagctgcgagcccctctgacgaggggagctgtcggcgaagccgactgggggagagaccgcggcacagccgcaaaaaacggcatcggccacaggccgatttcaaggtgcctccggtgggactcgaacccgcaatcattcaacggtcaaaccccaccgattccaacgtcttctgaacattctcgacggtctgcgcccacattttgcccacatcctgagaaaacagcagaccgcccatgcgctcagacaggtcgtccagatcctcgtcgaacaggtcagcatacacgtcgagcgtcatggcggccgacttgtggccgagctgccgctgcacggtcttgacgttcgcgccggactgcaccatgaggctcgcggcggtatgccgcagatcgtgaatggtcatatgcccgcgctcgatgccggccctgcgcaacgcgaccgcgaaccagccatcgctccgagtcggattccaaccgttcgtcatgggctcgtccaaaggcttgcctggagcggtgaaaaggaaatccgacggactgcgcccctcgcattgcccggcaagcgatggtctgagaatctgcggaaacatgacgacgcgaacgcgagactcgaagccgaaacaccggaagactgacgacggcaatgaatatggcggcggtattcactcaggatgccgccgcctaccaatacgaagggaacaatgtcacgaatcaccatcgacgttttggaacagcaggccgagcacatgggtttgaaggttttggaatccgatattccaggcaccacctgcggattgtattgcgaccggctgcggacgatctggcttgccgactggttgaacgaccggcagaggctctgcgccctatgccatgagattgtgcacgcgaagtaccatgatcttggctgcggcacgcggttcggagtgaagtgcgagcgtagggcgcggcgcgagacggctttgatgctgataagcccgtccgagttcgccatggccgaacggatgtgggacggtgacacatggcatatggcagccgaattgaacgtgaccacgcaggtgcttgaggactaccggcgactgttggaggaacggtcgcgcatcgcatgattttccgttccggctctattgtaaaagaatgttatatatgtatatatgtttagtttcgcttatatctacagtgtcagaggcgataaaaataagtagacatatcgcttataagtagaacatttggtatagttaaagaaacaacagaaaaagccctccgaagctctagaccagcttcggagggcaaatggaaaaccacacacgattctccacgcaccagtctaaaccgaggcgtggagggaaagcgatggacttcgtgggataccgcaatacgaagctcgttgagcaactgacaaggcaaggccgcatcaccaagacattcaaaggcaagcgcacattcgactccgaccagttcgcactgctgcacatgatggcgtccgccacctacgactggcctttggatgacaagacgcaaggcttgggcaagatgccgcgcacctacacctacggctggctggagatggcacgcgccctcggcatgaccctccccgacggcatcgaagagatcgaggtcatcgggaacgagccaagagcaccgaaacttgaaaacgctgcctatcagcgcataagcaaggccgcgaagaagcttcaggcgaacggtcttatcaaatgcctgcgcaaaggaagcccacagaaacgcaacaacgcggtctggctgctcaccatcggcacgccggaggagaacgctgatgtcgaagcgtacgtgcgcgaacgtatgcgtctctgacccgtggcgcacgcgcagcggactggatgtgacaggcagattctcaaggatggcttgtttgagaaacgctcatgattcatcagccgtcgattggcgggataatccttgttgagacatattgcaggagagcaaggaggacgatatgagaagaatgagactgacggcaacgctcactgcggcgctattgctgcttgccggctgcggggcgcaacaaggagccaacgaaggcaatcagccgcacaagaagcccgagcaagcccagcaacagcccgaaccagagaccagcgagcgtgggaaccgcgtgaagcacatcggagacaccgcatacatctacgctgacgcctcaagaaagacggagtgggcacgatggacggtgacgaacatcacgctcgacgctccctgcaccgacgagtatgccgagcctccggagaacggtcacatggtcgtcatggacgtgactgcccagaccacgaaggacttgccaaccgaccagccgctgtatctgggcgtgacgggcgattggcagtacgtgctcaaggatggcacgatatcgaacgcacccgtgaatggttctgcggcgttgtgcctaccgcaggccgataggctgccggacgtaatcggacccgccagcaaggcccaaggaaagcttgtgttcgaccttccaaccacggacgggtatctggtctataaggacggcgacgtcaccggctgggaatacccgttgagctgaacgacacgaggcaagaggctcggagggttcggtaatgttaaattatgcaatatcgttgaagtgaaactcaaactcacgcccgaaactcaaactcgggtgcgaaaaatcgcatggaacacaatgcccctctctcagctatggctgggggaggggctctttcttatcggctcatcatcttggtcagcttgtagcgcaccgacctctccgcgtcgagaatggcattgcactcatgtcctacaagactcgctccggtcatcttgaacacgatgacatggtccctcatcggatcaccccagtaacgcatctccagcgggtctatcggcatgctgaaccggttgccgtggtttacggcgtagtcatggatggcctgcaatgcgtgttcggcgccttccctgtagccttccaagtaggcttcgtctggttcatcgttgctcatgcggtcaagtatagtgggtgtttttgtgttcatgcgtggtgcttgaatggcatcgttagctaaaagtgaaaggaatggtccaataccagtctaacgagtagtattcgagtggcgtaggaaataaaacctttaatattacattagttcgttcgattttacattagttggctcgattttacattagttggctttgtttgatgtggttttcagagaaaaagcactgaattcagagaaagatcactgaattcagagaaaaagagaccccggccacccgcataccgcgagcgccggggtgcgaatgtttcttcacgatctggctaatcctgacacattcattccggcgcaccgcgccatgtaaaaaagaatgttaaaacatgtattacttatatatgtgtaattgagattacatcattcttggggattctattactttaaatggtagtgcccgagtttttgcgcactttggtcttcgcccgtccccgtggcgatgatcagttcgctgactgtacgttctcaccgagccttgacatgtcgaggtagcgtcgcgtcgaccactcgctggaagttacgtagcggactctcgcgcagatgagcatcaacgcgctgcgcccgtccgggaagctgccgaccacgcgcgtgcgccggcggatctcgcggttcagccgttcgatcatgttgttcgttcggatgcggcggcgatgctcgcgggggtagtcgtcgagcaggtaggtcgtggtctcgccgatgccctccctgaggcatttggcggcctccctcagtttccgcgcctccatgtccttggcgacggattccgccttctccagcgccttgtccctcgattccatggagaatatggccttcagcgcgtcggcggcccagtccctgtttttggggttgaccttggcgaggatgttgcgttcgaagtggaccatgcaccgctggtagcgggcgccgggcagcaattcgttcacagccgccaccagtccggcgcaccggtcgcccgtcaccagcctcacgcccttgaggccgcgcgcgagcatgcctttgatgaattcgcgccagctttccgagtcctccttcatgccctcggccaccgaaagcacctcgcgccgcccgtccataccgacgccgacggccaccaggatgctcacgttctccacggacccgccccagcaccttttgtgccacacgccgtccatgaacaggtacgggtaatcctgttcgaggggcctgccacgccattcgtcgatgtcggcgtataccttcttgagcttgtcgctcagggtctgcgagggcatgcggtcgccccacagcagctggctgacatcgtcgacctgccgggtggagacgccggccaaatacatgtcgatcagcgcctcctcgacgctctcctcgcgccgacggtatcgttcgatcaccgccgactcgaacaccgcccctttcagtttcggcaccttgagactcatcttgccggccttgacggtcaggtcgcgctcgtagtggccggcccggtaggccttccgctccccgctgcgctcgtagcgcgcggcgccggtgatctcgtcggcctccgcgtcgagcatcgcgttcagggtctcctcgacgcttttgcggaccatccggtccagggtggtctccaacatggcctggtcgacctgtagaatctgctgtgacatggcttcgtgccctcgtttccaatcgcggtttgttttgtttggcgacagaaaatcgtacacaggacacgggccatgtctctatctcaggcctcaaccaatttgcgcaaaatctcgggcgttatc

SEQ ID NO: 3960 - DNA, 8756 bp, Unknown
  R22_24m  MAG No. k141_29517
ctggacctttggttaaggtgagagcatgagcgagagtgaacgcacagaacgccgtcgcgtggtggccatggtgggcaatcccacttccgataagggccgtggtgccaaggtggatgcgcgagtattgggactgctggaggacgccggccgtgcccataacttcgacgtcatcgacatcaccggcgtaagtttcgacgattccctgaaccaggcgcgtgaacgcgcgcacgagtacgactatctggtggtggtcggcggcgacggcatgatcgcactcggtgccaatgccgtgggttgcggcggtaagccgctgggcatcgtggccatgggctcgggcaacgatttcgctcggggacttaagctgccggtcaatcgcatcgaaaccgcagtggaaggtatcgtcggcgctatcgtgcgcggatcacacattgatgtggacatgggacgcgtgacctctttggatggtggctatgccgtgaacccatccaccggcggggaatacgagtaccgggagaacaagtctgccgagcacccgattgaccggtactatgcgggcatgctgtcctgtggtcttgacgcaagtatcaacgaccgtgcgaatcattcgcatctgccgaccggcaccatgcgctactttgcggcggtgctggtggagctgacgcatatgaagcgttatgggtaccacgtcaaggccacgctggcggacggtaccacggatgaacgagacatcatcacgccgttgctgacgattgcgaattcgcgtcatatcggtggcggcatcgaggtctcaccgtactcctgcttctccgacgggctgttggacctggtgtggatgaatcatgtgccgaacttcggcgaatgtgcggtggccatctcgaacgcctataacggcaagctgctcgcctcaaaggtgttcgggtggaagcgcatacgcgagatcgaagtcacgcgagccgcagaaggcgacgagccaccggtgctgatggcggacggcgaatacatcgggcatctgccattcagggtagtggccgaggactgcgcgctacgcgtactggtaccgccggccgtagccgcccgtgaggtggactcccgacaggaagtgctcgacgccatcgcccgagacggtcgcgaccccgtaaccggccagttcgcctgacctgattatattggctcccctcattaggctgagccgtaaagcaaacagcccagtgggatgtttgtaggcgagggttcgacgatagtcgaaccaggagaaagtcagccgtaggctgtccgcgattgcggacgagctggccgcgaagcggactgaggggagtgcgggagagcggtaccagagccaatggccgtcagacctcagacgacatagctttcgatatgcagcgtctgcgccatgacctctttgatggttcggtcgctgatgttcggatgcgagcgaaccagcgagataagccccacgattagcgtgaagaatgtctcatggacgttggtgattggcagaccatgcatctgctcgaaatcacgtacggtggtctgggcaatgtagtcggcaatacggtccgccgcgcggtcaatgaacttgatatacagttcggcgttgccatcttggatcatacggtttgagaaggggctctcgtcggcgattagggaacggagcacatgcacgatgtcgtctaatgccttgttcacgttgcctgtttcgcgcgcttggttccactgcttcaacgtggtgaggatttcgtcgatgacgtcatcgagtactgcgtcggctacggcttccttgtcttcgaagtagtggtagaacagcgaacgcgtcataccgacttcgcttgcgatgtcggaaacggtgattttggagaagcctttttccagacacaccttgcgcgcggcttgcacgatggcgtcgcgccgggcatcgccacgggtggggcgtttctcgtcgaggatatcgctcatgggcacctcctgactacaaccgttattgacactatgttaatacaaagaaagcggttaataacaataaaaatgcggtaaccgttgtcagatgaatgtcgttggaatataaagagttttcccgattcggcagctatgagcccggtttatcttgactttttatcggttaattctgagggcaaaggtaggttagtagctatggcacttgcactgtatcgtcgctatcgtccggacaccttcgaaggggtcatcggccaggaccaagtcacggtcccgctgatgcgcgccttggacgaaggcaagcttacgcatgcctatctgttctcagggccgcgaggatgcggtaaaaccagctccgcgcgtatcctggcccgttgcgtcaactgtgccaaagggccgacttcccacccctgcggcgaatgcgaaagctgcaaggacctggccaccggcggtccgggttccatcgacgtggtcgaaatcgatgcggcctcgcacaacggtgtggatgatgctcgagaattgcgagaacgcgctggtttcgcccctgcgcgcgaccgctataagattttcattctcgatgaggcccatatggtcacgcagcagggcttcaatgcgctgcttaaaatcgttgaagagccgcctgaacatgtgatgttcatcttcgccaccaccgaaccagacaaggtgatcggcaccatccgttcgcgcacccaccactatccgttccgtctggtgccgcaggaagtcatgggtccctacctggagacgatctgcgacaaggaaggcatcaagcccgagcccggtgtgctgaaactggcgatgcgcgccggtggcggctccatgcgagataccctgtctgtgcttgaccagctgatggttggttcggtcgaaggcgttatcacccatgatgccgctgtagccctgctcggcttcacaccggaggcgctgatcggtgaggcagtggatgcggtaatcaatcacaacggcgaagccctgtacggcgttatccagaaagtcgtggtcggcggattcgatccgagacgattcgtcgaagacctgctggctcgtgtgcgtgatctgctggtgcttacgttggccggggaccgtgcggaatccgtgctgtccgacacggctgaggccgaggatatggacgatctgcaccgccaagccaaggcgctgggactgggcgcactgaccgccatggcagacatcatcaacactacgttgggtgccatgaccggagccatttctccgcgtatgcgcttggaactgctggccgcacgattgttggccggcagtgaatcaggctttgcaacagccgctcccgcgccagcttcttctggcatgccgcctgcggctgcttcttcgacttcgactacgtcagccgcttccggtacgggggccagtggttttgccggcgcatcgcgaggcgggtttgccggagcctcacatggtggattctccggtgctgcacgcaaccagcaagcagccgcgcctcagagcaccgcttcccatgaatccgctgtgggagacaatggccctgtcagcagcccagtcagcgaccggcccgcgggctctccgtctgcgcaacctgccgcagcagctgctgctgccaatgcctggggtgctcccgccacgtcgccggccgtcccggcccaaccggtgacctcgcctgcggcatcggataatcggtccatcgacgagaagtgggatgcagccgtcgccgctttgccggaaaccattcgtgaatatgtgtcacgagacaaggtgccgaccgtaaaattcggtcccaaccgtaagagtctgccttgcctgtcgatgacgttcgacaagtcgctgagccagcacgctttcgccttggccgtggacaacagcggtaagaaggcggcgtccgtggtgttggatgccgtgcgcaacgagttcggtgccaatgcggttattgcaccttctgcggtcgcggcgaatggcgagcgagtcgaatccgtcaaacgtatgagcccggagcaattggccaaggtcaagcagcagattgccatggccaaggccggattggccgcgtcgagtttgggcgcgggtctgggcattcatatggggagcgagccgaaagctccgaagccgactgcaacaggccaagccgaggatacggacgacagccatcgagccggccaatccagtgcatccacggcggcgaagagctggagtgacgatgacccttgggccaagccggccgtaagcaacgcttcaccgcaatctgcagacgggttcgcacctaacgagcccgctgctgtgcctgcgcccgaagagcatcacaagaagcatgttgcggttccggacatcagtgatggtgttgatccgtgggccgctccggctgctcctgttgcacccgctgcgtccgttgcgtccgctggacccactggacagtccacggggcagccagccaccgcagctcccgctacggcagttgccggcgcaagcgatgatccatggaatcagccgcaatctcaggctacggcctcgctggcactgcaaccggtcgaagccgacccgtggaaccagccatatcagcagtctcctcacgatgatccgtggaatcagccgcaggggaaccatgctcaggcggctccgcagccaggagacgacccgtggaatcagccgcagtcccagactccggcttcttcggttcctcagacagtgtcgggcaatatgtcgggcgatgacccgtggaaccagccccaatcggttccgcagccggctgccggcgatgacccgtggaatcaaccgcagcccgcacagccgacgccgaatgccgacccgtggaatagccagccgcagccgcaaccgcaagtcgcggccgaggacgacgaatactcgatgaacgaccagtcgctcggcgaggcgacggccatgaatcttgacgatctgaaaaagctattcgaggtcaaaaaagtcgagcaattcgcggcagatgatccgaagaaccccaagaacatccagcctgccaagaagcactcggatgaataatgaggacgaataacgaggaatacccatggcacttgcttatgacggcgcaatacagcgactgatcgacgctttcgggcggctgcccggcatcgggccgaagggcgcgcagcgtatcgccttctacatgctgtccgcgcccgaagatgaagcgcgcgatttggccgaggccatcgaggaggtcaaggccaagatccgcttctgtgatatttgcggcaacgtgtgcgaatccagcccctgcccggtatgcgccgacccgagacgcgaccgttcggtgatctgcgtggttgaagagcccaaggacgtgatgagcatcgagcgcacgcgcgaataccgcggcctataccatgtgctcggcggcgcaatcaacccaatggccaacgttggccctgccgacctgcgtattcccagtctgctcaaacgcttagaaggcgatgaggtcaaggaagtcattatggcgctcgacccgaatattgaaggcgaggccaccaccagctacttgacccagctattgcgacccgtaggtgtcaaggtcacccgacttgccagcggcctgccggtgggctccgacttggagtacgccgacgaaatcacgctgggcagggcgctggccggtcggcgtgaggcctaggccagcgtatcattggcgctttcgcccttgcgacgcatccacggccagaatgcgccgtggcggatgatgcgcgcggccttgtgccgtcgtgccaaccagataatgaacagtcctgccgccagtatgcctaggccaacaccaagggcgatattgcgcgcgtcaagcacgtcattcggctcgggggccggcatcggaattgccacgcggtgcccggagataagcagtcgatgcgtgttcacgccgtatggcgtacaggtcatcaaggtgacacggtcctcacccggcacaatcttgagcttcgacgtgtcatccggcaaaatcaccgaaatgcggtccactttgtagcccaaagtttcgcccatgacaaggtattcagttatggggttctgcggaaacctcgccggtttgctttcgtttgccggtaattgatagttaaccgctcgaatctcaaaggatggatgcggctgtctcaaagaaccaccggtgaaaacttgaatatttgctgaacaacgtaggccatacccgtgtccgcatgccggcgcggggtcgcggggtgaacgcgacagcccttataatcgttgcgtttgcgtagaatatcgaccaaacaaatccctaagagaagaacaaaggacagcagtggctctcatcgtgcagaagtacggcggctcgtcggtcgccgataccgattcgatcaaacgtgtggccaagcgcgttgtggagacggagaagaagggcaataaggtggccgtggtggtctccgccatgggcgataccaccgatgaccttatcgatcaggcgctgagcatcgactccaacccgcccgagcgcgagatggatatgctgatgactgcaggcgagcgaatttccatgagcctgctggccatggccattcacgccgaaggcagccgcgcccactccttcaccggtcagcaggccggcttcttcaccgacacccgttacggcgcggcccacatcaaggccgtgagaccggaccgcgtgaagaacgcgctctcattgggagacatcgccatcgttgccggcttccagggcatcaacgccaagggtgacgccaccacgctcggccgcggtggttcggacacgtccgccgtggcactcgctgtggcccttggtgccgacatctgcgagatttacaccgacgtggacggcatctttaccgccgatccgcgcatcgtgccttccgcccgccgtattccttccatcggctacgaagccattctggaaatggcctcctgcggctccaaggtgctggcactgcgctgcgtagagtacgctcagcgtttcaacatgccgctgcatgtgcgctcttcgttctcccgtcgccccggcacgctggttgtgcctgacggcattgacccgcgcacgctgccgaacctcgactgagcgcggctacagcgaacaataatcgtaagtaatttcaaccaagacaaggcaagacatgactgaagaagaagcgaaatccatgggcgacctgttccctgacctgggccccgaggcaccggtgatttccggcattgcccacgatcgttccgaggcgctggccaccgtgcgtggcgtgccgaacgagccgggtatggcagccaaggtgttcaccgagctggccaccgccgacgtgaacgtggacatgatcgtgcaggccggcgcatccgttggcactgcagacatctccttcaccgtgcccgaatcggccgtcaagcaggtgcagaacacgctgctcgacaagcaggaagtgctgggttaccactcctttgatgtgaacaccaacgtcggcaaggtagccgtggtgggtgttggcatgaagacccacgccggtctggctgccaagttcttccaggccctgagcgatgagggcatcaacgtgctgatgatctccacttccgagattcgtatcgccgcactcgtgccgctcgatcagctcaacgacgccgtcaaggcgctgcacactgcatacggtctcgatgccgatcagatcgaagccgtggtgtacggcggtactggccgctgagccgcgaattccgcgcctaatacgatgaaagccctccttgcggagggcttttgcgattttaacgagattcaactacttcttagtgatgtagcctagagccttgagcatttcggcgcattcgagggcgccgccggctgcaccacgcagggtgttgtgggccagacccacgaacttccaatcgaagatggaatcctcacgcagacggccgatggaaacgcccatgccaccctcgtagtccacgtcgagcttgacctgcgggcggtcatcctcggtgaggtactggatgaagtgcttcggcgcgtgcggcagctccagctcggaagccttggacgtgtagttcaccagacggtcgataagctcttccttggtggccttcttgccgaagttcaggaacacggtggcggtgtgaccgttgagcacgggcacgcggatgcattgcgaagtgatcttgaggtcgccgtcgaacggcacgatctcgcccttttcggcgtccacatggccgaacaccttgagcggttccttctcggacttcgcttcttcaccagagatgaacgggatgatgttgcccaccatctcaggccaatccttgaaggtcttgcctgcgccggaaatcgcctgataggtgctcacaaccacctcacgcggctcgaattccttccatgcggccagtgccggcgtgtaggcctgaatcgagcagttcggcttgacggcgatgaaaccacgagtggtgcccaggcgcttgcgctggtgctcgatcacctcgaagtgctccgggttgatctccggcaccaccatcggcacgtccggggtccaacggtgagcgctgttgttggagaccaccggggtctcggtcttggcataacgctcttcaatggcgcgaatctggtccttcggcatgtttaccgcagagaacatgaaatcaacgccagaggccacggactcggcatcgtcgccatcgacgaccaccatgttcttgacgtattcgggcatcggggtttccatcttccaacggtctccgaccgcctcggcatacgtcttgccggcgctgtgcgcggaagcggcaagggtgaccacctcgaaccacgggtgattctcaagcagcgtgataaaacgctgaccgaccataccggtggc

SEQ ID NO: 3961 - DNA, 13272 bp, Unknown
  R22_24m  MAG No. k141_30872
gcgttcgatggagccgaacagggcgcggtgaatcatcaccggacgctggtgggtaccgtccttcgcgatgtactcgagctggaaacgctcgggcaggttgaagtcgagctggatggtcgagacctgccaggtgcggccgatggcgtcgcgggcctgcacggagatcttcgggccgtagaaggcggcgccgcacggatcgtcgacgagctcgaggttggattccttggcgacctcggcgagcgtgttggtggcctcctcccagatctcgtcggagccgacgtacttgttcgggtccttggtggacagctcgaggtagaagtcggtcaggccaaagtccttgagcaggttcagcacgaaggtcagcaggctggtgagctcgtctttcatctgctcgcgggtgcagtagatgtgggagtcgtcctgggtgaggccgcgcacgcgggtcaggccgtggacctcgccggacttctcgtagcggtacacggtgccgaactcgaagaggcgcagcggcagctcgcggtaggagcgctgacgggacttgaagatcaggttgtgcatcgggcagttcatcggcttcaggtagtagtcggcgcccggcttggtgatgttgccgtccgcgtccttctcctcgtcgaggtgcatgggcgggtacatgccgtccttgtaccagtgcaggtggccggaggtctcgtacaggccgcccttggtgatgtgcggggtctgcacgaagctgtagtggtgcttgcggtgcatctcacgggagtagtcctccatcgcgttgatcacggcggcgcccttcgggtggaacacggccaggccggggccaatttcatccgggaaggagaacaggtccatctcggcgccgagcttgcggtgatcgcgcttggcggcctcctcgagacgggtctggtaggccttgaggtcttccttggtggcccacgcggtgccgtagatgcgctgcatggtcgggttcttctcggaaccacgccagtaggcggcggcggaacgctcgatcttgaaggccttgatgtagcgggtgttcggcaggtgcggaccgcggcacaggtccttccaaaccacattgccatcacggtctacgttgtcgtagaagctgagctccttttcagagatctcggtggcggcggccgggtcgaggtgtgcttccttgtcttcgatcagttcgatcttaaagggctggtcggcctcttccttcagagcctcttcctcagtcacggaacggcggcggaaggactgggaggacttgatgatgcgctgcatgcgcttctcgatgtccttgaggtcgtccggggtgaagggctggtcgacctggaagtcgtagtagaagccgtccttgatgacggggccgacgccgagcttggcgttcgggtagacttcctgcacggcctgggccatgacgtgggtggccgagtgacgcatgattgcgaggccgtcttcggagtcgagggcgatggggtcgacggtatcgccatcgttcagcggcgtgtacaggtcacggttctcgccgttgatcttgaccgcgatgatgttcttgtcttccgcgaacagttctacgccggtggtggttgcttccacctccttcgcttcgccgttgacggttatggagatggtagcttgcgccatgatttgtcctttgctatcggggcccacggtactaatgtgcaggcctggactggttaatcaacgtaggacacgataggttgggcgtgcgacaaataccaccagcatctgaaccaatacgaaaaaaacctcgccgaagcgaggtttcgttgtggagcggacaacgggactcgaacccgcggtctcaaccttggcaaggttgcgctttaccaactaagctatgtccgcaaaggaatccgccgtgagaagcggaatccagtgggcgatgtaggaatcgaacctacgaccccttcggtgtgaacgaagtgcgctagccgctgcgccaatcgcccgaatattcggttcttcagttatatccagtcgaattgcttcgactttcgtgggcgatacaagattcgaacttgtgaccccttccgtgtcagggaagtgcgctaccactgcgccaaccgcccgggtcatatttcatcccattgaattgcttcgctggtctgagaggtgggtacgagagtcgaactcgtctatacggctttgcaggccgctgcctaaccgcttggctaacccaccgtaaggtctgtcaactcacggacctagagcggacaacgggactcgaacccgcggtctcaaccttggcaaggttgcgctttaccaactaagctatgtccgcgtgtgtttccttggcgaggtctccctgccgaagcacgagtgtttactatactcacatgcgtgtagttcgtccagctgcggcgtgtcgcctgtaattgcatactctcgcttatggctaaagcgtgcgcttcgggcaatgaattccagttactctagaggtatgagtgaagcagcgaaggacaccggcgcagtattgatcgccgcattcgagggatggaatgatgcctgtcaggcggcgacgaacgcggtgcgccatctggtcaagcgatatgagtcccgcgagattcgtcatattagatgtgatgatttctatgactatcaggttgcccgtcctatgctgtgccatgttgcgggacgcaccaatcttatctggccgcagaccacgttctacgacatcacgttggacgcaggcaagcatatctatgcgcagatcgcccccgaaccgaactatcggtggaaggaatactgtagccagagtctggccattgccgatgagctggatgtcaatcggatcattacgttaggttcgatgttctccgattgcccgcatacccgtccgttgcccatcgccgtcagcgacggagactgtcaatgcgaaggagaccggtcgtataacggcccggtaggcattcctaccgttttggatgtggccgccgcgcagcaaggttttgctcattcctcgatgtgggtgtccatcccccaatatttgggcagcgacgaatgttctgccggcactatgcgattgctggatgcgttgggcaagcatatcggcttcaccttcgatacggcagatctgaagcagaaagccgaacagtggaaggcgcaagcctcgatactggttcgttgtaatgaccagcttcacgattacgtggagcatttggagcacgactacgacttgcagcagaaagccgaggcggaggcttccttgggagcgccccaggccgaacaactagtcaaagaagcagaagcgtttctgcgccagatgggcaattagcccatatatggcgtgctcccgctggatgaacagccctgtgggctgttcatagcagtgcaccatgtgcacgtcgcacaaaatgtcgggagctggctcgcgtagcgagactgagggtggttctgctggcatattccagtgaccacccccagtcagcttcgctgacggctcccgccagcgggagcaccattatattggagtcgtctatcgacccgtcttatgccgcagccgccacggagggatcgatggccggcagcacgcccacaatcagcagcaaggcgacgaccacagccaaaccgatgcggtagatggcgaaggccttataggagaagttcgatacgaacttcaggaatccgatgatcacgatgtagccgagtacgaagctgatgaccatggccacgagggtcggcccccagccggggaacatcgcatcggttttgtagttcttcacggccttgatggcttcgagcaaacctgagccgaacaccgcggggatggccatcaggaagctcagacgtacagcggcctcacgcgtgtagcccagtgcgcgaccgacggtgatggtgccgccggagcgggacacaccaggaatcagcgccatggactggcccaaaccgaagaggaacgcatcacgatacgtcatatcattcatggttttgttctggcgagccttggcatccaccatccacagcagaatgccgaataccaacagcacggttaccgtaatccacaggttgcgcaacgaggtctcgatgacgttctgcagagtgaagccgaggatgataatcggaatcgagccgacgataatgttccagccgagtgtggcgtaattgtcgccgcggcccatgcgggccttccaatccttgccgttcttgccgaacaggcagctgaaccagtgagtaaggatattgatgatgtcgtgacggaaatacagaatcaccgcaagttcggtgccgatttggatgatggcggtaaacgccgcaccgggatcagagcccagcatcaaatcgccgaaaatacggatatgcgcgctggaggataccgggagatactcggtcagcgcctgaacgatgccgagaatgatcgcttggaaaaaattcataacccctcgtgatttctaagtatttgatgtgttatgacgatgaacaccctacccaagggggtgtagaacaacactaagaatcggtaacatccacggcttctacaatgaaagtggatatagtacgtaagcgacgaagggagcattatggccacgtatcgcaaaagcagggcattcgcaccggaaggattcttcgaatgcgagggtcgaggactcgaatggttgggggcggctcatgcgcagggcggcccgcgcgtggtgcaggtatacggctggggcaaggattatctggatatcgaacgtgtgggcagcgcgtcccccacgcctcaggcggcacgagcttttggtgcggctctggcccatatgcatgatgtgggtgccgaatatttcgggtctgcgcctgacggatataacggcacatgctatttcggaccattgcaggacccagtgaaaatggataccggcgagtggaccgacccgatcagctatttcgctgatggacgtctgcgcccgatggtcaaccttggtgtgaggcgtggcgagctggataagcgcgatgtcgaactgaccgagcgcgtgattgaagcgttgccggatctgatgggccgagccgcgtccgacaagccggcgcgcatccacggtgatctgtggagcggcaatgtgatgtggaccgccgattccgggcagcccgaggctgtgctcatcgacccggcggcacatggcggtcatcgcgaggaggatctggctatgctgcacctgttcggcatgagctatctgagcgaaatcaccgagggctaccagtccgtgcatccgttgaaggccggatggcaggagcgtatcacgctctggcagctctaccccatcgccggccactgtgtcttcttcggcggcggctacgtcaacgaataccgctccatgtgccgctccctgctgaagtaacagacttggctcccctctctgaggggagccaagaacgcatccactctcagctcagcgcgtccttcaacttgctgaagaagcctttcttttggccagcctgtggacgggatgcctgggagacgtgcgtggcgcctgaatcgtgcgaggcggcgaactgttcgatgaggccgcgctcggtttcgttgagcttggtgggaatcagcacattgacgtgggcgatgaggttgccgcgctcgtccttgttgcggatgttcgtgacgcccagtcccttaagcgtcacagtgtcctcaggctggcagccggccgggatggacacggtcttctcaccatcgaacgtgtcaatggacagatcgtggccgagcacggcccagctcatcggcacctgaatccagcagtgcaggtcgtcgccatcgcgggtgaactgcttatccgccttgatgcgaatgtcgatgtacaggtcgccggcagcgccgccgccctcacccacttcgccctggttggccaaacgtagacgcgcgttgtcgttgatgccggcgggcacggtgacgcccacggtacgtgtggtacgcacacggccgtggcccatgcagctggggcacgggttcttgatgatggtaccgtggccctcgcaacgttcgcagggggcggaggtcatcatctggccgagcatggtgcgcacgaccttctgcatgaatccctggccgtggcagtcggggcaggtgaccggctgtgcgccgccctgggcgccggagcctccgcactcctggcacagggagaacgtgctgatcttgacgtgcgcggtgccgccgaacacggcggtcttcaggttgatggacgcggaggccagggcgtcgcggccgggctgggtacgcggcaccgggccctgtgagccaccaccgaacgcggaaccgaagaacgtggagaacacgtcgctcatatcgccgaagcccgccccggagaagccgctggcaccggcgttcggatcgttcgggtcgacgcccgaatcatacatacggcgcttgtccggattggacagcacatcgtaggcgttgttcacttccttgaacttgtcctcgaattcagggcccgcgatgtcggggtggtacttacggctgagcttgcggtatgccttcttgatctcgtcgtcactggcgccgcgttccacacccagcgtctcgtaataatctgccacttgattgatcctttgtgttcgtttggtctgcgggtcattgtgccacagacggcggtcagtcttgagtccggccctcggagaggaaggcggtcaaatatctggctacggccctgacggcggccatagtggccgcatagtccatgtgggtcggccctatggagccgacgaaggcgatgggttccgtgtcgttcgtctggctctccgtctcggattcggtttcgggttcgcctacgggatcgttccccgccggttcgcccgccgcaccgctgcgcccatagccactgctgaccacggaggcatgcagtaggccgggggtgtgcatttcggagccgatggccacgcccacgccggatgcattcgtctcctcgctcaggttgctcatgagcttcatcagcacgacctgttcttccagcgcgtcgaagagcggggccagatcggccagggaccgggagtgggccaggtgcgaggtgccggacatgtacagttcgtccgcgcgttcgtccaatgccatcgattcgaaggcgtcggccagcgcgtcggccacgccgcgcaccgactcgtagccggcgctggcggcgatggatcgcacggtctccgcggatttcgatagggacagtccgacacattgttcgttgacggtgttggagagccggttgatctcgtccacggcgggcatggatgcgatggtcaggccgtgctgggccacgcggccggtgtcggtaatcaccaccgcgagcaacgtggtcatggcaacgggcaccatctccacgtgccgcaatgtggccttggccagcgatggcgaggtgactatggccacttgaccggtgatttcggacaacagtcgtgccgaacgctgcagcgcgtccttgagactcaccgatccggacaggaagctgttgatgccgcggcgctgcgcctcgctgagcggcaccacggtagcaagtcggtccacaaagtatcgatagcccttttcggtgggcacacgaccggccgaagtgtgcggctgaatcagatatccttcatcctccagagcggacatgtcgttacggatggtggccgaactgacgccgagatcatggtcgcgcgtcagcgaagtggagcccacgggctcctgagaacggatgtaatcctccaccacggcgcgcagcaccagcatgcgtcttgattgcgtcatgcgcgcctccttatatatgcatacatattcatatcagtcacggttcactcagggcgtaccccgacggtcggttcgccacgccgcgacacgcgggaacccagaaatattgtctctttcttggctccgccacgtgcaggtggcgcacttcaccttagaacattgtattagcactccttaggcttgagtgctaatgcgttcgtttgcagcgtagcaatgttcactgtgaacgctaacagaacacaaactaccaaaacacgccaaaattgcaccgcaacgtcgcaaaccgacgctagcatggtaatcgcaatgtgagggcgtcaagcgcccggcacaagccggatacgcggcccgaccaattggaaggaaagtaatccatgaccgaattcaaggagaccgagctcgacgagcgcgccatcaagatggcgaaggtcctttcggctgacgcggttgagaaggcaggctccggccaccccggctcccccgtctccctggcgcccgtcgcctacacgctgtaccagcacttcatcaagcacgatccgaatgatcccaactgggaaggccgcgatcgcttcatcctttccggtggccatgcctccctcacccagtacgtccagctgtacttctccggctacggcgtgaccctggacgaccttaagaacttccgtggcggcgctgccacccgcaccccgggccacccggagtacggcctgaccccgggcatcgaaatgaccaccggccctctgggccagggcttcgcctccgccatcggctttgcctacggcgagcgtttccagcgcggtctgcttgacccggagaccccgaaggaagattccccgttctaccacaagatttgggccatctgtggtgaaggcgacatcgaggagggcatctccggcgaggccgcttccctggccgccaaccagaagctcggcaacctgaccgtgatcttcgacgccaaccgcatccagatcgaaggcgacaccaacctggtgctggccgaggacgtgctcaagcgcttccaggcctacggctggtacaccgacgagttcagcttcatccagcccgacggctcctacaaggaggacatcgagggtctggccgacgtcatcgccaaggccgaagccgccgccccggaccagccgaagctcatcaaggtccactccctgatcgcctggccgaccccgggcaagaccaacgacccgtcctcccacggctccaagctgggcgccgaggccgtcgccggcctcaagaaactcctcggctacgatccggaggagtccttccacgtcgacgaagaagccctggcccacgcccgcaaggtcgccgatcgcggcctggaggcccacaaggcctgggacgagaagttcgacgcctggcgcaaggccaacccggacaaggccgccctgtacgaccgtctgaaggccggtgaactgccggaaggcttcgacaaggcccttgacgaccttgaggccaccttcgaagtcggcaagggtgtcgccactcgtggcgcctccggctccgtgctcaacgccatcgccgccgtcatgccggaactctggggcggctccgccgacctcggtggctccaacaagaccgacctcaagggcgctgccaccttcgccccggccgagtgcgccactaagcagtggccgaactgcaacgagttcggtcgccagctgcacttcggcgtgcgcgagttcaccatgggctgcatcaccaacggcatcctgctgggttcccacacccgtccgttcggcggcaccttcttcatgttctccgactacgagcgttccgccgttcgtctggccgccctcatgcagatcccgaacctgtacatctggtcccacgactccgtcgccgtcggcgaggacggcccgacccaccagccggttgagcaccttgcttccttccgcgcgattcctcagcttgaggtcattcgcccggccgacgccttcgagaccgccgaggcttaccgttacttcttcgagaagaagaacaccctgcctggcgccatggttctgacccgtcagggtgtcccggttcttgccgagaccgctgccaaggccaaggacggtgtcaagaagggcgcttacatcctggtcgacaccgagggtactccggacgtcatcctcatggcttccggttccgaggtccagtgggctgtggctgccgccaagaccctggccggcgagggcgtcaaggctcgcgtcgtgtccgtgccgtccatggaatggttcgaggagcaggacgccgagtacaaggaggctgtgcttccggccgctgtcaaggctcgtgtctccgtcgaggccggcgttgccatgccgtggtacaagtacctcggttcctacggcaagcctgtctccatcgagcagttcggcctgcagggtgacggcgctcagaacatgatcgacctcggcatcaccgccgagcacgtggtggaagccgccaaggcctccatcgccgaagtcgaagccgccaagtgagcaactaagcaataattcaataattgttggctcccctccctgaggggagctgtcaggcgaaagcttgactgaggggagcaatgcttgagcccactcccctcagtccgcgttgcggacagctcccctctcccaggagaggggagcctagggcttgaatccaaggagaaaataaatgactgaagcaactcagcgtacgtccgacaacggcgtttccatctggctggacgacctgtcccgctcccgcattgagtccggctccctgcaggacctcatcgccaacaagaacgtggtcggcgttaccaccaacccgtccatcttccagaaggccctgagccaggtcggcccgtacgacgctcagctcaaggagctcggcaaggttgacgttgagaccgctgtccgcgagctcaccaccaccgacgtgcgcaacgccaccgacatcttccgcgagatcgctgaggctaccgacttcgtcgacggccgcgtctccatcgaggtcgacccgcgtctggcccacgacaccgagaacaccgccaagcaggctgtggaactctgggagaaggtcaaccgtccgaacgccatgatcaagattccggcaaccctcgaaggcctgccggccatcaccgccaccctggccaagggtatctccgtcaacgtcaccctgatcttctcgctcgagcgctacgagcaggtcatcgacgccttcatcgagggcatcgcccaggctgacgccaacggccacgacctgaagcacatcggctccgtcgcttccttcttcgtctcccgcgtggacaccgctgtcgacaagctgctggaagccaacggctccgacgaggccaaggctctggagggcaaggccgctgtggccaacgctcgcctggcttacgagctcttcgagaagaagtttgccgaggatccgcgttgggccgacctggctgccaagggtgccaaggttcagcgtccgctgtgggcctccaccggtaccaagaacgccgcctactccgactgcaagtacgttgacgagctcgttgccaagcacatcgtcaacaccatgccggagaagaccctgaacgctctggccgaccacggcaacggcgctccgtccatcgagggcacctacgaggagtcccacgccgtcatcaacaagctggctgagctgggtatcaacctcaaggacgtcactgacaagctggaggccgacggtgtcgccgccttcatcaagtcctgggattccgtgctggctgacgtccagtccggcatcgaccgcgtgaacgcctgagattattagctgatgcgcatttcgcgcattaactgattagctcacagaagctccgaccccaaccggtcggggcttcttacgtttgttgctacagtagtacgagcacatgagagaaaggccgaaccgtaatgaacaaacttgtcgcacgccagcggctggtgatgacctttaccttcttttcgatgttcttcggagcgggcaacctgatcttcccgccgtttgtcggagctcaggccggttccgcgaccataccggcggccatcggcttcatcgtctccgcggtcggcctgccgattctcggcgtgctggcggtcaccttcgccggtggcttcgacaaactcgccggccgggtctcccccaaattcgccctgttcctcggcttggcgatcatgctcaccatcggcccctgctttgcgattccgcgtacggcgaccacctcgttcgaaatgatggtggcgcctttcgtgccgtcctcctacggctggctggcccaactcatctactcgctcgtgttcttcacactggcgttcctgttcgcccagcatcccgaaaaactctccaaagtgctcggccgattcatgggaccgttgctgctggtgctgattgccgtcctgttcatcgcctgcctaatccacggtatcggtaccccggccaaaccgatgggcgactactccacaaaccagattgcacgtggcttcctcgacggctaccagaccatggatctgctcgccgcgctctatttcggcatcgtgatttccgcgaatatccgcacccagcaggtcgatgacgaatcgcaagtgcagaaggagaccgcgtatgccggactcggcaccggtgtgctgctgatcgtgatctacggcgcactgagctacgtgggcgtggtgtccggcgccatcgccaccatcgatcccgccaaagacacgggcgcgaccgtgctcaccaatctcacctcgtccctgttcggcgcgttcggtaccgcgttcctcggtatcgtcttcgtcatcgcctgcctcaacgtatgcaccggactgatcggtacctgcgccacctacttccacactcggttccagaccgttgcagggagaacgttgagctaccgcacctggcaggtcatcttcaccgtgttcagtttcatcgtgtccaacgccgggctaagtgcgatcatcaaggtttccgtgccggtgttgtccgcactgtatccgatcgccatcgtgctggtgctgctggcgctgacccacaagtcgctcggcgcgcgattcccacatgtctacttctggaccgtgctgctggtgggcatcgactccttcgccacctgcatctccagcctaatcaccgtcttcggcggctccatcggctggctggacacgacgctggccatgctgcccttgcagcaataccagctcggctgggtggtcccggctatcctcggtgttgccattggtatcgccgatgctccgcgacggtagttcttcccggtctgtgccggagtctggcggtcggtcggtgatggcggttgttgcgacgctcagcggtgccggtgtatcgttcgcaccactatacaccactatatgagcgcatttggggcggcatgatgctgcatccgaactgtccggcgattggcagaatgacctactatctctcgggccaagcaactgacgattatggagtctgcgtcacctcaccactgtggtttatgacggtgactgcgctgagtgttgtcgcgattctctgtctgaccgttgcgggagtacagggcttttcgcgccatcggctctgttcccgttgccctgttctggtcaggtctcacgttctttacc

SEQ ID NO: 3962 - DNA, 13769 bp, Unknown
  R22_24m  MAG No. k141_31081
gttcccatccctcccataaggcccgtccgcctgaaccgcaagatgcggtccgtggcggacgggcctgttcgttcctgcggtcggcggtcatgaacatacccatgtcggttccggcagtggggccggaaccggcggcgtgtcgactatcggccaggagtgtctatcagctagtatcagctggtatccgatatgggccgtggccctgcgccgcctgccaaaggagataaccgtgcgtgcatgacgtgacttcgcatggccaaaactgctgaccgcggacggacgcggcatcgctttcggtggcgactatagtcccgaccaatggccggaggaaatctgggatgacgacatccgcctgatgggccaggccggcgtcaacaccgtggcccttgccatcttcagctgagatcgcctccagcccatcgaagaccattgggatttcgactggctcgatcgcgtcatcgacaagctcggtgacgtgaccgtcgccggaccgcatgtgcaggtgcttgcctcgtatgccggcgaagaagcggatgagtgggagcttgacggcatggccgcgatcacccgcaacacgtacggcgaaggggaggcgtatttcctcggctgcgatctgggcgtgagcgatctgacgcgattcgtgggaggctggcttgccgtgcagccgcaggatggccggcagccggaagccaacctgcggtcgcccgccagcggcgtgacctctgacgttctgcacaccgtgcgtcaatccgacgacgccatattcgacttctatctgacacgtggcagatcggatgtcgaactgcgcgacatcgcaggggagccgatcgtcctgttccgggcggaacggggcagtgacggcggcgcgtatacggtgcatcgcaatggcgttttcgtgacgaagcgcccgaacccgtcggtgtagtcagttgcgacgaaacaggagggcggagccgcggacggttttgtgagacggtccgcggcctcaccgttggaagtcgcggactcggatcatcagcaacggacgcgccgttgatttccacttccggagcaacgatggtgagctttgccgcgacgagatgctgcaggacggtgccgacgtacatggtgcccggattctcccttcgccgctgcgctgcctgccgcagcagatgttccacggccgcatcaacggaaagcgagttgtcggactccagcttgaatggtttgctggtgaagaacgcctgaattcgtttgacccagtattgctcgatctcggtgaattgctctgctgtcggacgtaattcattgatgagctcggcatagtcatgcatcagcgccatggtgccgcggctggttcgtcccttaaaggttgaaccgatagaaccgtcattcattactttttcaacgataccgacacgctcattcgattgtgtccaatactgctttctttctgcatgaacaacggtactcggcaaggcggtaacgatagtcgcaaaggctaagaagcccgtacataatcgtttttttgtagtgtttcagattttcagtagaatggcgacagccaaatcccgctggcttgctagtaaagcgttgtcctcggggggagttttgtttgttgttgaaagataacgcggcatcgaatagataggggaggcccggcatgggacgtcatcagcgtgcagaaacctccggactcatctccttcttgatttgcgccatcgttggcgcggtatcgatgaacctgtacatggaatacgcgccggccatctggcagctgacgcaacgccgattcatggtatgttcgggcatcgtggcggcatgcggcgtcatttccttcattattggctatgcgcgcaaatcacgttcattgaacctcaaacatggttggtttgcaccgattcgtcgcattttcgaaatcgtcgccctttcggtggtgtatgcctcgaccattttcctgtcgtcttttgcactcatcggtgcggccaacgacatgatgggcaatgccatcttctccggctatatctccagcgtctgcgccgccttcgccggcgtggtggggtacatgacctttgtacaggcggagatgatgaacgccaaaactattgccagtctgttgccgttcttcgtcatctccggcgtggtcaccgccggcatgaccaccgacgacccatactggtatcacaacaacttttcgcagctcggcgacagaaccacgtttgcggcccgtatgttcaactccacgctgattcttgccggcacatgcatcatcatcgtcagctacttcgccatctccgaactgatgaccaccgaacggctacagcgcctctggcacgaccgcaccaacagagatccgaatcgcggctacgaaatcccacatttcatgctgcgcatctccattctgtccttcctgctgatggtggccggcctggcattcatcggcatcggcgtgtttcggtacacgccacacaatctcttgcacaatatatgcgccaaaggcctgccgttcgtcatgctgctgctgttcgtgctcctgccgtggcttgcgccacgcctgtccaaagcagtgatggtggcctccgacctgaccgcgctcgtatgcgctgcattctgggtcaatatgatgatgggtcacaacaccctcaccaatgtggaggcgttggctggtctggcgttcctcggctggttcatcgtgttctcgcgccagatcgccgccatcgaggccgatcgcgcggccgctcagttgttgcacgcgcaggccatcgaaggcggttttgagcagccgtcttccgcacctgatcagcagatcgaatcccgcatcgctgccgaccggtgaataatttgtttgatagatttggccttatgactgaacaactcgcgaatctctggcctgccccgctcgccacacagccgttgaacgctacggtaacggtgccgggcagcaagtccctatccaaccgctacctgattctcgccgccctcggcagcaagcccgttactctgattggcctgctgcgttcgcgcgacacggaccttatgatgggcgcactcgaagccctcggtgtccgctgcgacgtggattccgcaaccgacaccaccgtaacggttactcctcctgtatccggccgattccatggcaacgtcaatgtgttctgcggactggccggcacggtgatgcgtttcgtgcccggccttgccctgtttgcagatggcccagtgaattttgatggcgacgaacaggcttatgcacgtccgatgaagccggtgcttgacggtttggaacagctgggtgcaacggttgattaccacggcgaggttggccgtctgccgttcactattacgccgcctgcaaccttgccggctgcccaggcgcaggtcagcatcgattcgtccggttcttcccagttcatctccggcctgttgctgattagttccaaactgcctggcggtctgcacctcgcgcacacgggggagaagaccccgagcctgccgcacattcgcatgaccgtggccgatgtgaccggtgccggcggtgcggttgagaccgacgaatccgcccgcacatggacggttgaaccgcgcgcaatgcaactgccgagcaaggtgaccgttgagcccgatctgtcgaacgcggcgccattcctcggcgcggcattgatcgccggcggcacggtccgggtgcctcattggcctgaaaccaccacccagccgggcggcctgttgcccggatatctggagcagatgggtgccgaagtatcgttcccgaccatcggcggcgtgcgctattgtgaggtgaccggtgacggcaccgtgcgtgggctgggtacgttcgatttgacggcggccggggagattgcgccctcgttggcggcgattctggtgtttgctgataagtcgacagacatggttggtattggtcacctgcgcggccacgaaacgaatcgtctggaggcattggtcaacgagattcgtcgtgttgggggagcggctgaggaattgcctgatggattgcgtatcgaaccggtgccggcggagacgttgcacggtgccgtgatggaaacctatgctgatcaccgtatggccacgttcgccgcgatgctggggctgcgtattcccgatatcgaggtcatcaacgtggccaccacgcgcaagaccttgcctgatttcgtcggtatgtggagtggcatgctgaggcagtaaggggtcctgtgttctggtggaactcccctcagtccgctacgcggacagctcccctcagagaagggagccaagttatagggcctggatcccctctctgagtggatctgtccgccggaggcgactgaggggagtatgacgcaggggtagtggtctcatgaccatatacgaatgggggctgattccaatcggaatcagcccccatagtgttgcaactagagattagtgagatgcctaacggcggttacttacttggcgaaggtgttgccgtaggtatcggtgccagcctcggcgattgcggcggacttgcgggcgatggccagttcttcgttcgtcgggatcacggcgatgatcacggaggagtccggagtggagatgatgcgcggttccttggagcgggtggcgttcttctcctcgtccagcttgacaccgaacggagcgagcttgtcgcacaccatcttgcggaccacgtcgtcgttctcgcccacaccagcggtgaaggtgatcacgtcgcagccacccatctggtaggtgtagttgccgatgtagctgacgatgcggtgcacgtagacatccagagccagcttggcgtcctcgttgccttcggacaccagacggtgaacctcacgcagatcgccgtagccggtcatgcccatcatgccggaacgcttgttgaacagggcatcgagctcgtccacgttcatgtgggcgttgcggatcaggtggaagaccacagccgggtcgatgtcaccggtacggccacccatcatcaggccctcaagcggggtcagacccatggaggtctcaaccggcttgccggagacctcagcggaagcggaagcgccgttgccgatgtgcagaacgatctgcttcaggccttcagccggcttgccgatgacgtccggcaccacggaggagatgtactcgtgggaggtgccgtgggcgccgtagcggcggatgtggtactgatcggcgatttccttgttcagcgcgtaggtgctggcggccttcggcagctggaagaagaaggaggaatcgaagacgaagatctgcggaacgtccggcagcagggagcgcatgacttcggcacccttggcctccgggccgttgtgcagcggggcgagcacagccagatccttgacctggttgatggtcttgttggtcacgagggccggcttcgggaagatggagccgccctgcaccacacggtggccgacggcgacaatgccagcctcagacaggttcgggccgtactcctcgaagaagccgagcacgcgcttcagaccctgctcgtggtcgtgaatcggctcttcaagctcgtgcttttcgccgttgtactcgtgcttgtagtggccgtcgaccggctcaccgatcttctcgacgaggccggaagcgaggccttcgccggattcgagatcaaccagctggtacttgatcgagctggagccggaattgatgacaaggacggttttcgccattgtgggcatcctccattgtgattgaatgttcccgtgagacacgggttaccgttgattagattactcgttgcttgctacaaaataagcattacagtggctcccgctggcgggagctaagccgggctcactgcgcttcgatggcggtgagggcgatggtgttgatgatgtcctgcaccagagcaccacgggacaggtcgtttaccggcttgttgagaccctgcagcaccgggccgatggccaaggcgccggaggagcgctgcacggctttgtagccgatgttgccggcgcacaggtccgggaagacgaacacgttgacgtgtccggccacatcgttgcccttggccttggtggcggccacggtgggggaccaggcggcgtcgaactggatggaaccgaccaccggcagatccggagccttctccttgagcagcttggtggcttcctcgaccacgtccacgtccgggcccttgccggagccgagggtggagtaggagagcataccgaccttcgggtcgatgccgaaggcacgtgcggtctcggcggactgcaacgcgatttcggaaagctgctcggcgtccgggttgaggttgatggcgcagtcggcgaacacggccacatggtccttgaagcacatgaggaacgcgcccgagaccagtttctggcccggcttggtcttgatgacctgcagggcggggcgcacggtgttggcggtggaattcacggatccggagaccaggccatcggcgtagccgagcaccaccagcatggtgccgaagtagctggcgtcggtcagttgcttgcgggcctgctcctcggtcatgcccttcttggcgcgcaactcgcacagcttggcgaccatgggcttcaacacgttctcgtcgtccatggcctggaatcgggcgcgccccagactgttcagccccagttccttgccgcgggccaaaatggcgtccttgtcgcccacgatgatgaggttcacggtctcacgttcgagcaggtaatcggccgccttgatgatgcggtcctcctcgccttcgggcagcacgatggtcttcttgttgctcttggccttgccgagcaggtcgaattggaaggcgtacggcgtgaccggcgcggtgacgtccacatcgagcgcggcgagcacctcgtcgatgggagcgtgcttgcggaaggtctcaagggccaggtccttggtggattcgtcggtgaagggcacctgcggcaaagtccagaccggcaggccgtatttggcgagggtctccttgacggagaaggcgtgacgcggctcgcagccggtcacgaagatgccgagcaccgtattgcccgcggcgcgcatgccctcgatggacagcttgacggtctcgtcgagctcgtgcggccagcggtcgatggtgcacacggccaggaacaccccggccttcagatcggcggcgacgtccgcgttgaactcgtaggtggtcgggtcgttgacgtgggatttgtcggtgccgacgatcagggcggcgttcgcgcgggagacctccatggcgtagttgaactcgccgacgatgtctccgcgggcggtgtccttgtcggcgcgcaccttatgcacatcgaggccggtggacagggccacgccgagtccggcattggaagcggcgagcaggatcggggtgaattcgtcatggttggacacagcagggcggaacaccatggtcttgtacttggaagtcaatgcgttgagcacgccgtaagcgacgacgttgcggccattggcgccttcagggctggcgatatatacacgggtgacggtcacgatgtttttgtctcctttgatgatcaacacgatagggaccacacctcattgtagtggcgattactgttatctctcacgccggtgtcgcgccaatcggaagagcgtccccttggcgatactttccggggaaagtatcgcactgcatgcattccagtccctgttttgcgacgcattcccgggaatgttgcgcaaaagtcgcccgataggatagaaaacgaaaaaggccggtgtgtgaagcaccggccttgattgtggagctagggggattcgaacccccgaccctctccatgccatggagatgcgctaccagctgcgctatagccccgagtgaagctatctgattcatgggagtcacaagacccgccacgaaccagcggagaaaccaccatatcacccgatttgatggcttcgtcgtggagctagggggattcgaacccccgaccctctccatgccatggagatgcgctaccagctgcgctatagccccgttttcaattgttggcccgttgttcggacctcgtatacattacgacgagatgtcgattctggcaaaagccggcgtgtcgccaaatgacaaaagtgtgatttggcgacactttttggcttgtttccgccattattcaggcattgagtcattcagttattgcttgaacggttccgaatgcaccggacctattggattagcaggggagtcgggaacatgatcagcgttcgcgttcccattcgtcggtgtcggcgatggccggaccgtgattgtagtccagcagacgccagcgcacagtgccatcgggattgtccatcgacaccaagcgcacccagtgcgcattgcgcaatgagaccaccgtggagaaggtcggatcgatcgcggaaatgcccaacagggtctgcaatgtctgcgcgatccatgcgccgtgcgagaacacgaacaggtccgtgtcgtctccggcacgcgtggaccagtcctcaagagcctccacaccgcgtttgcctacggcttccttgggttcggcaccatacttcagttcaccgccccgagactccatccaggaacggaagtcctcagggtagcgttcggccagttcagccacggcatggccatcccagtcgccgaagctgcgttcacggacgcgatgatcatcgacgggctcgattccacccaatacgtcggcgaaagcctgcgcggtggcgtgcgcacgcttcaaatcggagcagacaatgaaccggtggttgatttccggccgacgatcgacgtacaggcttttcaaggccgcggcggtctgcttgacctgccattcacccacggcgtccagcggaatgtcgacctggccttggagcttgtgagcggcgttataggaagtgcgtccatgacggataaggaaaatggaacgaacatgattggccatagtgacgatcctttcgattccagtgaggaaacagggaaaagggagggctgcctggtgccgtcaatgacgttcggcaacaggcagcccgacacacgaatatcagcgagtatcagcgaatatcagcgttatgtgattcgcacgttacgcggtggtgacggcagcagcgtccgcatgctccgccgtttccgggtgtgcgagttcaagatcgatggccgggcagtcgcgccagagtcgttcgagcccgtagaattcgcgcgattcctcgtgcatgacatgaatcacgaaatcaccgtagtcaagcagcacccactggccctcggtcaggccctcgcgagagcgcggctgacggccggagcacttaaggaacaggtccttttcgatttcctcggccacggccagtacctgacgctcgttggaggcgccggcgatcatcatgatgtcggtgatgccgagcaggtcggctacgtcgaaggccacgatgtcggtggccttgatacggtctgcggcctcggcggccacgcggacggcgttgatggaatcctgaagtgcgggcatggttcagcgctcccaggcgggcttccagccctcgacgttgtgctgcgtgttctcggagtagaccattgtgtcgctcggcacggcgtggcgcaccacggagccggcaccggtggtcacgttgtcgccgacctcgaccggggccacgaacaggttgccggcgcccacatggcagccggagccgatggtggtgcgattcttgtgcacaccgtcatagttggcggtgatggtgccgccgccgatgttggtgtggtcgccgagctgggcgtcgcccacgtagctcaggtgcggcaccttggtgccgttgccgatgtgcgccttcttcatttcgacgaacgcgccggccttggcatcctcgccgaactcgttgcccgggcgcaggtaggtccacgggccgatgttcgtgcgtgcgccgatgtgcgattcctgcacgcgggaacgctcgaccacggcaccttcgtccacggttgcgtcaatgagggtggtgtacgggccgacgatggcgtcctcgccgaccaccgtgtggccttgcaggaaggaaccgggcaggatggtggcgtcgcggccgatctggacatcgtcctcgatccaagtggtttccgggtcaagaatggtcacgccgtcgcgcatccagcgctcgcagacgcggcggttgtaggtcttggacagcgcggccagctgcacgcggtcgttcacgccttcgacggtgagcggatccggagcggcgaacgcgccgaccttgccagcggccttggcggtttccagcgcgtcggtcagatagaactcaccctgcgcgttgttcgatttcagtccggcgattgcctcggtaagcacggaagcctcgaacacgtagaccgaggtgttcacttcctgcacggcgagttcgctgcggttggcgtccttctgctcgacgatgcgcagcacgttgccttcgcgatcgcggatgatgcggccgtagccggtcgggtcatcgaggatggtggtgagcacggtggcgccgttgccggaggcggtgtggaattcgaccaggcggtgcagcgtctcgctgtcgagcagcggcatgtcggaggcggcgatcagcaccgggccatcgaccttgccagcctcggtgagctgtgccattgcgcactgcacggcgcgaccggtaccgggaatgtcgtcctggttcacgatggtgacctgctcgtcataggagcgggcggcttcggcgacgcgctcggcctggaagtgcacgaccacggccagcgtgtcggggttcagggcggtcaccgaatccatgaccctgttcaggaaggtcttgcctgcaaaagtatgcagcaccttcggcttgttggaacgcatgcgggtaccctcgccggcggcgaggacgatggctgcggataatgccataactgacgtattcccttcgatcggaatgtctattgagggtggaaacacctcaaaacaatagacggccgcccggatgtcgagcggccgtcagccgttcccccacctggactcgaaccaagacaaagggttccaaagacccgtgtgctgccattacaccatgggggagtcgtgggctttcggcccacaagtgttcatttataccatactgtcggtatttaccgaaagactacgccatgtcgcgtctcgcatcgtgtgctttccttgaacaaacacgcacgtgatcaggcgaacaggaagccttgaccgtggtgctcggggtaggtgtcgaacagttcggcgaccgagccgtcctcgaatacggcgcggatggcgctggccagcagcggggcgatcgacaggacggtcaagccatcccagcgcttttcctcgggaatcggcacggtgtcggtcagcacgacctcgcgcgcaccgcagttcttgagccgctcgatggccgggccggagagcacgccatgcgtggcgaccacggtcaccgacttggctcccgcgtcctgcagcacgtggcatgcgcccgcgatggtaccggcggtgtcgatcaggtcatcgacaagcacgcagtccttgccggcgacgtcgccgaccacacggttggcgaccgcctggttcgggcgggtgatgtcgcgagtcttgtgcacgaaagcgagcggaccgccgccgagacgctgcgcccactgctcggccacgcgaatgcggccggcgtcgggggagacgacggcgacgttgtcgagatggccttggaaacgatcacggatgtagtcgaccagcaccggcatggccaccagatgatcgaccgggccgtcgaagaagccttgggactgcgcggcatgcagatcgaccgacatgatgcggtcggcaccggcggtcttcagcaggtcgaacaccagacggcaggagatgggctcgcggccgcggtgcttcttgtcctgacgggagtagccgagcaacgggcagaccgcagtaatggaacgggccgaggcgcgcttcaatgcgtcgatcatgatgagctgctccatgatcgccttgttgatgggtttgtagtggctttgcagcacgaacacatcggcgccacgcaccgattcggtgtagcgcacgtacatctcgccgttggcgaaatcgtatgcggtggtttcaaggacgtcgatgccgagctgctcggcgacatcctcagccaatttcggatgaatccttcccgtaacgagaataagattcttatcgggcttcccttcaaggattgcgctcaccatgtctcccaacgtgtggtctcgttgatgcagtcttcagcatagccgttcttcacgaccggttggacaactcagcgttgcctgccgttcacctgccgcttgcgatccattgttcgatggcctgtttgaccgcctttgcatagatatcgctatccatgctcgggtggatgccgtcggagccgagcacctgcgcgttcgcgttggctgtggcattccaatccaccagcaccacattgtccggatgtgcggccgcatagtcggcaagcacctggttggtaggtggaatccacgtacggtctccgtgggcattgaccagtaccagcacgcggtcggggccgatcatattacgaatctggtccagctgatcaggggtgattgccgaattggtgccaaggccgatcagcacccattgccgcagactgccggcggacagatcattgccgatgagttcgggggcgaccatgatggagcgggaaacgctcgcgtcggtctgaatgccggggaagacttccgaaaggccctgtgatgaggccagcatcaccgaatcgcctatggcggtaatctgatcgccggtgggcatctcatgcttgggcttgggcggtgccggcacggcatggcgcagcagcacgtgttcggttttctgtatgcgttccagttgtgcggcctgttgctccagctggatctgcatggcggttttcgcaggtgcatgagtaatgccctgcgcgcagccgaccaacgacagcgccaggataacgtcaacggcaataacccgggccgcatgattcttcttgttcgtgcgaaggggcaccacgacggatatcaccgagtgcattgccgccggtttctccaccatcagccaggaaatcatcaccgcaatggcggtgagcaacgcggtcatgatgagaggccaaggccctgctgccttgaagatcttcggggcaagggcgctggaaagaatccacaacggccagtgccacaggtaaatgccgtacgaatacttgccgagggcggccaatggcttgaacaccatgaggctttgcatccatgaatcgtcggagatggtaccggcaatcagcagcacggacaacaggctggacaatatgatgccgccgcggaaggcgaatgcatcctgtttgccgataaccgtcatggtgaccaatgcaatcaggctgaggaatgccaataccggtgccgtcgcattccagatgcgatgctttacaggaatctgaggtaacggagcccggtacgtggcggccgaagcgctcgatctaatggtgcggggcatcggcacagctccctgacgagcgtggcccaactgaggagcggtgacccaccaggcgagagccacacccagcatcaggcccatgctgtgggtatcagtaccgaagtagacgcgggtggggtcgcccttgggcacgtacatcacccacatggcgatactgctgaacgccgcgagtcccagtgggatgagtgagggcagtttcgtctggcggagcttccacatcagccagacgatgaacggcacgatgacgtagaactgcatgagcacgccaatgaaccacagatggcgaaacacctgcgggttcatttggtcgaaatagctttggcctccggcaatggcgtaccagttgtagcagcccagcagcacggtgatgacttggtcgcggatggaaac

SEQ ID NO: 3963 - DNA, 7222 bp, Unknown
  R22_24m  MAG No. k141_31339
cagcaccagcaccaccagcgagacgatccagaacagcgtctgcagcatggtgatgatgcgggtgtcggaggcggtgatcttggtgacctgctgcgccttgacgtgcatggaggtcatgtcgttgatgctggacaccaggcctgcgaggtcgctggagccggccgaatactcgatgacgtccacgccgcgcgtgatgccggtgagcttgttgacgtcggcgttggtggcgtagatgatcgagtcttcgctaccgccggtgtccacgatgccggccacgcggaattcggtgccggaggtgtccatgatgtcgctggaaacgcggccgtctttggtttgctggtcgatcgaggagttcgacgaagtgccgttggtgctggcgttatcggatgcacggtagccgatggtgatggcggagccgattctcagaccgatggcgtcggcgatgtcacgtccgaccagcaccttgccgtcggtcggccacgagccgtcgaccacccagtgatggttgaggttcttgacctgcgccgcattcacgccggccatcacgtacggcgaggcgttgacgcgcacgttctcgtagcggtaagtggcgtatttcgcggaacccttggccttgaccatttcagtggtgtgctgcaccatcgccttgtcgatgccggccttgccgtcggcattggtcgattcggtgggtgtgacaatcaggttcgcgccgtacgcacgcatctcctcgttcatctgctgcggcacggcgaggcagatcatcgccaggcagaacagtgtggccgcgccgaccagcgacgccaccacggccatcaccgcgcgcgaacgccggcggaacacggcgctgaacagcattctgaagaacataccggtgttggtcatcggtttcctccttccacacctacgtagataaactcagcggccatggagcacctccgcgggcttgagattcagaatcgaacgaatcgaggaggcggacgccagcagcacggtgacagccagcagcacgaacaccagcacgaacaccatcggccgcatcgtgatgccggaaccgaataccacccggcctatcagctgggccacgccggaaccaagcaacgcgcccacaatcgcgcccagcagcgagattgccgccgtttcggccagcatcaggcgggataccgcggcatcggtggcaccgagcgccttgagcagtgccagctcgccagaccgttcgccgatcgaggcgaccatcaggttggccacggccacggctgcggcgatcaggctcagcacggtcatcagaatcatcacggcctgcgtcttctgcagcacattgccctgcaacgcggcgacctgacgcacctgcttggccaccgcgcccggaatcacctcttcgatctggtaggcgatcgagctcgggtaggcggtgcagtaccaggtctcccattcctcctggctcagcgcggccgggttcgcggcggccttacgggccaggtcgttctccggcgtggtcagggccttgacctcgatcttgtcgaccgaatcgggcaggtcggcgagcacctgggccgtggaggaggcgatgtagagcgagccgttgtcctcgtcgccggaatcgtagacgccggtgagcttgattttctgctcgttcttcttgcccgaggcggtggtcttgttgagggtgatggtgtcgccggtggtcacaccgagttcggaggccagcgtcttgccgatcacgccctggtcggaatcgtccttgggccacttgccgtccagctgccaccacgagcgcatgccttccacgcccacgacggtggtctcgccggtggagatcttgaggtccttgttgaaccacgtgccgacgaccggcacgttggcaccgttcaccgtggcgtggatgttgagctgcggcgcgaagttggtgatgttgaacgaccagaagatcgtcttgatcttggccgcgtccgactccttcagaaaggcggtcgggtcgctggtggacgccgcgccgcccgactcggtgttgtacaggtcggaaacgaccgcgtccgccttgggctgcacggtgatgttcgaaccgtaggtggacagctcggcgttgagcttgtcgcccacgtcgaacacgacgcccagcatcgatacggacacggtcgccgacaggcatacggtcagcgcgataagcaggcgccggcgcagctgtcgggtgaacgagcgagtaatcatacgcagaaagaacatgattcttgcctcctgcctgactcactggaagtgggcgctcagcgcgtccagatccgtagtctgaatggtgatcttgccgtggccggtcttgtacgggaatggtatcgggttgcagccacccttgaagccgatggtcgccaggttgatggccacctcgcacttcttgcagatgatcttgccgtccttctcgtagtagccggcgtcgccgcagttctcgcaggcgtccaggccgatgccgtacgcgccaccgttctttcggatgatgatgaagcgcatgacggtgccgtccttggccttgtattcgaaacggtgcaggtggccgtcctcgacctggctgaagggaatggtggccacgccgtccttgagcgagtaggcttccggcggcgaaagagtgatggtctgatgggtcgcggcgacgccgacggtgagggtcagcgtgacgccgatcatggccacgaggctccagacggcggaggccacggcgcggcggcggaacgccttgtgcttgcggccgatggcttcgttcgcgccggtcagcggtatacggaagccggccaccacggaggcgacggccggaatcaggaacacgaacgcctgggccatgatcatccagtcgttgtggttgatcgaccaggcgagggccacgaatcccgtgtggcctatcgggaaaccgcgtgcctgcaggatctgcatgacaccggtcaggtgccggacgaacagaatcaccagcaccgcgagaacggcggcggtgaacgaggcacgcaccgcggtcgaacgcatcgtgcggaagatcacggccacgatgatcgacatggccaggcccagcgcgaagccgagcgcgcgcagcagcatgtcggacgtgaagatcgggtcgccgggctccacccagatggtcagctgcaggatcacgtccggcagcgcgtagaacagggtgagtgcgatgtcgatggcggccacggcgttcgcaatgtgcatgaacaccttgtgctgctgccaattggtggtgatgcggcgtgcgaacaccaccacgacgatggtcaggatgtcggcaatgatcgcgcaccacagcaccggatagttgacgaacgtgcgctggttgatcacggccgaggcgcgcaggccggcgaatgtgatagcggcgatcaggccgacggtcaggccgatgagacgccaatgcgagcttatcggcttatctcgcccctcgccgaccgtgagcatcacgctcaggctcatcaccagcaatgcgggggccaaggtgcccggcatcactgccacgaattgttcaagcattcgcgtcctttctctgttcatcttaggctcccctccctgaggggagctgtccgcaaagcggactgaggggagtttttagaccgtcctaagaattatctccctaaagcggcgtaaagccccctctgacgagggggctgtctgcttagtcaatcaccactgacgcggggtgtagtcccagttgtcgaaggtgacctcgatgggctcggtccagaacttgtggttcttgacaccggtctccgggtcaacgtggagcatccagccgttcttctcaggggactcgatggagagcttgagttggtaggtgccggccttgtcgagcttgacgttggcgccgtagtgcgggccgtcggaggcgttcatctgcatgaaggtaccggaggtggcctggccgccctcgacttccttgccggtggacttgtcgatgatggtgtagttcacagtcaggtcagggacgaagtcgcccttgccgtagccgtagtcggtgccttcctgggaggcgtggatgtcggcttccaggtggaaggaagcgtcagcagccttcagacccatggaagcagggtacatgtcgatgggctggaagtagacggcgcccacggtcagcgggccagcggccttgtcctgctccttggcggtgccggaggggccgaccgggacctcttcgaagccggaggtctcagtcggggcgtcggccttcttggagtcgtctttcttggcggtgtcggaggagctggtcgaggacttggtatcggaagcgttgttggtggaaccgcaagcagccatcgaaacagccatggagccggcgagcagcacgccgagcagagcggcaagcttcttgttcttcatcatttctcttattccttctgttgtggtgaatggattattcacgacttatctgtttttagttgtggcggcgtgggctggaatcgcttccattgccatgtcgcaagttgtgttgcgcgagatggtcgcaccgggcgttgtgctacgcctgcgcgctctcctcgtcagccttcgcgtccgacttgctcgcaccggccgcaagccgggccttggccttacgctgtttggcaaagccgaccacgaacagcgcgatgacggcgatggctgccagtacctgggcgatgatgcattcggcgtacgggtagaatccgagccagtcgttggtgggaacgcccggcaggtagttggcgggcagcaggtcgccctcgatgagcgcgtgcacgccgccgccggcgaagacaaccaccagcacggacatgaggatcgaggtgaccaggaagaacgggccaatcggaatctttacggaggtgaagcgaatcaccaggaagatgatcacgagcaccacggcggcggcgagtgcgccgaccaccatgccatgcgtatcctggctcatcgtgtagatggactggtagaagatcacggtttcggcgccctcacggaacacggcgaggaagctcagcatggcgagcgaaatcaccgtgcgggaagccaccttctcgccggattcgacctgcgaggagacagaggccaccgcggcttcggtcttttccctgatgtagcggttccacgcttccaccgaggacttgttgagcatccagttgctggtccacagcagcatgcacatggcgacgagcgcgcacacgccttccatgatctcctgcagcgggccggagccgccgaacgcgagcatgaagatgaccgccacgatgcctgcgccggccagaccggcgagcacgcccacgtagatccacttggtgaagcgcttgttgccggacttgacgaggtaggccaccacagcggcgaccacgagcagggcctcgagaccctcgcggatcagaatcaggaacgcctggccgaccgagctggtgatgaacttgaggaagccaccctcctcatcggccgcgccgccgtcgagcttggcggcatcggtggccagcatgttcttcaggtcgtcgatgtacttcttgacttcggaagcaggcttgccggtgttcatcgaggagcggcacagcttgaactggtattccacctgggagacgcggttgccgctgatggcgctcagcacggtcttctcgaagccgagcttctcgtagtgctggtagtaggcgtcgttcacgagcgtggcgcccttggcggcgtcgccaccctcataggccttgtaggcgttgtccaggatcggaagcatcgcatccgcgacttccttccaagtcttggccgtttcctcggtgcgcttcttcttggcgtcgagctccttgcgctccttggcgatctgcttctggaggtcttcggagtactgcttcgggttggcgaggctggtgttggcgtcgagctgctgggccgtggcgtcgaggtcggcggtcaggtcgttgaccttctgggtaagctgatcggcctggtctgacgtgaacacctggctttgcaggtcctggaaggcctgctgctgcgcggtctgcttgtctgcgccgatggtgtcgctcaccactttgttgaagttggacgtcacgtagacggtggtgtatgcagccccgaaatcggacttggcacccattgggttgccgtccttgtattccttaaggccttcctgcaactgcgcttcgacggccttggcaacgtcggcccaggtcgcgtaatcgacgctggtggtgtcgtcgctcttgacggtggcagcagtggcagtggttgccggcgtcacggcgaacgcggactgcggaatgatggcggaggggaggaaggtcgcggcgatcatcgcaaacagaaaaacgatgaccgcaaatgcacgagccgagaccgtggccgactgcagacgaccggtgctgcccgacttcgcgcgcacgcgagaaacggcaacgcgcgtatcacgttcccgcatcgtgttcatttcagcggactgcgcgcaggcgcgacgaaccatgctgaattcctctcacttcaagtactcgaatggtccaaaaacaactatgaactctatagaaaaaaattcttgaacaacagtcttgattttttgacgggtgcgaggtaatagaaggcgttttagtgcttttcaaccccgcaattatttcactatctgagataactatgctcagagaggatggctttcccggaatgtgaacggcaacaccacaaaaagcggcaacgtgaggaataccggaatcggataccaaaatagtgccacgggtgaggcatacagcgacagcaccgtgaatgccagcaagccgtaagcggccagtgcggggccgtagcgtcgtcgcgcaggccgcaccgccagcgcaagaccagcagccagcggaatccacgtgacgtacagggccatcgaagtcagcggattgcctttgcgaacaccgacatgaccatccgaacgcacccaccgatgaatcgcccgcaatatgtttttctgccattgcggcttgtcggaggtacccctcagcggcgcaaggtcatgttcgatggcggcaagtcgttcggccgccacggtatcggcatcgccgtcggaagtatgcttccaagcaccttcagtcaggaaagacgcccattgcctgagatagctaggcgtgaacaggtagtcggaatcagtgggatacgtgaaattgacgcgcgggtcccaccatccgcgagtcaccccggcataggccgtggcatattcaaccggatgcgcgaggccgagctgcacccagacctgcagggccgcgagttgttgcgccgcggttggcctagg

SEQ ID NO: 3964 - DNA, 5683 bp, Unknown
  R22_24m  MAG No. k141_31518
gcccgttaccagctcgacaccggcaaggtcgaggtgctgagtttctgaccatcagtcagaccccgttcaccgggggtaatgcggtcgtggtacatctgtgtgcagagagatcgaagaacacggaagtctgaaccaatgccacctgcccttactattcactacggatccgccacctatacccccaatcctgcacgtgccacgaccatcgggcgtgcgccggattgcgatctggtgattcacaacccgtacgtatctcaccatcatgctcgcgtcacctttaccgacgatggttggctcttggaagacacgggtagtgcaaacggactgtccatcaacggcattcacaccacttccgtactgctgctgaacagcaccaaagtgacgctggcacaaggtgccaccatcgtctgcatcgtcggaaccagcgggccgtccacgccggcacagcccccgcgacgccctgcggcaaacgtggcccagcctgcgctaccgccggcaccatcagcgcaaccggcacaacccacgcaactcgcgccgcaacaggcacgcccagtagtgcaacccacaccaccagcaccgcaaccggcacaaccggtacaaccgcaaccaacgccagccccgctggccccgcaccgcgtatccccggccctcgcgcacctgcaacagcaaccccgcccaacagcagtggcaccgacggcagtatcgccagtgccggtatcacccgcatcaccatctccgtctccctgcgcatccccttccccatcgaatgccgccggcaccgttctggcaggcagcacgcaagcggtaaggctcgaatcccaactcaccaccaaccgcgtgcacgggtccttcagccccgagcacgacaccacaggcgtcatcggccgcgataccgcctgcctgattcgcatcaacgattatctggtctcccgcaaacactgctcgctggaaaccaccagcagcggcatcctgctcactgacctgaactccgccaacggcacttacgtcaacggccgccgcgtcgcgaagatctggctgcgggaagacgacgtcgtcaccgtcggcaacaccgacctgatcgtgcatgaaggcgtgctgtgcgaccgcacgccgtttgtcagcaacgacgcggttatcgccgaaaacatcggactgaccgtgggcaaaggcacccggctgcttgacggcatcaacgccgtattcgccaagggcacgctcaccgccgtaatcggaccttccggcgccggcaaatcaacattcacctccatcgtcgccgggctcaacagccccacggacgggcgcgtgctgtttgatggatacgacgtgcatcagaacatcgaactgttgcgcagccgtatcggattcgtgccgcaggacgacgtggtgcaccgcaagctctctgtggacgcggcgctcgaatacgccgccaagctgcgcctgcccggctcaaccaaggccgagcgcgccgaaatcatcgacaacgtgctcaatgagctggaactcacgtctcgccgtaagaatcgcattgacagactgtccggcggccaacgcaagcgcgtgtccaccgctatcgagctactcaccgaacccgaactgctgattctcgacgaaccgacctcgggcctcgacccggcgctggatcttacggtgatgaccatgttgcgccaactggcggatgccggccgcgtggttatcgtagtcacccattcactgtcgtatatcaacaagttgtgcgataacgtgctcatgctcgctcccggcggccatccggcattcttcggcaccgtgcaggagatgagccaggcgttcaacggcaaggaatgggccgacatcttcaacgatgtcgccgaatctccggaacgggtgtattcgattactgattcacgccagcgcaccatgcaggccgagtccaccatcacgcggcacaccgagcatgagaaaccggcaaagccattccgcatcaaacagaccatcactctggtgattcgtcagctgcatttgatcatcgccgaccccggattgctgatcttcctgctgttgctgccattgctcctaggactgctgtcgctggttgtgcccggttctcatggcttgggtgagcccgatttcaaagacgccgccaccgagccgaaccagctgcttgtgctcgtcatactgggtgcctgttttatgggatcggctttgtccgtgcgagacatcgtctccgagcgagcgatttacggccgcgagcgcgcggtgggtttgtcgcccacgtcatacaccgcctcgaaactcatcgtgatgggtttgcagaccttgttgcaggcggcgattctgaccactgcggtcagcctcggcaagcccggcccggaccatggtgtggtcactgattccggcatacccgaactggtgttggcgatttggctgactgcgtggacttccgcattgttgggcgaagtcggctcggcgttggtgaagtcgggagaacagacgatgccattgctggtggtgctggtcatggcccagttggtgttctccggcggcatgattccggtcaccggccgcgacagcctcgagctggtcagcatgatcttccccggacgttggggcttctccgccgccgcctcggatatcgggctcaacgatctgctgtatggccccaccaaggtgccgatgttcaaaaaggatgatctgtgggagcacaccacggatcagttctggttcaacattggcattctggggattatggtagtcgtcttcaccattgtgctgcgtatttgcgtcagcaatgccgtggccaagatgcgtcggcgctcatagaactggatcgaaactagcccgcaaccggcttacttcattcattaggtcaattatgcgttcatttggtcactgcactccaacactgaccattgaaatgccgccattccaacgcctcaccatgccgacaacccaccaaatgaacgcgcaacctaccaaatgaatgaacccagccctatatttggtgctacaacgactgcaaatactgccccaaatgcggcaccgcaaattccagctgcccatgacctgccgggcggatgagtttgtccttgaatcgtcgaaggcgagcagcgcatcggaaacaccggtcgacacgtcgtccgcggtaatgacatttgaacctcgacgttgtgcggattgccacatgtagtagccaacaagctgcaccatgtacgggtatccttcagactggcgagcggcttcaagcgcatcttccccactgatggtcttgccggaatccgcaactgttttcaggaacgcattcttgacgtctggaagcggcacgttatccaattcgcggcgtagcgcacggcgcaggaatgtggttacctcgttatccagcaaatcgttgaccatatacggcaagccagcaaacacgatggcaacgcccttcttatcctcatcaggcgtatcactttcatcggcatccgtaatgacgtgctgcacggctgtagcaatggcaaccaaatcatcatgcgaggccgcttgcgtctcatcgatagtgatgagaatgcccttccccttgccgagtttcttactgcccagccagcacaccccaatttgacgtgccgctcccctagagttgaagccatgtcacttggtttgaacatcctcctgatttttgtatttctcgttatcggttccgtgttctccggcaccgagttggcattggtctctctgcgcggctcgcagatcgagcaaatggagcaggaggacgctcgcggtgccaaagtcgccaaaatcgcacgtgacccgaacaccttcctctccaccgtgcaaatcggcgtgacgctctccggcttcctgtccgcctcgttcggtgcctcctccatcgccccctacctgattccggtggtcgaaagctggggcgtgcaccccggcatcgccggcggcctggtgaacatcatcctgaccctcatcatctcctactgctccatcgtgatctccgagatggtgcccaagcgcatcgccatgcagcgcaccgagcagatcgcgcgcgccgtggtgcccgccatcgacgccttcgccgccgtctgccgcccgatcatttggctcatcggcaagaacacgaacggcatcgtccgcctgctcggcttcgacccgcagcagaccgagtccgaggtgtccgacgacgagctgcgcgtgctggtcagctccaacaccaacctttccaaggacgaacgcacgattctggacgatgtgttcgacgcgtccgaaaccatcgtcgccgaggtgatgcgcccgcgtgccgacgtggtcttcatcgagggcgaccagcccttggccgaggccgccgcgttcgtacgcgaccagccgtactcccgttacccggtgaccggcaaggatttcgacgacgtgatcggcttcgtgcatgtgcgcgatctactggacgtgcgcgatccgaacgccaagatcgtgcgcgatgtggtgcgcgaaggcatctccctgcccggcacctccaagctgctgccgagcctggaactgctgcgtaagcgcggcatccatctggccgtggtcatcgacgagtacggaggcacggacggcatcgtgacgcttgaggatatgaccgaggagcttgtgggcgatattcgcgatgagtacgatctgcccagcgagaagggcggcgaacgcaccacccgcaccgcgttcgtcaatggtgtggccacgatcgaggccagcatgaccattgaggacttcgccgatctgaccggcatcgaattggaggacggcccgtacgagacggtcgccggctacttcctgtccaagaccggcaagatgggtgcggtgggcgacgtgctgcattccgacgacggctacaacatggtcatcaccaaggtggatggccgccgcatcgaaaccatcgaagtccgcaaagccggtgccccggaccatgcgccactgccagccgaatcacaaagcgacgatgccaactagccacgtgatattcaccacctattcgttcggcccggggcataaccaaaaatcgtagaattatatggacaggttccacctactgaaagaaggaacattatgacacttgcatttgttgtgccgggccttgatgaagcggccagtgagaaggccatcgccatcctgcagaaccgactgagccaggagcaggaggccgctctggtcctcaagcacgcgcactggaacgtgaccggcccgaacttcatcgccgttcacgagatgcttgaccccgaggtcgaggccgtgctggctcaggccgacgagaccgccgagcgcatcgccactctgggcggcaccccggacggccgcgcggacgccatcgtgcgcaaccgcacgtggaagtcgttcgacgccgagggccgcgtgggcaccgaggagtatctcaaggcgctgatcgagtactatgacgccttcatcgccgacgaccgcaaggccatcgccgagctggacgagctggatgtgatcagctccaacatcatccaggaccacgtgcaggaactcgaaaagttccagtggttcatgcgctctcacctggcataagtaaaagcagtattccgtggctcccctcaaagaggggagccactttcgtctcacgtgaaatagagagtctccacatacataagttggaaaagtgtataaaactccccattttgaggttggaaaacgtagccaaaaccgcattcttatggttggaaaa

SEQ ID NO: 3965 - DNA, 42309 bp, Unknown
  R22_24m  MAG No. k141_31632
attccccttggacgtctcactggcgcatttcctccaacaagtgctttccaacccggctctgaccgtcacaacgttgctgacgctgggagtcatcttcgtcaacggctggaccgacgcacccaacgccatcgccacctgcgtgaccacgcgatgcatgcgcgtacgctccgccgtcatcatggcggccatcttcaacttcctcggcgtcttcatcatgacgcagctcaacgcctccgtggcctccaccatcagcaacatggtcgatttcggcggcgacacgaacgcggcgctcatcgccctatgcgcggcgctgttctccatcgtcgtatacagcgtgggcgcctcgctgctcggcatacccacctccgaaagccacagcctgatcgccggcctgtccggagcggccatcgccatccaaggcggcatcggcggcatcaacatgggcgaatgggtcaaggtgctctacggtctggtcgcaagcctcctgttcggcttcgccgtcggctggttggtatgcaaggccgtgaccctgatttgcgctggcatggaccgccgccgcaccaacgggttcttcacctacgcgcagatcgtgggcgcggcggccatgagcttcatgcatggcgcgcaggatggccagaagttcatcggcgtgctgttcctcggcatggcgttctgcaacggccaacccagcgtgaccggtgtgatgattccggtctggctcatgattctgtgcagtaccatcatgggcgtaggcacgtccgtcggcggtgaacgcatcatcaaatccgtgggccaggacatggtgaaactcgagaaataccaaggcttctcggccgatctgtcaagcgcgctgtgcctgctcgtcatgaccgtgctcggcatccccgtctccacaacgcacaccaagaccagcgccatcatgggcgtgggcgcggtacgccgcctctccgccatcaacttcggcgtggtgcgcgacatgatgctcacctgggtgttcaccttccccggttgcggtctcatcagcttcgtaatggccaaactgttcatggtcgtgttctagaaaggattccacccatcatggcgagacaaaaagacgtgttctacttcgacggattcctccgcagcgcggactacgcatgccaggccgcgaagctgctgtccgaggtcatgcacgacttcaatccaggccagctgcgcgaacgcatggacagcatgcacgcgattgagaagtcggcggacgaggtgcgccacgacatgatggacgaactggtgaccgcgttcatcacgccgttcgaccgtgaggacatcgacgagcttggccacgtgctcgacgatgtgaccgacagcatcgaaggcgtactcaaccgcatgtactacgacaatgtgaccgacatgcgtgacgatgcagtccagatgtcggatatggtggtgcgcgccacggaaagcatctgcgagctggtcaacgaactgccgcgattccggcattccaagacgttgcgcgaactggtgttcgccatcaacacgatcgaaacggacgccgaccacctgttcatcgagtcgatgcgcacgctgcacaccacctgcaccgatccgctgcaggtgttcgcctggcatgacgtgtaccgtcacctcgaacagtgctccgacgactgcgagcgcgtggccaacaccatcgacagtatcgtcatgaaaaacagctgaggttggtttttcataacctccctctgatgagccgagccgtgaagaaaacgccggaggtgtttttaggcaagggtgagtgacaacgagcgaataagaggtcagctgcaagctgtcctgaatcgcgttcgaggtggcatcgcgaagcgatggcggagggagagacctacttgaccaaaggcccctcaccgatgggcgttgagccagaggatggcgagttgggtgcgattggtcaggccgagcttgtccagtatcgcgctgatgcgattgcggaccgtgccttcgctcaggaacagtctggcggcgatgtcgcggttatcgaggccctcggcgaccagcgcggtgatctcacgttcgcgctcgccaagcaggccctcgatggaatcggcggtatctctggaatcgtcggaatcggcaggattcggagtccgttcggtgagcttgccgagcacttccgcgccgagcaccacctgaccggccatcaccgcctgcagcgcaggcccgaccgccgccacatcctgtttgatgagatagcccttggcgccaagccccatcgcctgcgcgatatacgactggtccgcaaacgtggtcaggaacagtatgcgcgcggccgggtccgtggccagaacctcgcgcgcggcatccaaaccgctggtgcagggcatctgaatatcgatcagcagcacgtccggtcggctcgccggcgtctcgaaataacggcgcacggcggcgtcgccgtcatttgccgtccatagcacctcggccgtgccggtggccgtcagaatcgtctccaacgactggcagacgatcggatcatcatccacgattgcgattctcatcaatccctcgattccatggtccaacgcttcttcggcacggatacgaacacacgccagccgtcctcatacggcccgcagaccgcggtgccgccaagggcgcgcacgcgcgattcgatatccgccaaacccatgccgcgcatcagctcatcggccgaaccacgcatatcggcaacgccgtcggcggcgagtcgcgagccgacgcgcgtggcgcacatcgcacacaggcgggcagcggccgtccgggacccatcggactcggacacggccggccccggatcctgaatggccaactgccagaacgcggggaagtcgcgcaacgtcacgctcgcctcgcgcgccgcactatgatgcaccacgttcgacaatgcctctcgaatcacggtcgcgaaacagcgcgagaccggcgcgggcgccttggcgatgtcgttggccagcgtcacggcgaaaccgggggagatgccgtcgaacgacgtgacggcatcatcgatctgcgcggcgaaatcagtgccgtcatcctcaagatcatgcaccgaacggcgcaccatcgtcatcgcatcatccaacgtcgcacccaacgtggcgaacccttgcgcagcgaccgtatcgttcgtcgcctcggccaccgtcctgccggcctgcgcctgcatgatcgcgcgggtcaacagatggcccacattgtcgtggatttcccgggcgatacgtgtgcgttcaccgagtgttgccatacgaacggattgggcgcgctcctcatcgatgtcggcgatgcgcgaacgagtggcccgcgaggattcgcgcgccctgtcctgcgcgtgcagcaacgcgcgccgcgcctcgtccgaggaggcgcgggcccggcccagaacgaatccaagcagggcgaccatcgtcatcaccagcgtctggagacggtcggtgccacgggcgaaccagagcgcgatcagcggcaacacccatatccagcgcgcggcgaccgaaagccacggggccgaacgtattgcatcggcaagggaacggtgagaggccgcggtccgcgagacactggggaaacggccgcttgccgcagtccgtgccccagttcgggctccggccgaggcgagggccggcagctgtgcagtatcgtaggcgatgagcggcatgaacgcgcaccatgaaggcactgccacgacgatgacgagatacgccgtacacaagacccaagaccattgcgcgggacgcagccattccaccaatccggcgacggaaacggccaacagcaggccggcgatgaacacgccatcgagccgcaccccgacaagccaggccaaagccaggcccaacacgagcagcaagcccttctcggccaacacgcgcatggcacctccctggctcgacgctctttcaccaccagtctagcggtgtgcggaacacgacgaacttgacgggcgtgcggaattattcgcatgacggtccaagacaacgggtcacacttcccgaatagatgaggcacaagcgtcggatgttgtcgacacaaccgtaaagggatgataccgatgattgcgcaaagccacagggcgtccaactattcgatggacgagatcagcctgatgccggtcgataaggtgtacaaggccatgcagaccgacgccgaagggctgtaatgacaaatgtcacgcctgtgcggccaagtcgtgacatttgcctgtggcggcgtctggccccttcttgggatgatggaatcaccaaggaagggagtggctatggcaaccgacaacagagcttccgaacacgactcgacaaccaacccggccctggccgtgcacgtcagccaactggtcaaacgctacggcgacatggtggcgctcgactactttgaccttgacgtgaaccagggcgagattttcggcctgcttgggccgaacgggtccggcaaaaccaccgcgatcaactgcatcctcgcgctgctcacctacgattcgggcacgattcgcgtgttcggccagccgatgacgccgacctcctacgcgctgaagcgccgtatcggcatcgtgccgcagaacgtggccgtgttcaatgaactgaccgtcaccgaaaacatcgactacttctgctcgctgtacgtgccgaagaaaactgaccgcgcgccgctggtcgaggaggccatcgaattcgtcggactccaggacttccgcaagttctggcccggcaaactgtccggcggtctgctgcgacgcctgaacatcgcctgcggcatcgcgcacaagcctgacctgatcttcttcgacgaacccacggtcgccgtcgacccgcaaagccgcaattcgattctggaaggcatccagcggctcaaccaggccggcgccacggtgatctacaccagccactacatggaggaggtcgagcagatctgcgaccgcatcctcatcatggaccacggccggcacctggcgctcggaaccgccgacgagctcaagaacatgatcgacacgggcgagcgcatcaccatcgaaacgctcgatctggcggattcggcgatggccgaggtccgtgcgctgccgtgcgtgatcgaagccacctacgacggcaaggaactcgacgtgcgatgccggcgcggcgaacacaacctgaccgacgtgctcgacgcggtgaaacgctccggcgccaacatcggccacctgaccagtcgcccgcccaccctgaatgacgtattcctggaactcaccggcaaggcgttaagggactaacaatcttgcccccgctggcgggggctcccgcgaagcgggcgggggcggtcccgtagtaaccaccctcagtcggcttcgccgacagctcccgccagcgggagcaggtaaggagacatcatgtggaccacatttttggtcgcattgaaagcgaacctgcgcaatcgtcaggcactgttctggatgattgtgtttccgatcgtgctggcaaccatgttcaacgggttcttcggcggactgtccgagggatacgagctcaaaccgataccaatggccgtcgtcgaagatagccgctggcagcaggcggacggagcgcgtacgtttgtggatgccttgtctggagagacggcctcatcgtcggagtctttggacggcacggcatacgccgatatcaatcagcaattgctgaccatcaccgcagccgacaccgtgcggaaagccgaacagctgctcgccgatggcacagtccgcggctacctggctgctgacggcaatgggcgtttggcgataaccatcagtcgggaaacggtgaccgcggccaatgacaccacaggaagcgtcggactggatatcagcctatcggcattgcgcagcgccatcgacctgtacaaccgcaccgacgccgtcacccgacaaaccatcgccgacaatccacaggctgcgctcagccgcaacttctggaatagcatcgggcaaagcgtcgatgtgactcacgaaacaacgctcacgcatttccagcccaatgccatcgccagatactattacgcgttgctggccatgtcctgcatgattgccatggggtactcaatcagcacggtctccacagcacaagccaacctgtccgcattgggcattcgccgcaccgtggcgccattgagccatgccagacagcttattgccggtttccttgcctgctggttgtgcgcatcggtcgcattgcttatcgcattggcctatattcgcttcatttgcgacatttcgtttggagggcgagaaccggtgacggtggtcgcggtaatcatcgccgcattcatgaccagttcagccggtactttgctcggcgcggtaccgaagctttcctacgacacgaaatacggtttgtcgagcggaatcgcctgcacattgtcgctgttcaccggactgtacggcggcttcgccatgcagatcagtgactggatagcacgcaacgcgcccatcctcggcaccatcaaccccgcgcaacaggtgacgaacctgttttacgacattttgtactacgacagctaccagccgttcatcaccacttgtgccattttgctggcgatgagcgcggtattcctcttggccggcatcgcaatgctgaggaggcaacgctatgaacacctgtaaagccacattgcgtgtactgttctcgcacagggcctacctgttgatttacctcgtgttcgtgggcatcatgatgctgtctatcagctggtcgatgctgtctggcacatccgattccgcagccgcggcattcgagccggccaaaatgcgtgtcgccgtcatcgatcgagactcggacaggggcggcatcgcgtcatcgatgcgcacatacctgtcggattccagcgaactggtgaacgttgacgatgctagtgaaactctgcaacaagccgtcgcctcgaactgggtggatctgatcgtcatcatccccgatggtttcgccgacgatttcattgatgccgcggcgacaggcgagaatccaccaagagtggacacggtcaccagctatacgtccggtgcaggctcgatggcccggatgaacgtcagcgggttcctttcactcacacgtacggcactgattggctcgcatacgacggtcgatagtgcggcgctcgcagctatggccggtatcgacattggagacactgcgggtgattcgtctgaagatggcatgggcgggtttggtgaattctcgaatcaggacatgcttgatatgctgccggccggtcagattgagaaacccagcgtcggcgatctgttcgaggcatcgaaagcggctgccgcatcggcgagtgacatggacgcgaaccataaggtcgctgtgatcgacacggcaagcgcggacgcggaaagtgcttcggacatggcggccagcagatttggcaacaccatgaaaaccgcgctgtatccgctgtttttggcgatgaccgtctgcgggtcaatgattctgggcatattcaccaccggggaagttcgccgtcgtctcaccgcatccccacaacgcatgtcgtcgatgggactccagcggttgctgacgttgggcggattcgcgctcgtcgtatgcgtcggttatctggtgctggcggtcggtctgatggtcgcggcaggacttgatccgttgacattgagcgccgaaggagtgctgatgacgttctgcgcaacctgcgtatatgcgctgatgaccgtcgcctgtggattcatgctcagcgaattcgggttttcggaggcggctgccaacggattcgccaatatcttcggcctgctcatcatgttcacgtcgggagttgcattgccgattgacatgatgcccgccgtgatggtgactatggccaagttcctgcctggctggtggtattgcaccgcgatcgacaacgcgctcggctccggcacggcggaggaaaccggcataagcgtcgccggctgggccggctcgctgggattggtcgcactgttcggcgtgatgttcatctgcatcggcctggccgccggccggttccgccgctcccgccccgccctggccgcgcccgccaccacgcagctggccgagtgagaaatcagcctttcaaccgataccgctgtaccgagtcgtcggcgaacttgactcgggcgacccgcccttccttcatcagctcgcgcataccggatgtggcggccagcggcgtcaactgcagttcgcgcatgatctccttgacgctcatcgccgaatgccgctccagtacggtcataatcgccttgaccacgtcgcccggcgaactgttcgccatcgtgcgttgcttggtgatggtcatcgtgaacgtgttgatgtcgttgcgcgtggtcgccggctcgatgccggcctcgcgcaacgcggcggcgatacgctggtagccgtcgccgccttctgggttcacaaacccgccgcccggatacggcgtggactccagcagcgtgaacaggaactggtttcgggtggagacgaacggtgcacccgtcaccggatgcggactcgccagcacatcatgtgtcaccatgccatacagaccacccggattggtgatctcgatgcgatcggtgaacacgctgatatgcacctgcgtgccgcgcgcatcgggcgaataatcacggtgggtgagcgcgttcgcaatcgcctcgcgcaacacgagtggcggataatcgggcttcttcgcgccaatccaacgcatcaacgagtcgaccgcatcgtcgatcatcaccggaatcgaaccgaccaccgacttcgaggcgaccaatcgttcgtcgccccggaacacatcgtcccggctcgtccccggaaacacggctatcgaaatgccgagccgcggatagaacttctgcggatagcggcccaacgccagcagtccggccaaggtggggcgcagtattccgccgacctccgactcgtcggaatcatcatggcgcaacacctgcagatccagcagcgcatcgatgccgtcccggtcggcgaacacgcgcggatgctgttcgcgcacgcgtgccaacaatccggcaacaagctgcgggtcgaggtcatcggtcgtggcgccgggtacgatatccagatcgtaggtgggctgcagatgctcctcgatgagccggtcgacctcataggaggtcatgcgccggtcgccgtcgccggtgcggatgaacgagccgccgtgcggtccgagcgcggtggtgaagcagggcttatcgcgcggcagcatttcgtcgatgcgcgcgaacaccagattcgcgccttcgaacgggcaggtgacgatcacgggccgcaccaccggcgtcatcttctcgcacgcctggctcagcgcctcctgcatggcgcgcgcgtcgaatccctcgaccggcgtgaacccgttcttttcggacaggccaaggatgatccagccgccggagccgttggagaacgcggacagcgtatcggtgatggtcgaggagatcttgcgcttgcattccttgacctcgcactgctgcgtatcgttgccgatcagacgcatgagttcgatcagctcagtcattttggcagtatagtcatcgaccatggcggcctccttgacaccattgtgccccataatccgccgcccgctcgcctccagccccgccggttcaccccaattcatccagaattcatgggttactggtcaaagtacgaatgattgccgagaggctgtcgtatatgcgcaatagcggctgcaaactgtgttgcgccagagcgttcaagtcttttagcaaagtcgggaatgcttatcggtggccgatgtcgagaatcgataagctcacgtatggcgctagctgtggcttccggatttcgtctaagtaatacacagagcaaatcatctggcgtgatgacctgaatggagaaagagtcaagcagtttctggggaaaatccttgatattgcgcgtggccgcgcgtctgcttgtccctgtgccgcagccgcaagtacgtgacgatcatccgggtcgggcagatcgaattggctccattccgattcctcaacatgtagggaggattcggggaatgcctggtccatcattatcagtctttttcggaaggcttgttgtgcggcgtcaggcagtgttcgggaggcggcttcctgtgcttcttgtaatacgttaggcgaccacaggggaagaaaaaggtcatgctcggccaaggtgagcagaacatcggtcaaggtgatggaatagatgacattggcatcaagaaacaccgaaagcatcggcccgtactctccttacctccgataccgcatgcatggcttcctgcggggtcggctcgggcaggtcgtacaattcggcgtcttccccgacgccgatcatttggctcagggcgcaatccttggtgtgtttcgaggctcgcttgtattcaagcaggtcttccagccggatgcgacggtgattggacggacgtgaaaaaggaataagtcctttatcaagcagtcttatcagtgtttgccgcgaaatgccgagcattgccgccgcctgttcggtagtcagatcttgttcggtggcactgatcgttacacttttgccttcggcgagaaggatggccgtctgcctgacggcgtcgcaaagctgcgaaggtaggggagtctccacgccgctggcatctttgatgaagatccgctcatcaagaaatcgtgcggtgaatgcctccaatgtcgtcatgtcgtcaatgttgatggatggaaggattgttcgtggaatggtgagtttgtcggattctgccatggtgacctcctttttatctatcacagtataaaacgtccaaagcgaccaaaacgcctaaaacgttcaaactatgcgaattgacgatggttatcgagttttcgaatatgggttgctactggccgctaacgaggtcgaggagggcggactatgttgggtggccgtgggaatcttgcgtgtgattgatgctgccgttgctccgattgagggtatgtgggccaagggccgggtgaagttggcgtccgagccgaagggcaaacggttcggtttgttcgatgccaagggtcgcgtggtggatatcaaggcgccgatcggccccgattggaaaggcgcgaacggcgtgaagccgattcttgccgtcatggtcggcgattcattggtggccggatgtggcgtggacgaccagtcgaaaggcattatgccgctgcttgccgcgcgcgtcgcaagcgtaccggtcggccggtggcctggcgtacggtcggcaagctcggcgcgaccgcccggcgcgtgcgctaccggatgatcggcgatatcaacgatcggccggatgtgctgatcgtgtgcgtgggcggcaacgacatgctcgccggccgttcggtgcgcgaatgggccgctgacatcaccccggtgctggacgcggccaagaacaaggccggcagggtggtgcacacttttgctggtcactccatccaccactgccgcgaaaccatcggtgatgatcagcccgtcctcattgagcgactggtcagacctcttgccttggcagtgttgttctatgatgtgcatagcgattttcgattccatggttgtcagaacgcttaaaggcgtctactggctcattatgatggcagcagtgacatgcggatatggggggcgctgtctaaatgaaagtgcaacaccctttagattggagattgtccagataaccagtgaaagggtgttgcactttcatttagacagcggggggacgattgagaagtcataattccgttacactggcaaggacgaggaactaaggtatgcgcggattgtcggtattgagcagggcgttgcgatgggcgttggtgggtatgacgttttcgatgctgtccaacgcgattttcgaggggtcggtgatttcttcgattctgatcgtcggactgccggcatgggtgatcgcgttccgcaagacgttcaatctggtcatcgacttcgcttctccgatatccgcatggatcgtgcagcggttcggctcgttccgttcgcttgcgaccacggagggcgtggaaggcgtactgtgcctggcggtcgcgctggtgcccaacggttggacgtattggaagtggctgctgctgaccctgtcatgcctgctgctgatgaccgggcaggtcatcgacgtggcctccgaagtgttcgaggtggatgcggccggcgacgacgatgacatgctcgtcaagtacagcggctacgtcgccgtgattgccagcgtggccggtacgttgttgggccaggttgccggatcggccttggccaacgcctccatcatggccatgctgctcacctcgtcggcactgtcattcgcctgcgcgctgacgcgattccgcacccgcgagttcatgccgggattcggcaacgatggtgcgggcggcgatgacggcgacggctccgccgacgaatccacggcggccgacacgtcacacgcgccgcagcgcactccggtcacccgctcgacccgggtcagactgctgatcgcatcgctgctgcttgcgctgattccgtcgctgtgggcaagctatgcgttgctgggcatcggctcccggtacggcagcgatatgctgaccgtggtctacgcattcggcggcgtgggcagcatcatcggatcgtttgtctacatgcggctctccgcaaaactcggcatgcgcgccgtgtccgccatcggggcaatcgccacggcgatttcccttgccgccgtactggttcccgagtttgccgcggtgtgcgtcggatggctcatcaacaacctcggctatggcctgctggcgcatggcgtgatcgtatcgcgacaactgctgctgagcggtggtgacctggccaaatttagcggccgtgccaggttcgcgtatgcgatcggcggtgccgtcggcacgtggggcggctggctcggctccgcccactggcagatactcgccgtcgtggccctggtactgtgcgccggattcatcccgttgctcaaggccatgcctggcccggtacggcactgaggtgacggatggggccggctggcatctcgtgcgccgggcgatttcggcagattttgccgtgctgatgtatgcaggtgttgacgttcggcgaggttcccagccacattgctgtgtgattgatgccgctcgataggcatgtcaggccggacacaccacggtgatgccgaatgggcgacgggccgacgacccgcatcatcgcagcagccgggttttgccatccttgacaagcagggcctgccggttggtgaggggcttgagactgagatcggcaccataccggtcgagaatgcgttgtgcggcgtggcccatggccgttgcatgatggtgggggaccacgcggaaatcagccaagcccaatcctgcgtaatcggtgagatcgggggctttgtccgtgcggtccatgagcttgatatagccgatgtcaggtgccgtgatgaccgagcccgcggactcgccgatgtacggcgtgccggcgcgcacctgctcgatgatggcccggtcggcaccggtgcggcgcaactcctgcaggagaaagaacgtgttgccgccgcccacatagatgcagtcggcctcggcgatgctacgcgtgacgcgttcggcggacccgctcggcacatcttccacatccagttgctccacctcgaaaccgaggcgttgcagcgcgtgtttgctcaacgccgagtgaaccggcccccacggttccacggcgctcgccgtcgggatgaacgcgacccgcttgccttgcggatgcggttcgacttcatgcacggcggacgaggcgttgcggaatatcgaagtcagcagcatcgtaaccataaaagccttcttcacatatcgactaggcgactatgcggcagtgtcggccttgaatatacggaagtgttcgtgcgttcgctctgggtatatccggcctgatcagcgggactcggccaatgtgatgccggccgccgtcatctgtttgcgggccgcgacaccgagctcctcgctgaccggtacggtcaggtcctcgaacacggtgacctcgaaaccgaacttcctggcatcgagcgcggtgtccttgacgcaatgcgattcggcgatgcccaccacatccacgcgactcacgccggcggccttcagcgcattggccagcgtcttgccggcggattgctcggccgcaacctcctcacgggtctggatacggtcggtattgtcctcgatgccctcaaaaccggaatatgccgccgaatactggcccttcttgaaatgatgatggataatcagcgccttgatcgccggatgcaattcggcgttcggcgtgccggccgcaccatgcttcggccacgtgtccacgaaatccggttccgccgaccagtgcgcgcccggctcgatatgccagtcctgcgtggttgcgatatacgcgtactcgctgcgatgcgcgttcacataatcggcgatccgctcggcgaccgcgttgccgccttcgactcccagttcgccgccttcacagaacgtcggctgcatatccaccacaatcagtgccttggtcatcatcattccccctattgccttggattcgttttgaatattgtctcgaactcgacgtgcgattgctctcatcatagccatgcgcggccctgtgggaaacgttcgggcttacactgcaagcagcaatcgaatacaagaaccaggggagggtgaccaagaccatgctggaccatctgacgttgcacgtgaaagacatcgaccgtagcatcacattctacaaacaggcgctcgcaccgctcggctatatcgtcaaggcgcatcatgagcccacgctcggattcggcgtggatgacggaaccctgcactccgatttctacgtgtcgccgattgacgggccggaggcggaggcttcgccggtcacgccggtcacacacatcgcgttcctggctgacagtcagcaagccgtgcaggcgttccatgcagccgcgctcgccgccggcggccgagacaatggcgctcccggtccgcgcccgtaccatcccggctattactccgcattcgtgctggacccggatggcaataacatcgaagccgtcgtggattgggctcattcgaacgagtaaaaatcatatccgtatcgtgcctcaggcggcatcgacggcgtaggctccagtcagtcggatttgtggtcgcgacggcgttataggtcacatcacgcaagcgtgacggtgacggtctgctcggcggtttcggtgccggtccatgtaccggctttgcggttccaattcatgccgtccgcgtgcagtgcgtcaatgccgtattgacgtgcatgcgtgaccagccagcctgccgtctgccagcaaagtcgagtgcggttgtcggcggacaggccgtccggcagtgtgatcgtcaacgttgtgctggccgtattggtcgcagcgccgttgttcgtgccgcttttgccatttgggggcgcaaccgagacactgacattcggcagtgtaccgcctatggcggcaaccagcccgtccgcgtccgaggagattgctggctccaacgcgcacgtgacgtccgccgaccgttcaccggtcagccccgaggcccaagcgcgtgccatcgcatcccatgtggcatatagttccgggtagcctgagcgctgcacctcctgcgcggcgtcctccaccggaatcgtctcccaatccggcacctgcagcagatggtcgtagaagatgtttgtcgcataggtcatgtcggacacctgctccgccgtgccccagccttggctgggccgctgttggaacaggccgagcgaatccaagtcgccgtagtccagattcgtcagcctcgactcctgcatggccgtggcgatggccaccgtcgccgcgtgatccggcagtccgcgcgtgacggcgatgttcgcaatcagcgccgcgttctgcgcctgatcaggcgtcaaggtgcggcgggctccgtcgggcgacaccgccgcgcaatatgcttcctcggccgtgcgcgcggtctcgtgaggcgtgaatagccgtggcagcagcgtccatgccgcgatcagcgccgcaacaacaagtatgacggctgcaatcagcgcgcccgcgccatgggagcggcgtctgccgcaccgcacctgttgtcccattgcgcctccaatatttcggtgtcatggctgaccgtgaccggctggcctatgcagcatgcgagatttgccgtgttccggctcggccgtcctcatgacagcgtggcatatccacctgaacggcggctgcgccatcacgcgactttgtgacaattcttcacgcttcctgacatccgcgcaatcagaccggggaatgatacaccgacatctctattgcaagttcgacgcagctgataagtcgattcgcaatcgtctatttgcgtttcaaggggctgatttgctcgttccgagacatccacttccgtttcgaggggctgatggccgagtagcgacagctccaaaacggcgaaatgacgttggcatgaagctattcgtacttgggttttggccaatgaccagccccttgaaacggaagtggatgtccccaaaccacgaaatcagcccctcgaaaccgagaatggcggtcgggattgctctgacaccaggggagctgctgccgctattgtgtgaaaggcgatttgtaccgggttgaaggagaggcacacatggcacaattgcagccgtactgcgcgattgagggcaatgatgatggattgcccgtcgtgttcgtgcatggcatgggtgtggaccatcgttcgctgatgatgctcgacaaggcgtttgacggcaatgattcaattcgccgtatatatctggatctgcccggtttcggccgtacgccggcattgcccgagcatgcctgcgggctgccggaaatggcggattggctgcaaacggccattgacggccttgtcggtaaagcggctccattcgccatggtcggcaactcgatgggcggtgcgcttgtccgcgaagtattggcgcgcgaacctcgccgagtggccggtatggcattgatcgcgccggtcgtggacccgcagcataccggccggcatgtggccgaacatgtggttgcacagcccaatcccaagctgacgcactccttgccacaggaacaggtgttcgatttcattaccatgggcgtcaaccagtcattcgacgcgtggcggcgctaccaacggttcatcctgcccggcgtggcgttgtgcgaccgtgcggcatgcgaacgactggatcagcgttattggctggccgataatcccgaggaaatgctcggcacatatgctggtccggtgctcatcgtcaccggcaagcaagaccagatcgtcggatacgaagaccagcaagccctgttgccgcactatcccaacgccaccttcgtgactctggataatgccggtcacaacgcgcacatcgaccaacccgaagccgtcatcacgctcgtgcgcgaatgggtggctcatatggcgttcgttccgttgagctgacggtctgctgacagtctgccgaagcctatatgcatatgagcgaccaatgccggttgacgcaatacgccttgcaaggtatatcgtttttcgatatagtcatatcgatgttcgcggtgtcgccaaaaacgtcggcacctgaaaggaccgggctatgaaaaactacatgaaccgatgggtgttgctcgcgttgaaagccatcgtgattctggtctggctggcctgcctatggggccaactattcgccgtaccgggattgagcggcgcgctggccggcctctgcccgagacagacgtcgatgcactggtcatatctcattatgggcgtgctgttcctgctctgcatcgaagcggcgttcgtggccgtatggaaactgttctccttgtccggatcgggcgcgaacctgagcaggtgatttgagatgacgattcgcatcaatctcgacgtcatgatggccaaacgcaagattggcgtcggcgagctcgccgaacaaattggcatcacgcccgccaacgtgtccattctgaagaacggacgtgccaaagccgtccgcttcaccacattggacgccatctgcaaggcactcgactgccaacccggagacatcctcgaatgggaagatgtcgattgatcgacacgccaccggctcgaactcatggttcaacttgtagtctctctcaaaatcaatgatgccctatcatcctgcaagacgatagggcatcagcatgtgattatgcgcagctgatatgtcgcgttgttatcactcggcgtccgcggccggtgcctccttgggcgcggagaggaagtgctcctcgctgggcagcacggcgttcaggattacggccaccacgaacgacacggcgatgcagttcgaggcgaagatttgttggaacagtgccgggaactgcgcgaagatgtcgctcacctgggtgaagccgatgccgatggtcagcgaaagcgccgcaatcgtgatgttgcgctgcgtgaagcccgcttcggcgatcatctggaagcccgaaagaatgatgttgccgaacatcatgatcgtgcagccgccgagcaccgcctgcggcagcgagttgaacacctcggcgatggccggcacgaagctcgccagcaccagaatcagtccgccggagagaatcaccttgcggttgacgaccttggtcatggccaccaatccgatgttctgtgcgaacgaggtcagcggcaggcatccgaacaggccggatacggtggagatcaggccgtcgccggcgatggcgcccgcggtctcgcgttcggtgggcgtacggttcaggcccaccttggtcagcgcggcggtgtcacccagcacctcgaccgaggagacgacgtagagcaggccgatggagatgatcgaaccccagtcgaactcaggcttgaacggcatgaactgcggcacggacacaatagcgaggttctggaaaccggagaaatcgaccttgcccatgcagatggccgccacatagccgaccaccaggccgaacagcacggacagctgcttggccgtgcccttcatcaacagctggaacgccaggcaggcgaccaaagatattagcccgagcgtcaggttctgccagcttccgaagtccttggctccgctgccgccgccgaagctcgtggcacccacgttaagcagcgagaagccgatcgacgtgaccacgatggcggagacgatgggcggcacgaaccgacgccaatacttggccgtcaaacccagcacgagttccagcaggccaccgaccattaccgcgccggccactgcgccatagcccttgtctgcgcagatcgccacggcggccgccacgtaggtgaaggagatgccggtgaccatcggcagacgcgagccgatgagccacgcgccgtacagttgcaggcaggtgcccaggcccgccaccagaaggccggcctggatgatggtggccgattgggccggggtcattttcgcggccgaggcgacgatgaagatcggggcgaggttcgccacgaacatggccatcacatgctgcaggccgaacggaatgcccttccagaaggatactggcgcgttcagcgaagacagcgcctcaaaggatacggaattcttggttttcttctctgacatgattcttttcttctctctgttgctcccgctggcgggagcagtcaatgtgctcagtgcctaaatgtgatttcgccggtctcgggattcatggactcgacgatggccagcgaatccacatcgtagccttcggcacgcagcgcgtcaccgccgccctggaagcccttctccacggcgatgccaatgccctcgaccgtgacaccggccgcctcgcacaggtcaatcagaccgcgcaacgccttgccgttggccagaaaatcgtcaataagcagcacatggtcgccggcgttcagatacttcttggccacgatcaccgggaactccttctgcttggtgaaggaatagaccgtggtggtgtactggtcgccgtcaaggttgatggactgcgccttcttggcgaacaccaccggcacattgccgaaatgctgggccgccacacacgcaatgccgatgccggacgcctcgatggtcagaatcttggtgatgtgcttgccggcgaaatgagcggcccatgccgaacccatgcggtcgaacagacgcacgtcgcactggtggttcagaaacgcgtccaccttgagcacatcacccgccttcaccgttccctcgctctggattcgctcctcaagttcctgcattagacctcccattgctgtatgtcagtgaatgatatggatacttgtaagtgtacgttgtcctgcgctgacccgtgcatgtggtaaacatgaatgtcgcgattcaaagggaggcaacagtgtacgacgagccggaagtcatcgcacgcagcgcgcaggaactcgtaggcgatctgaacccgcagcaggcggaagccgtgcaataccgcggtcaggcgctactgatcggcgccggtgccggctccggcaaaacccgtgtgctgacccgccgcatcgcctggatcttgagccagttcggcgcatggccgagccagattctggccatcaccttcaccaacaaggccgccgccgaaatgcgcgaacgactcggctcgctgatcggcccggtggcccagcgcatgtgggtctccaccttccattccgcctgcgtgcgcattctgaggcgcgacggcaagtccatcgggctcaagtccggcttctccatttatgattccgccgactccgagcgactcgtcaaaatcatcgccaccgaattcaacctcgacatcaagcgctacactccacgctcgatcctcggccatatctccgacctcaagaacaatctgaccggttggaaggaaaacctcgccgttcacgcgcccgacttcacgcctggccagcgcggctaccagttcggcacggtgggcgaccttgaagccatctatgcggtgatctacgccgaatacgagcatcgcttggccctggccaacgccgtcgacttcgacgatctgatcggccgcacggtcgagttgctgcgcaccgacccggccgtcgccgagtactaccatcaccgcttccgttacattctcgtcgacgagtatcaggacaccaaccacgcccagtacgtgcttgtgcgcgagctggccggcgtggacacgggggagaaggccatcccgggcgcgccgaacgccggcaagtccggccccgcctggatcaccgtggtgggcgattccgaccagtccatctacgcgttccgtggcgccgacatccgcaacatccaggacttcgagcaggacttcccgaacgccaagaccatcatgctcgaacagaactatcgttcgacgcagaccattctggacgcggccaacgcggtgatcagcaacaacgagggccgcaagcccaagaaactgtggaccgcgctcggcaagggcgagccgatcgtcggctacgcggcggacaacgcccagcaggaggcccagtgggtggccaccgaaatcgcgcgcctgcacgccgaagagggcatctcctactccgacatggcgatcatgtaccgcgccaacgcccaatcccgctcgctcgaagaggcgctgatcaacacgaatcagccgtatcagctcgtcggcggcaccaagttctacgaacgtcgcgaaatcaaggatgcgctggcctatttgcaggcgctcgtcaatccggacgacgatgtgaatctacgtcgtattctcaacgtgcccaagcgcgggcttggcgaccgcgccgaaggcgtgctgctcgcctacgcgcgcgagcatggcaccagcttcttctacgcactcatgcacttggatgagatcgaggtgccgacccgcaccgccacctcgctacgagcattccgcgatctgatgggcgcgctctcgcagttcacgcacgcgcacgactccaagcccagcgagatcgtggccgaagtattggagaagtcgggcttaagggccgaacttgagaaatccgtggatccgcaggacgcctcccgtctggagaacctctcccagctgcagtccaccgcagccgaattcgaacagaacacgcctgacgccacgttatccgcattcctggagaccactgcgctcgtggccgactccgaccagctgcccggtgaggcggaggactccggcaaggtgacgctcatgaccttgcacaccgccaagggcctcgaatacccggtggtgttcctgaccggcatggaacagggcaccttcccgcattcgcgttcgatggaagacaccactgaactgcaggaggaacgccgactcgcctatgtgggcatcacgcgtgccaagcagagactgtatgtcacgcgcgccgccgtccgctcccagtggggccaggccgccgatatgatgcccagccaattcctcgacgaaattccggattcgctgattgattggaaacgccgtgaagccggcgtggagcgtatgcgcgccaactgggagaccgatggattcgccgacgatttgggcggctgggatgatgacgatttcggcggtgccacgtttggcgggtcgtcgacgttcggctcgcgtggttcgtccggttcgggttcgtcctatgggtcgcggtcgcggtatgggtcgtcgtatggctcgggttccggctcctcgtcgtatggttcccgttcaggttcttcgtacggttcccgttcatcatcatatgattcccgctccggctcgtcctcctacgggtctcgctcccgttcggggtcgtcttacgggtcgcgttcccgttccggttcttcatctggttcatatggcggcacccgtggcggcaaggtcaccacgcgccgcaccacaccgaaatccggttcgaccggctctgccgtgcccagctcgaagctcaccaaggacaatggcctgaatatcgccgacttcgccgtgggcgacatgatcagccacgaccagtacggtctcggcaaggtcaccgacgcgcaagacaagggccgcaattcggtaatcaccgtggacttcggctccgccggcgtcaaacgcctcatgctccgcgtagcacctattgagaagttgtagatagattggcccctctgacgaggggctgagttatataccaaataaattcacaaaaaacaagacttgtgttcttcatcactatctgggcataatgcggaggttgcgcctacgagccctgggaacaggggagaggaaaaagtagttatgaagaacaagctgtttgcatccgtgcccaatattctgttcggcgcgctgatcaccatcgcgctccagacctttgcgcacgcctgcaccggccatgacatgccgggtgcctgccactactcgcagcaggcggccaccggcatcggcgtcgtcatcctcgtgtttggcgtcgtggctttgttcgtcgccccgcagattcgcatcggcctcaatatcgccgccgcagccaacgccctgctactactcgccgtacccaccttcctgatcggcatctgcaagggcgcgatgatgcactgccgcatggttatgctgcccacgctcatcgtgctcggcgtgctcaccatcgtgttcgcggccatcgccatctggctcgactctcgcgccgccaagcgcaactgatcgagcagacggccggagcccagccattccgaacgctggactccggtctcgcttattgcaaccgcactataagcaacataaggactcatcgtgccatcccatatcgcattgcgcggccttccgattgaaaacctcaaacgcaagccgttccgcaccggcgcactgctcgccgtcgtcaccatcctcgcgctgacgttcttcggcggcaccatgctgaccatgaacctcaacaccggcatgaccagtatggagaagcgcctgggcgccgaccttatggtcgtgccgcaaaacaccgcgcagaaggctgaagcgctgctcaccagcggcaatcccagcactttctatttcaccaaagacatcgccgacgaggtcatgcaggccgacggcatcgcacaggccaccgaacagacctatatatcatcgctggccgccgcctgctgtgccgaaaagctgcagatcatcggttacgacccggacactgacttcgtcatcgaaccatgggtcgcatcccagttcgaaggcccccttgaagacggtcagatgattgccggcgcaaacgtcaacgtgtccaccgacggcaccatcgaactctacggccataagtggccggtcgtcgcccagctcgccaacaccggcaccagcctcgacaattcggtgttcatcaaccaaaacaccgtgcctgatatggtcgccgcctcggccaaggtctccaagcaggtcatgcccgccgaatatgcaggcgaagccgtctccaccgtgatgatcaagacgcagcggggttacgaagcgcagaccgtggctgaaaacatcaagcgtcttgactcccggttcgccgatttggggtacgtataccccggcggcatcaccgccaacaccagaacttcgctgaccgcgcttgtcacctacctcaagattttcgtggcggtgatctgggtaatgggcgtgattgtgctgctcgccgtattcgcctcgtcggtgaacgaacgcaaacgcgaattcgcgtccctgcgcatcatgggcgccacgcgcggcatgttgaatgccatcattctgaaggaatccgccatcatcggtctgatcggtggcgtaatcggcgtcggcgcggccagcctggtgattttcccattcagttcgctgatcggcaaacaacttcaattgccgtatctgcaagccagcccggttgcggtgatcggattcattgccgtgaccattgtgtgctctacggtcatcggcatcatcggttcgctggccaccatgtggcgtctcggccggcccgaagcctacctgaccctgcgagagggggagtgatatgactgagacaactacgccgactcggctgaccacggttgagccgaccaagctccagccgaccacgccagctcagccgaacgcgccgactgcgccggattcgccgcacgtaaccgagacgccctccccggaccatctgctgaccttgacggacctgacccgccagttcgtccgccgcggcacgccgttcgacgccgtcagccacgtgaacctcaccgtcgatgccggcgaattcatcgccatcgtcggccggtcgggcaacggcaaaagcacgctgatcaacatggtcgccgggctgattcgcccgacctcgggaaccgtgagcgtggctggacgcaatgtggccgacttgggcgataaagcactgtccgtgctgaggaatcgcaccatcggattcgtgacccaaagccagaccctgctcggcaacctgaccgtgctcgacaacgtgattctgcccgcaacgatgtttccggagccgctgccgtttgcccaaaacgcagaagcaacggatgccgttgctcaggtggacgctgttgcgtcgaccgatgccgtggcacaagccgctgccaccaatgatgaagcagccgccgacctgttcatgccggatgtcattgcgccaatcacagaccgggaaaacacgccgtcaaacacggctgcgagccgtccggacctgttcgccacccgagctcgcatgctgctcacccagcttggtgtcgccgatctggcagacagctacccgcgcgagctgtccggcggtgaaatgcggcgcgtctccatcgcccgcgcgctgatgaaccagccgagcctgctcatcgccgacgagccgaccggcgacctcgaccaggagagcaccgacatcgtaatgcgtctgctcagagaccaagccaacaacggcacggcgattctcatggtcacccatgatcccgatgcactcgaatacgcagaccgggtgtatcgcatggacgccggagtgctgtccatagcctcggtgtaatatgatctgttggtgtctgccaacaggtagataccgtctggagtcatagcccatcagcgggtcggcggtaggtgatcgcaagaaaaccaacccgttcgtgttcgttcacgacgaagcgctggggaggcccggctcagcgcttgccaggcatatgcaaggcaagcgttccgttcagataacgacagaaggattaatccaatgacgaacgttcagcgttctcgccgtcaggtgcgtctgtctcgcgccctcggcatcgcactgacccccaaggctcagcgcatcttcgaaaagcgtccgtacgctcctggcgagcacggccgtgaccgccgccgcaccgagtccgattacgcggtgcgtatgcgcgaaaagcagcgtctgcgcgctcagtacggtatctccgagaagcagcttcgcgccgcttacgagaaggccacccgcactgccggccagaccggtaacgccatgctgaccgacctcgagacccgtctcgacaacctggtgctgcgtgccggcttcgcccgcaccaccgcccaggcccgtcagttcgtggtgcaccgtcacatcctcgttgacggcaacatcgtggaccgcccgtcctaccgcgtcaagcccggccagaccattcaggtgaaggccaagagccagaccatggttccgttccagatcgccgccgaaggcgtgcaccgtgacgtgctgcctgcggtccccggctacctcgacgtgaacctgccgtccctgaaggccactgtgacccgtaagccggaggtcgaggagatcccggtgcaggtcaacatccagtacgtggtcgaattctacgcccgctgatccgggccctctggtcaacaaatccaggacataccgctcgaaccccgcgcttctttcgagaagccgcggggttcctgcgttgtagggcgattactggccgcacaccgcctgacgaatcatcgtcgcgtacgcataggcaccggtcatattcggatgaatgccgtcatcgttgaggtattcgctatgaccttcgctatacccatgccaatcgatgatgcccacgttcttgttcttcttggcggcctcacgcagcatcgtattgttgttgttctcctgccacgggtatggcatacggatggtgatgaagtatgtcggcttgccgccggtcaggtcaatgagctgttgcacttcctgctcattcgaaatcacgccgttcgtgccgaggccaaacaccaccacactgccactgtggccggcagcggtgtcctgctgatacacatccaccgcctgcggcatctgacggttcggcaggccatcgataaaagcgttcgggaatgcggcctggatggcgtccgaagtacccgacgtcactgaatcgccgaccatcatcatatccgcgttgcagctttccgttgccggatcataggcgtacttcgaaatgtcaagattgtttggcaccttttccgcaatcggtttgatggtgggcggctgagaatccgaaccgttcttattcgcgtcagcggtattggtttcgccgttcgcggcattcgtggcagaagactcgggctcgggcttcgccggtttcttgaccggcttggcgggtgccgcgagttcggggcgcagctgaatggctcgcgcttgagcgatgccattccaatccaccggtgcccacgtcagcaccacaacggtcaccaatccgataaccgacatgacccacgcgcccgggcgcagctggcagccggctttcggtagcggcttggcatgttggctgcgaggcatctgcaccgatttacgggccgcctcgaccagctggtagaaggcttccgacgccgccaacaccacgatggcctcaagaacccaaccccaccacggcaacgcctgcgttcgtgtcgccgggttcatgaactgcagcagcggataatgcatgacgtacagcgagaacgatcgcgacccgatatagcgtaggggagcgcaacccagcacgcgcgaccagattgagtcattgttcacggcacaggccaaggcgcacaacgatatgaacgcggtaatcaggtacccgccttggtacatgtacgacagatacccgttggcgaaccagaatccggccagcagtgccgccaaagccgcggtgccaagaacattgcagacgatagtgagacgggcgcccgtcttgtcgccggcctgacgtccgatctgcactgtttgcgaagccgctccagcttccgcaacttccgtacctcgcgaggaaggcgcaatccagatagccaacagcgcgccggcggccagctcggcgagacgagtatcggtaccgtaatacacgcgggaggtattggccgggtcaaacagcagcaccatggcggcggtggaagcagccatgatgacaagaatcgccatggagcgcacccatttggacttggtgattttgccgagcaccaccatcagcaacggccaaatcagatagaactgcatcgtcacgcccaagaaccacagatgggtcagaggagaaggcaatccggccgcctcgaaatacggcaccttgcggaagatgtacacccaattgctgacgaacaaggcgctcggcagcgaatcggaaaccactttctgcaacaggctgggagcgaacatccaagtgagccaaggcaccacggcaatggtcgccagcatcaccggccataaacgagtaatgcggcggatcagatatcggccatatccaaaggacccggtgcggtccaccatgttcagtactgaacgtgtggcaagaaaaccggtgataacgaaaaacatcgtcacgccaatgaatccgccctgcaatagcgacgggcgggtgtggaatgctatgactccaagaatcgccagagcgcgcagtccatcgatacccctgaaatgggcaggctcagacgattgagatggtgcaggtttcgaggttatgctcatagtaccctaagtgtactctcaggaatcgtcaggtatactacccggattacgcatatctcaggtagtgacctatgccgttatgacttatgacttccggcagcccgcaccgaaaccgccggaatggtgacataatcggaaccatgattcttcatctgcatttggtccgtcacggacagacctatttcaaccgatacaaccgtctgcagggatggtcgaattcgccgctgaccgagtcgggcgtcgctgatgccgtcaaggccggtgagcgactgaaaggattgacgttcaccgccgcctactgttcggacaccacgcgtgcccggcagacggccgagaaaattctcgacatcaacgaagccgcgggtaacccgcgccccgcactcgtgacggacatgcacttccgcgagcagttctacggctactacgagggacttgacatggccatggcctggtacgccgcgggagcgcctcacggcgccaaaacctacaaccaaatcgtcgagaagttcgggttgggggcctcgcgtgattttctcaaggaagccgatcccttccacgatgcggaatccgatgaggaatattggacgcgcgtcgaaggcgcgttccgtcttatcgccgacaacccgaatctcaaggatggcgacgatgtgctgcagatttcgcatggcaacacactgcttagcctcggccaccggttcggcggccctgacctcgatctgaacgaacgcccggccaatggttcggtaaccgtgctcgacttcgacaccgacaagccgttcggcgaggccgtgaccatcgtttcgtacggcaagtagcaaatagcaagcaatacatatcgaatagcacgtacggtccacggcggcacgccgcaaacgaaagcgtcagcaggacacctttcgcctatagccgcatgcatccacgcgcacggttttcgccctgcgcgtgcaatggtatgccaagaaatagggaaggagtgctacccttaggcgagtaagtgtgaccgcaaggaggaaacaatgggagtcggagagatcgctggcctgatcgcggccatcgcgttcgcagtattggccggtttcatgatctatccgctgatcaggctgggcaagatgtttgatcagatatcgcagacggtccgggagtccggcgaacacgccatccccgcgctggacgaaggcgtgaccaccgtcaagcaggtcaacaagtcgcttgaagacgtgaacaagatttccgccgcggcttccaccaccgccaacaacgttggtgcgttgactgatctgtatggctctttcctcggtaagcccatcatcaagatcgcttccaccttctacgcgctgaaaaccacgggtcagtccttccttgcgaagaacgccgcgaaaaccaccgtcaacgacaccgccgagaagggggagtgatgttcaaacgcatcttctgggtcggcgtcggcgtggccatcggaatcgttgccgtcaccaaggcacaggcctatgtcaaggccaatacacctgatgcggcacgccagttcctgcttggccccgatcaggacaatgtgccgatgaaaacactcgaagggttggtcaacgagttcaatgccgcccgtcgagcccgcgaggctgagctcaaccgtcagtacatcgagcgcgccaactgacacgcgcatgccgccttgccatctagtcactgaaccagctagaacaaactagtcctcataatccagtctttttccaccaataccaggcgcaactgcgcccattacccaaacaaggagttcatccgctcatgcgcactgcggacatcgcaaagcgatacctcgattactttgccaaacatgatcatctcgtcatgccttcggcatccctgatttccccgaaccccaccacgctgttcaccatcgccggcatggtgccgttcattccctaccttcttggtgagcagaccccgccgaagcgccgcatgacatcgaaccagaagtgcgttcgtacgctggatatcgatgaggtcggcaagaccacccgccatggcaccttcttccagatgcttggcaacttctccatcggcgactacttcaaggaagaggccatccactacgcctgggagctgctgaccaccccgcagagcgagggcggttacggctttgacccggaaaagctgtgggtcaccacctttaccgacgatgaagaggcccgttccatctggaagaacgagggcttcgatcccgagcacatgcagattttcggcatggaagacaacttctggaccaccggtggccctggccctggtggcccctgctccgagatctacgtggaccgcggccccgaatacggtcgtgatggcggtcccgcggccgatgagacgcgcttcatcgagatctgggacctcgtgttcgagaactacgaggtcgacaacgtcaagtccaagaccgacctgcacatcgtcggcgagcttgcccagaagaacatcgataccggtgccggtctggaacgcttggcctacctgatgcagggcaagcagaacatctacgagaccgatgaggtcttcccggtcatcgaggccgccgagcgcttgtccggccgcaagtacggcgaggacgaggccgcggatgtcaagttccgtgtcgtggccgatcacgtgcgttccgcgctgatgattatgtccgatggcgtgcgcccgtccaacgtcggccgcggctacgtgctgcgtcgcctgctgcgtcgcaccgtgcaggccatgcgtgtactcggtgtgaccgatccggtgattcccgagctgctgcctgtctccaaggaggccatggtcgccagctacccggagcttaacgacaccttccacgatgtctccgaagcggcctacggcgaggaagatgcgttccgtcgtacgctggagaacggcatcgagattctcgacgtggctgtcaagaaggccaagaagaccgccgacccggtggtctctggctctgatgcgttcactctgcacgacacttacggcttcccgattgagctgaccctcgaaatggccgccgatcagggcgtgaaggtggacgaggccaagttccgcgaactcatggccgagcagaagtcccgcgcccgcgccgacgccctcaagaagcgtcacaacgtggatctttccgtttacgacgacttcaagaagacgctcgtcagcccgatcgacttcctcggctacacggatatgtccgcccgcgccaaggtcatcggcatcatgcaggaaggcaagggctccgtgcccgccgtcaccggcccggccaacgtcgaagtcattctcgaccgtaccccgttctatgcggaggccggcggccagcttgccgatcagggcgagatcctgtccgacgacggtgcagtgctcgaagtcgacgacgtgcagaagcccatcaaggacctcatcgtccaccagtgccgtctgaccgaaggcacgctggtcgtcggcgccgaagtcaacgccaacatcgacctggcccgccgtggcgccatcgcccgctcgcacaccgccacgcacatggtgcacaaggcgctgcgtgaggagctcggcccgcaggccacccagcgcggctccgaggacgccccgaaccgtctgcgcttcgacttccagtggtccaaggccccggccaagtccgtgatctccgcagtcgaggagcgcgtcaacgacaagctgcgcgacaacctcgccgtgaccaccaaggaaatgaagttcgacgacgccatcgccctcggtgccatgcacctgttcggcgagaagtacggcgacatcgtacgcgtggtctccatcggcgaagacggctggagccgcgagctgtgtggtggtacccacgtggaccacgtcggcaagatcggcatggtcaacatcctgtccgaagcctccatcggctccggcgtgcgtcgtgtcgacgccgtcgtgggccagggtgcctatgacttcaacgctcgtgagcacgcgttggtctcccagctgtccgacaagctcaacgctcgcccggacgagctcgccgagcgtgtgaacgccctgctcgccaagctcaaggaatccgatcgtcgcttggcctccatgtacgagtcccagctggccgcctcggttccggcgctggttgctgacaccaagaactccgcggccccggtcaaggtggccgtcaagaacgtgggccacttcggcgcggtcgacgccctgcgcaagaccgtactcgacgtgcgcgcccagctcggtgaagacgcccccgtggtggtggccctcgccggcgtgaacgaggatgacaagccgatggtcgccgtggccaccaacgaggccgcccgcaaggtcggcatcaaggccggtgatctggtgcgtggcgcagccaaggtcctcggcggcggtggcggcggcaagccggacttcgcccagggtggcggtgtcgatgcctccaagatcgacgaggccctcgaagcgctcgagcacgaggcgcagaaagcctgattccgccagtggtgtggttaggcgttgatttgggtaatgcccgggtcggactggcactgtccgacccggagcttacctttgcacaccctgctggcaacattcatgttgccggcgactatttctttgctattgacgaggtcctgaacgtcatcgaagacgaacatgtggaccatgtaatcgtcggactgcccctgcagatggacggtacagaaggcaaaagcgccaaaaaagcgcgcaggtgggcggccaatctggagaagaggctgcaagcagagagtgaagacagtgattctacggagtatcagattccgcaggtgtcattgatagatgagagattgacaacagtcagtgcgcatcgtcaactgttcgaggcccataaagcttcgaacaagcacaggccggtggttgaccagcagtcggcagtggtgattttgcagacggcactcgaccgtacccgggagcagtgaggtatcggttatgaccgatgattttaacgagttctttgatgacaacacgcattgggtcgaacaggggtcagaaccaatgcgcgggaccgagccgccagaaccgccgaaatcccgcaaggagatgcgcaagcgacgtgcacagcgcaagcgcaagcgcgtcagtggcattatcatcgctatcgccatcgtcgccctgcttatcggcggcggctatttcggcgtaaccaagctcatcgcatggcgcgacagccggagcaaccagtcgacggccatcgcggactatcggggaccgggctatggcgaggtcgaattcaccgtgagcgagggccaaggcgcggcggagatcgccgataatctgctcaaggccgaagtcatcaagtctactgccgcgttcaccagcgtggtcaacgccaatagcgcgacactctatccgggaacgttcacattgaagaagcatatggccgcatccgatgtgatcgccgttctctccgacaccaaccaggcggcgggcttccttgaggttcatcccggtgaacgtgccaccgatgtgttcgccgacgccgcgaagctttccggcatttcccaaagcgaattcgacacgattatcaagaacaagggtaaggatattctgcccaatgaagcgggcggtagctttgagggatggctggagccgggaacctacaacgtcaagagcatgaagagcgcttcggaaatcctcaaggccatggtcgataagcgtatcgccaagttggatgaattgggcgtgccgaccggcagtgaccgcgaacgggtgatgatcatcgcctctatcgccgaggccgaggtcaacaaagccgattactacggcaaagtgacgcgagtcatcgagaaccgtttggagcagggcatgtcgttgggcatggattccaccgtggcctatggcaataacgtcaagcccgcgcaggtgaccaccgagatgacccaggacgagtccaacccgtacaacacgtacaagatctccggcctgccgcctacgccgatcagcaatcccggcgatagcgccattcaagcggcactgcaccccgaaagcggcaattggctgtacttctgcacggtcaatctggacaccggcgaaaccaagttcgccgcaaccgccgatgaacatgaccagaacgtggccgaactacgcaagtggcaagccgaaaaccagtagtcacctcattggctcccctcgccgaggggagctgtccgcaaagcggactgaggggagtaatacgggattaagccccaaccaccaccgccacaatcgcgcccgccaatatcaccggcacatacggcaccttgcccgcatgtgccggtgatgtgcgttgcgggtcgaatcgcgtccacaaggcaagccatgtgatgccggcaacgcccatcgccagccaccagaccaccacaggcaacaggccaaacagtccgacagacaatcccataggtatcaaggcggtcacatcgccgaatcccaatgaccgcggcaccagcaacgccaacgcgaactggatcaggcaacatagcacggtgaacaacagcgcctgcaacagcacgaacaggtcgttcgccaccactccatgcgcgaaatcggcggccaactggattaacgcgcccacggccacccatgcgatcggcacccgccgatgacgaacatcctcaatggacagtgcaagcccacatagcagaccgggtagcgtgaacaggtatggcatggcttaacattaacccctagttagacgtacacatagacgtacacacatgaaacgagggaagttatgctgcgttggcagacggcaggggagtctcacggagaagcattggtggccatgattgaagggttaccggccggcgtgcgcattagcacggacgatatcgtttccgcactggcacgccgtcgacttggatatggccgtggtgcccgcatgaagttcgagcaagacaaggtccgtctgctgaccggtgtacgccacggcctgaccctcggctcgccggtggccatcgaaatcgccaacaccgaatggccgaagtggaccgaggtcatgagcgccgatgcactcgaccatgacctgccgcgcgaaggccgcaatgcgccgctgagccgcccgcgcccgggccacgccgatctgaccggcatgcgcaagtatggttttgacgacgcccgcccggtactggagcgctccagcgcccgtgagaccgcctcccgtgtggccttgggcgaggtggccaagcagttcctggatcaggcgttcggcattcgcaccgtagcccacgtggtggcgctcggtggcgtgcagaccaaccctgatttgccgttgcccacacctgacgatctggaagcgttggatgcctctcccgtgcgtacgttggataaagaggccgaggcccgcatcatcgaacgcatcaacgaggccaagaaggccgccgacacgttgggcggcgtgattgaagtgctggcttacggcgtgcctgccggcatcggcacctacgtggaatccgaccgtcgtctggacgcggctctggcctccgcgattatgggcattcaggcgttcaagggtgtggagatcggcgacggcttcctggaagcctcccgccccggttcgcaggcgcacgatgagatcgtggtcaacgccgacggccgcatcgaccgtctgtccaaccgcgcaggcggcattgaaggcggtatgtccaatggccaggtgattcgcgtacgcggtgccatgaagccgattccgtccatccccaaggccctgcgtacggtcgacgtgctgaccggcgaatccgcacaagccatcaaccagcgttccgacagcaccgccgtgcctgcggcatccgtggtggccgaggccatggtgcgtctgactttggcgaagtacgcgctggataagttcggtggagacagtgttgccgaaacacggcgcaaccttgagtcgtatctcgcctcgtggccggagcacatgcgctgaacgaagtggagtatggttccgagacgactgccgcggaaccatcagcaactgtacccaccaatcgtcgagaggattcgtagattatgaccgcacgcccccgcgccgtcatcatcggcatgatgggagccggcaaaacacgtgtcggtaaggaagtggcgcatatgttgcgtctgccgttcgccgatgccgatgtggagatcgaacgtgaagtgggcatgaagattcccgcctacttcgatgaatacggtgagccggcattccgcgaggtcgaggccgatctcatcgccgatatgcttgaggatttcgacggtatcttttcgctgggcggtggcgctcccatgacgccatccacccagcatgccctcgcctcatacatcgaccatggcggtcgtgtggtctaccttgacgccgatccggcggaggccatggaacgcgcgaaccgcgggggaggccggcccatgctcaatggcaatgccaactcccgttggaagaaactgttcaagcagcgtgacccggtattccgcgaggtcgccaacgttcatgtccatacccgggggcttacgcctcagggcgcagcgaagaaagtgattgatatggtatctgagcgagcagtgcatgttaccggatcggcaattgagccgtatgatgtggtcattggcgaaggtgccatgaatcatctggtcgacgtgctgggacccaagcccgccaaaatcgcgcttatccatacccagccggtgcagcgacactccgatcgtgcccgcgccctgttgcgtcagggcggctatgaggtttccgacatcgtgattccggatgccgaacccggcaagaccattaccgtggccaacggcatttgggaacgccttggcaacgaaggtttcacccgatccgatgccgtggtggggcttggcggcggtgccgcaaccgatttggccggttttgtggctgccacgtggatgcgcggcgtgcgctatgtaaactgcccgacctcgctgctggccatggtcgatgcctccaccggtggcaaaaccggcatcaacaccccgcagggcaagaacctcgtcggctcgttctacacgcctgccggtgtgctggccgacaccaagacgctggctacgctgcccaatgacatcttcattgagggtctcggtgaagtcgccaaatccggtttcatccgcgaccccgaaatcctgcatatcctcgaagaccacgcagctgaactgcgcgctttcgacggctctacattcctcggctcgccgctcgaagacgtggttgccgagctcattgagcgcacggtaaaggtcaaggcctactacgtctcctccgatttgaaggagaagggtctgcgtgaattcctcaactacgggcacacgatgggccatgccatcgaaaagctcgagcacttccgctggaggcatggcaatgcggtggccgtcggtatggtgtatgccgccgagctggcccatctgatcggttacatcgatcaggatctggttgactatcaccgttcgttgctcgcttcgctgggtctgccgacgtcgtggaatggcagctcgttcgacgacgtgctcgcattgatgcatcgcgacaagaaagcccgtggcaacgaactgcgtttcgtggtcctcgacgagattggtcacgtcgtacacctcgacaacccgcccgccgaagccgtagaagaagcattccgtcgtatccagcagtaattgaacggccgtaggccgtgccgttcgccatcccctcagaaaaagtacttggctcccctctaacgaaggtgccccggagtcggatttaccttctacctccctctgatgagggaggtgccccgaaggggcggagggagagaagcacaaacaaaaggagtcccaatgaccaaagtcattgttgtcaatggccctaacctcggacgtctcggcgtccgccagcccgacgtctacggtcgtcaagacctcgacaccctgcgcaagctctgcgccgaatggggcaaggacctcggcctcgaagtcgaggtgcgtcagaccgacgacgaagccgaaatggtgcgctggatgcaccaagccgccgacgagaaaaccccggtggtcatgaaccccgccgccttcacgcactattcgtatgctctcgccgacgccgcgcacatggtcattgatgagaacctgccacttatggaagtccatatttccaacccgtccgcccgcgacgagttccgcaagcgttccgtaatcagccctgtggccaccggcaccatcaccggcatgggtttctacggctacaagctcgcgctcgatgctgtggcgcacttgctgagcgaatagaaccaagccctccagccaatcccgggtatcagtcgacgttgagcccgggattcctgttccgacgaatcggaccagaatcctcgtcctggtacgccttatggacccgaagtacgccgtgtattcgaccatatgctggccaaggcagaacgagatgggctgcctacgcacgactacaccggccacgtcatgaacacgccgggtcatacacggatgatagagtgaaattccatggttagaagaacacatggtaattctcaagaacacgtcaccaagcatattttcgtcactggcggcgttgtctcctctctcggcaagggcctgaccgcatcttcgctcggtcgtttgctgcgcagccgcggtatccatgttctgcagcaaaagctcgatccgtacatcaacgtcgacccgggcaccatgaacccgttccagcatggtgaggtctacgtgaccgaagacggtgccgaaaccgatctcgacatcggccactacgagcgtttcctcgacgtcttcctgagccagaaggccaacgtcaccaccggtcagatctatcaggaagtgctgcgcaaggagcgcgccggcgaatacctcggccagtgcgtgcaggtcatcccgcacatcaccaacgaaatcaagtctcgtatgcgcgcccaggcttccgatgacgtggatgtgatcatcaccgaaatcggtggtaccgtcggcgacatcgagtcccagcccttccttgaggccgcccgcgaagtgcgtcgcgatctcggcccggacaactgcatgttcgtgcacgtttccctggtgccgtacatttccgccgcccacgagctcaagaccaagcccacccagcactccgtgatgatgctgcgtcaactcggcatctccccggacgccctcgtgttgcgttccgaccgcccgctcaaccagtccatcaaagacaagatctccctgatgtgcgacgtcgatgccgaaggtgtggtcaactgcgtggatgcgccgagcatctacgatgtaccgaagatcctgttcgaagagggccttgatgcttacgtggtgcgtgagctcggcctgccgttccacgatgtcgattgggatgaatgggcagacctgcttgagcgcgtccaccaccccaagcacgaggtcaacatcgccatcgtcggcaagtacatcgatctgccggacgcctacctgtctgtcaccgaggccatcaaggccggcggctttgccaactgggccaaggtcaacgtcaaatgggttgctgccgaccgttgcgaaaccactgaaggcgcggccgccgctctcgacaacgtcgacggcatcgtgatccccggcggctttggcattcgcggcatcgacggcaagatcggcgccctgaagttcgcccgtgaaaccaagctgcccgcccttggcctgtgccttggtctgcagtccatggtcatcgaatactcccgccacgtgctgggcattgaagacgcgaactcttccgagttcgagcccgattgcgccaacccggtgatcgccaccatggaagagcagaaggacatcgtggccggcaagggcgacatgggccacaccatgcgtcttggctcctacccggccgagctggaggaaggctcgctggtcgccgaactgtacggcaccacgcatgtcaccgagcgccaccgccaccgttacgaagtcaacgtggcctacaaggatcgtctgcgtgaaggcggcctgcgcatctccggccagagcccggacggcgagctcaccgagttcgtggaactgccgcaggacgtgcacccgttctatgtggccacccaggctcacccggagttcaagtctcgcccgaccaagccgcacccgctgttcgccggtctggtcaaggcggcgctcggccatcaggcggcccgctgaccgtggatcccgcgcggtcggtccgcgcacgatgaaggcgtgacggcacggcatctcaggatgcttcgccgccacgccttcgccgtttggcgccatccgtgatgccgcatggcccgatggcgcccgcatgtaatcaagcccacagccaatatgcgtcaggacagctagtgtttgcacttgggttctgctaggttttcataggattaagtgtgatacaaggaaggcaggatggtgaccgaaaacacagcaccaaacgccgccgctgacgtggagatgagccagtatgtggctgatcgtacccgcgtcaacgaggacaagatcaagaaggatgacgagatcatcagccagttcggcgactacaactatggttggcatgattctgatgccgccggcgaagccgcaaaacgaggcattgatgagaacgtcgtacgcgcgatcagcgccgacaaaggcgagccgcagtggatgctcgacatgcgtctgcgtggattcaaggcgttcctcgaaaagcccatgcccgattggggcgtggatctctccggcttcaacgccgacgacttcaagtactacgtcaagccgatcgagaagcaggcgaagtcgtgggaggagctgccggacgacatccgcaacacctacgatcgccttggcatcccggaggcggagaagaaccgcctcgtctccggcgtggctgcccagtacgagtccgaggtgatctacaattccattcgtgaggacctgaagaagcagggtgtgatcttcgtcgacacggacaccgctgtgcgcgaataccctgaacttgtcaagaagtacttcggcaccgtcgtgcctccggaagacaacaagttcggcgccctcaacaccgcggcatggtccggcggctcgttcgtatacgtgccgaagggcgtgcacgtggacatcccgttgcaggcatacttccgcatcaacaccccggccatgggtcagttcgaacgtacgctgatcatcgcggacgaaggctcctacgtgcactacgtggaaggctgcaccgccccgatctggtccgaggactcgctgcacgccgccatcgtcgagatcatcgtcgagaagcacgcccgcgtgcgctacaccaccgtgcagaactggtcgaacaacgtctacaacctcgtcacccagcgtgcctacgtgcgtgagggcggcacgatggagtgggtggacggcaacatcggttccaaggccaccatgaagtacccggcctgcatcctcgccgaaccgtacgccaaggcatccaccatgtccctcggcttcgccggcaagggccagtaccaggacacgggcgcgaagatgattcacctcgccccgcacaccagctccaccatcgtcgccaagtccatctcgcgcggcggcggccgctccgcctaccgcggtctggtcaaaatcgtcaagggcgcgtacgg

SEQ ID NO: 3966 - DNA, 7106 bp, Unknown
  R22_24m  MAG No. k141_32101
catcaatcggagtcgtcatcgcttccgccacatcagaggacgccgcgcctgactcggcagtggcggcatcgtccgtagcggtgccgggggtgggtgcgtttgtcgcatcgggtatgacggtggagcctgcacctgcggaggggaatgccccggaagcatcggatctggcatgcgcctcgaacgtcacgcggccttgcgcatccacgctgaacttgcgcggcagcgcctcgtaatcggcctcaagttgctcgccgatggccgcgtaatcctcatccgtaagccacaggcagaagcgcgggccgaaatcgtggtcctgcgaatacgcatcatcgaatccgtagcattccgagccatgacccaccagaccggcggcgatacgcccggcatactgcggatacttcgccgcaatcatcggcttgcccatctgcgtccagaacgcgcgggccagcttcagtccggacaccgggcatgcggaaacggcctcggccgcgcccgcagaaccggtcgacaccgaaacggtggatggggaaaacgccgcgttcgcaccggtctcgggtaacgcctgcgccaatgcgcccggcgtatccgcgtccacggccgatgacgcggagccgacctgtgcctcgacgcccgcaccggtcttgccctgtgccgggctgtccggcagccgtgatccggactggggcagcgcgcctgcatcgccggcaacacccgcattgtcaaccgtcaccccggccttcgccgcctcttcctcggcctgccgcagattgtcggcggtgatacgccagtaatcggtgtccttgccgtaacatttctcgatcacggccagcgcatgccggtatccagtaactgcatccgcatgccgtctctcggcaaagcacacctgcgcgaagcccgccagtgcggaggcataatgcgcggaatgttccagatggccggtgcgatagatttccagtgccttggctgcatgccaatgcgcgccctccaacttgtgttcggtcagcagggtcaacgccagattcgtgtgcgagctggccacgtcgatatccgcgtccgggttcacgctcgaggcttcgataatgcgcagcgcttcacgcaactccagttccgccttgtcgggccgattcgtctcgctgtagagcatcgatagattgttgtgcagtgctgcgagcctacggtcggtgggtgccagcgaatgccggcagacactctgcgcctgatgatacaaatcctcggcctgatcgtattgttgggccgcgcgcatcgcggtagcgcaattgattagcgtggtggcccacgcctcggatgtgccggtggtcaagcccatacgagcggccagttccagcgcccgctgcacaatccactgattctccttgtgccggccctgcgagcgatagaagcccatcgtttcgttgagtacggtgagcagtccggcctcgtcgccggcgttttccgcgtccaccatcgcctgttccaagtacggaccggcttcggtggctgccgcgtggcgatcgaaaatcgcgtccagtccgttcaggaattgttgggtatcaaaggttgcgggcgattgatcggcatcgtccgtggcctggttcgcagtagaatcggcaccttgcgctgcggccgccgcatcggtgtcgtcggcatcgtctggaccatgcgcgaattgtgcggcgaattgtttgagcagtgcttcctcgtccataccgccagacctccctgaatcgtgtctgatttcagtctattaatactgtaaacaaacgcgtcagggagtttgctgtgagcttggtctcagtccaccttgatttcgcgcatgcggtgaatggcgtcggtatcggtttcgcagcgccacgagtagaaggccagcagccctacggcaagcagagccagcggcataccgcccagaccggtatagcgatagttcatcgagaaagtggtgagcatcgcgccgccgacaatcgagccgatggcattgccgaagttgaaggccacctgcacggctgcgccggcgatgagctcgccgccgccttggccggcttcggtcatcaacagctgttgcggagcggagatgaagaacagtccgaaggcgatccagaaggtcagcaaagcagtagtgccctggtttcccggcagtagcaaaaccatcagcaagccgatgcaggaaatcgtctgacccagcgcggcagtgccggcgtggcgccatttatctgtgatgcgaccgccgataagaccgcctatcaccatgccgaagccggcaagcatcatcaatagcggtaccaggttagacgaccagccaccggtcttctgcagccaaggggagacgtagctccaccagcagaacacgcctgcgttgccggtgaatacggcggccagaatcacccacggtccacgacgagtaaggaatttgaactgaccggcgatgccggcgtccttaatcggcgcaacgaaggggatccatgccagaaccagcacgatggtcattgccgcccatgcagccagaataccgaatgcgaggcgccaggataggaactcagccatcaaggtgcccgccggtacgccgagcatattggctacggtttggccggtgaccattaccgatacggcttgtgcttctttgcccttgtcggccaaggttttggcgatgagtgtggcggtgccgaaaaatgcgccgtgcggcaggccggcaatgaagcgcgcgacaatcagcgtggcggcattgaccgagaacgcggaggccagattaccgataagcgcaatcaccataaacaatatgatgaggttcttcggcggcaccttgcggccgaacaccagaatcagtgtgccgaagcacacgccgatcgcatacgcggaaatgtaatggcctgcggtggggatgcccacgccggtggcggccgcggcctgcggcagaatacccatcatcacgaactcggcggcaccgagaatgaacgcgcccgaagccagtgcaagcagactcttcttcatggttcctctaattacttcagtattacttacaaaaacagtgcggcaatcgattgattcgagcgatatattacggtggtccgccaacaaatacgggccttgccgcgacgcggtttgtcgctgtgcgcggcgggttgtttaccgctgtccgatcgcttggtctgattgttgggttaggaaacgaaaaaccggattgctgatttctcaacaatccggtccaattgtcgggctggcgggatttgaacccgcggcctcttcgtcccgaacgaagcgcgctaccaagctgcgctacagcccgtttggcaacagacgtagatattacattgtggtggtggacaatgcaaatcggcatgtcgcgagtgttgcgtgatggtggattcgccgtgtgtacaggtctctcaagccttgtgcagagccggttttgcgtcatgtgagcgggtgttcagatggccgtacggtctgccgggctcataatcgccggccttgcgtacactgatgaatcatggctgaagttgtcgaaaataccgaaaacactgagaatgaaaccccggccgtcccgcagatgagcaccgtcgaacgtgcggaaatgctgctcgagcaggacgccaccatccgcgagaagatcaagtccggtgccacgctggacgaagccgtggacccctccaacaaggagttcggcccgctggctcaccccgagcaggttcagatgcgcgtggccaagcgcgcgatgatgcttgaggccggcatcgccccctacccggtgcacttggacgtcaccgacaccatcgaggcggtccgcgccaagtatgacggcaagctcgaggctggcgaagagaccgaagacatggtcggcattgctggccgcgtgctgttcctgcgcaacgcgggcggcctgtgcttcgtgcagctgtccgccggtgacggtaccaagattcagggcatgatctccaagaaggagattggcgccgactcgctcaagcagttcaagcagctcgtcgaccttggcgatcacctgtacctcaagggccgcgtcatcgcctccaagaccggcgagctgtccgtattcgccactgagtgggctatcgcctccaaggccctgcagccgctgccggccctgcacaaggacctgaacgaagacacccgcacccgcaagccgtacatcggcatgatcgcggacgagaacatccgcaacatggtgcgcaaccgctccaaggccgtggcctccctgcgccgcacctttgacgaccacgacttcctcgaggtcgaaaccccgatgctgcagaccctgcacggtggcgcggccgcccgcccgttcaccacgcacatgaacgccttcgaccttgacctgtaccttcgcatcgccccggaactgttcctcaagcgctgcctggtcggcggcatcgatcgcgtgttcgaaatcaaccgcgacttccgcaatgagggcgtcgacgccacgcacgcccccgaattcaccatggtcgaggcctaccaggcctatggcacctatgattccatcggccagctggtcaaggagctcgtgcagaagaccgccatggacgtctacggctcgcacaaggtcaccctgctcgacggcaccgaatacgacttcggcggcgaatggaagaccatcagcatgtacgattcgctgtccgaggcattgggcgaggaaatcgtgccgaacggcggccctgagcatcccggcacctccgttgagcatttgggcgccatcgccgacaagctcggcgtggagcgtgacgacgtggagaaccacggcaagctcgtcgaacacctgtgggagcacttctacgaggacaagctttacgagcccaccttcgtgcgtgacttcccggtcgaaacctccccgctggtcaagggccaccgcaccaagcccggcgtggtggagaagtgggatctctacgtgcgcggcttcgagctggctaccggctactccgagctcaacgacccgatcgtgcagcgtgagcgtttcgtggcccaggccaaggacgcactcgccggcgacgaagaggcctgcgacatcgatgaggacttcctcgaggctctcggcgtgggcatgcctccggccggcggtatgggtatgggcattgatcgactgcttatcgccttgaccggtgccacgattcgcgagaccatcaccttcccgctggtcaagccgctcgttggctgattaggcatactctggctcccctcagagaggggagccagagttatatatgaaagggattgcttatgtctatcggcttgtgggttcggggcgcgcgtcccaagaccttggccacttccatcgcgtcggtgatggttggggcggtgatggcgtacgtgcatatcgagcggtcgggcacctgcatcgcaatatatccagaaccggcctcctgcgccacggcccgtgaacagcagaccctgctgatggaccgattctggccggtgaccatcctgtgcctgctagtcgcgctgttcctgcaaatcgccgtcaactatgcgaacgactattccgacggcatccgcggcactgacgccgggcgtgacacggacgaatcgaaatcaggcaaaccccagcgactgaccgcatccggactggtaccagccaagcatgtactgttcgcggcgatgatttgcgccgccatcgcctgcatatgcggtgttgtggcggtcgtgctcgcccaagcatggtggttgctggccgtgggcgcggcctccttgctggccggctggttctacaccggtggcaagcatccgtatggatatgtcgggctgggagaagtcggcgtgttcctgttcttcggcttggctgcggtattgggcaccgaatacgcgctgtgcggcacggtggacgtcggcggactattgggtgctgtggcggctggcctgttctcctgcctgatcatgatggtgaacaatatccgtgacatcgacgaggatcgtgagcatggcaaacacacgctggccgtacggctgggggagtccggcgcgcgtacgttgctgattgtgtgctgcgtcatcgcatggattatcgccctgctgatgtgcggtacattatggtggccgtggggtgcggtgctgttgctctcgggcaccggaatacctgtgcgcatggtctccagcgtgaataaacgtcaattccgcccggctctgcccgccgccagcttccagaccttgctgtttgcggtggtgctggcggttgccgtggcgctatgagagcgaaataataagacgaatactcgtgtttgggcgcacgcggctgtagactgaaccgtatgacttataaactagtactgctccgtcatggacagagcgcatggaataaaaccaaccagttcaccggctgggtcgacgtaccgctgaccgagcagggtgaagccgaagccaagcgtggcggcgagctgctcaaggagaagaacgtccttccggacatcgtgttcacctccctgctgcgtcgcgccatcaacaccgccaacatcgctctggatgccgcagatcgtctgtggattccggttcagcgtgactggcgtctcaacgagcgtcactacggcgctctgcagggcaagaacaagaccgagatccgcgaagagtacggcgacgagaagttcatgctgtggcgccgttcttacgccaccccgccgcccgagatcgacccgaacgaccagtacgcccagaacaacgacccgcgctacgccggcgatccggttccggaagccgagtgcctggccaacgttgttgagcgtgtgaagccgtacttcgagtccgccatcgagccggagctcaaggccggcaaaaccgtgctgattgccgctcacggcaactccctccgcgccatcgtcaagatgctggacaatctgtctgaggaagagatcgccaaggtcaacatcccgaccgccatcccgctgctttatgagctggacgagaacttcaagccgatcaagccgcgtggcgagtacctggacccggaggctgctgctgccggtgccgccgctgtcgccgctcaaggccagaagtgagcctaagccgctaacacggtacaagctgtaaggggagtcgcacataatgtgtggctcccctttgctatgcctgccaaatccccatggggcggtgattaccccatggggcggtaa

SEQ ID NO: 3967 - DNA, 2787 bp, Unknown
  R22_24m  MAG No. k141_32756
ggcatactgaaaccgcatttcgggcatttcgccgtctccgcgtccgcatagcaggaaagctgacccaagcacttgtcggccgggcatggcccgtacaatacggtttccccgtcatcgtccgtgaggaaacgacgcagcttgcgtgtcagactgtgaaccagttccgcatacacaggggtgctcgaatgctccacgagtttcggatgatcggcgatacggcgaaccatgtccgacagtggcgtggactcgggcagattgatcttcagactgcgcacccactcgtacaacgtgccttgcaaccccggataaccgtggtcatcgtccgcgtacagcagatcatgcagggcttcgcgcaacggtgcgggagcggtgccggattgaccgccgccaccgttcttgtgcccgtaggcgcggttgaggcgatactcgcacaggtcgggcagactgcggtccaaccatcgcaggtcgccggtcaactggctggcgtgcttgtcgcacaggagattcagattcggttcgacgccatgtccgataagcggcgacggcgcgtcggtgacgatatcccgccagcaaccgtggtagcggcagagcctcgtagtttcagtggaaaaagacaatagtgaccttgaccttcggtttttttgaaggtctcggacgtgtcagcaactcccaattatgccatcaaaccggtcatgattcagccggacggcgtgtcgccagaacctcgtccaacgccacgcccaaacccggattgaaaccaccaccctcacgccggcgcttgggtttcgcgggcggcaagcgcagcgggtcacgcgcggccaacgccacctgtcgagactcgtccggggaacggcccatcatgcgctgccggcgatacaaccacgcctgatcttccactagtcccagacgttcgcactcccggcctatctgcgcttcggacggtttcgcaccgttgcgcagcttgcggacgatgccgttgatgtcgccggaaccacaccagcgacccgtgctgttgtccgcgtagaagcgtcgaacggcctcacgcgcctctaccgccgtgatatccgaacgcagttccgaataaaaagcgtcaagctgaacatcatcccactgagcgttgccgtgatgcgcgttaatcagcgacaacaacgccgccgcctcacccttgctgagcattgagacctccctgcgagtatcgggcacgctcctcctcggtcatgtactgccaagttttcgccatgttcgcttcgagattctgctggctgcgggacttgaccggctggacttgccgggcccttggggtctccggtttgggtttctcccagttgcgtgcgtacagttccccgccgatgaaccggctgaacgtcttcacgaaccgttcctcggtggccccgacatacgctcgggttttggcttcaagaaactcacgcgggtcagcctcgccagcggctttcacgatcttgggccattcgatttccaactgcattcgagcctgagatgtcttcccgtcgaacctgttcgtcgggtaaagacgctcaagactgtcgagcagcccagcgaagtcaggctttgagggggtagggggagttgaattatctttagataattcattctggtgttctggtgttctggtgttctggtgtttgtcccgattcagacgtgattcagccgtctgaaagtcatctgaatcggaggtttttacctcgtttttatttttacggtaattttcagcattgctttcacgcttcttttgtacctgttcgcgactgcgattgtgtataagataatcgtgaatatagtacccgttgttcccgtccggttcgatcatgccgacattgcacagtgcctcaagttctgaatcggtgatatccagcacgtaaagcgcatcatcttcactgatatgaccgtctgaaagattatctccgcagaaggtaagcatcatcgtgaacgcacctatcgcgctcgggcatgtgtgcctgagttttcgcaccttgcgattcatgtagaagccgttgacaagctggatgtatccttttcgggccatcgttataccactttcctgaaatctaaactcaccagactcattccgtctcctcaatcatggtttcgagggcagcgaccgcgttctcactgcggttctcggctactgccttccagaatttcgtatgatccaggtcatttcctgtccctttcccaaatattctcaaccattccgcaccacttgtcccatgcttcctctctcgtatcggcataaggggcttccaagtgggtgcagaaaaacatgtagcggcctctccattcgaatatgagcgggacacatccgtagagggggcagcagtgccgaatcttcgatgctagattgaacatgttcgtctccttaaatctcgtatgaagttgtggcggcttcgccagtccgagggcgtgccgctcgtcgccgtgagcagcacgccgttgtcgtagatcttccagtggccgctgcctgcgcgtaccaccgtgtagccgtgcgaggctatccagtgcatgagtttgcggtcatctccacgcgcggtcatgctttgagcctcatcttcaacgcgagaccattctcatgcacgccaccgttgtcgaagcccatgaaaccgttgaacagttcgtattcgagcagggcggtgtccacgcggaactcgtcgtactgatggtttttgatgcgttccatgacaagcctcatcgatgcgacggtatccctgcggtcggcctgtatgggaatgagatacggccaaagattccattcgcccggatgatcgttca

SEQ ID NO: 3968 - DNA, 6190 bp, Unknown
  R22_24m  MAG No. k141_32782
gaaccacaacaagtactcgggtgatgaaggcggtgtggacctgtacatcggcggcgtcgaacacgctgtgctccacctgctctactcccgtttctggcacaaggtgctcttcgacctcggctacgtggcttcggccgagccgttccacaagctgttcaaccagggcatgatccaggcctacgcctataccgacgaccgcggccagtacgtgccggccgacgaggtcgtggaaggcccggccgacgcctccggcgagccgacgttcacctggaacggcgaacatgccaatcgcgagttcggcaagatgggcaagtccctcaagaacatcgtgaccccggactacatgtacgaaaactatggcgccgacaccttccgcctgtatgagatgagcatggggccgctggacgaatcccgcccgtggaacacccgcaacgtggtcggcggcatgcgcttcctgcagcgcctgtggcgcaacgtggtggacgagaccaccggccaggcccacgtgaccgaggacgcgcccgatgagaagacactgaaactgctcaacaacacgatcgccgaagtgaccgcggagatggagggcatgcgtccgaacaccgccatcgccaagctcatcgtgctcaacaaccatctgaccggtctgaaggccgtgccgcgtgccgccgtggagccgctgatcctgatgctcgcgccgatcgccccgcacatctgcgaggagatgtggagcaagctgggccaccccgagtccctgtccgccgagccgtggccggtggccgacgagcgttacgtgggccacgacaccgtgaccgccgtggtgcagatcaagggtaaggtgcgcgccaagctcgaagtgccggtcgacatcgacccggccgacctcgaacggcaggcgctggccgccgtcgccgaccgtcttggcggcaaggagccgcgcaaggtgatcgtcaaggcccccaagatcgtctccatcgtccccgcggagtgacttgttgcgggttaggctcccctctttgaggggagccgctcgcgtagcgagactgaggggagcgtcaaccgccccacctcaattgtggataacttcataagctagaaccacatatcccgtttcagctggacaaacgcccatgaatccatcagcgtggatgcatgggcgtttctcataaccatcgcgcaggccatgccgccaaccgtttgcgcgcattcagcaggcagagcgaagccatgccccaaccgcgagcggaacggcccacgacgcctccgccgcctcccggccatgcacggattcgtccggccggccacccgccccaaagggagcagagcggcctgcggcaggcgacccgtgacaaacgtgcgttatcggatctgattggtgtacgttccgccgatgccgtcggcgaatcagccagactcacccgggatcagccgcgattgtcgttcaccattgggcatgccttggccgtgatattgctgctgatcgtcgcccttggcatcagcttggcattgctggtccagcagtcgatgaatatggccatgctgtctcaaccgaccgccatgcagaccacgggcggctccgctggagatcagacgatgccatcgcagaacaccacggacgagaaacgcacggatccgcagcagtcggagcattccgatgccacagcgaaccccgaatcggataccacgcaatctccgcacatgcagacggacggcagcgatgccggcgcttccacgcatggtctcatcaacctcaacacggccaccgttgaggaattgcaatccatcaaaggtattgggccggttaccgctcaacggatcatcgatcatcgcacggcgattggcgggtatgcatcagtcgatcagctgctggatgtcaaaggcatcggctccaagacgttggcgaccatgcgagggcaggtgacggtcggatgagcagggatcggatactgcgcgagcaggggagccgcgattggaggatgctgccgatcgccatagtgatgtgggcggcgagtctgggagcgcacgcattattcgcatggaggatgtctgatggactcggcaccggtcaggcaaaggccgatgccggagctggcattgacgccaccataatcggcatggaatggcctgtcacacgaatattgcctataaccgtggcgtcatgtgctgccgtggcggcgatgatcgtggtgtctttccgcctgcggatcaggtggacgggaacattgaccgtatgcgttgcggtggcgtgcatcggcagtatggcggcaatcgcgtcggacaccattgcctggcatgatcctgcctccgcacaagctcgccaatccagttcataccacgaagtcatggccacggtgacgacgcccgtgatcgcttcggaccaacgcacatacgattgtcagacggacatacggctgagcggcatcactgtggatggcgcggacgtacgttccacggtcgccgtgcgcgtatacgccgatgaatcgtattgtgggcagttgcgtcgaggcgcggtctatctgttgacgggcgtattgcagcaagcgcgatatggacgcataccgctatggctgctcttggaaggaaaacagccggtagcgcaggtgcgggctccgccgtggcatctcgccgcgattgcgcaggtgcaggaggcgtttttcaccgtgaccggacaattgtccgatcaggggcgtgtgttggtgccgggattgacgatgggtgtgcttggccaggattatatcggcggcgatgccggtccgatgccggtcaacagcacgtatgcgcaaacgttggaaaatcagttccgccggtccggcatcatgcacctcatggccgtatccggcggccacttcgtactggtggcaggactggtgcgtcggttatgcatgtggatgctgcttgatcggcggctgacggcgttgctggtctctggagtatatgcgctgctggcattggcgatgttccccagtgattcggtcacccgcgcgttcatcatgggattgataggtgcgttggcgtatgcgatgggacggcgtacgcaagcgttgagcgccctgtgctggacgataatcggtgtattggcggtgaacccggatatgtcggccagctacggattcgccttgtcttcggccgccgtactgggtatcgtgctgtttgcggggcggctggccggtgtctttgagcgagcgatgccgcacagcatcgccgaaatgatggcgatgaccgtggccgcgcaattgttcaccctgccgattcaggtgttgatggaaccggaattgccgttgctgtccgtgccggcgaacctgctggtgtcaccgttcgtgggattggccacgatggcgggattgatggcactgacgtgcgcatggtgcacgccatggctggccggcgtattcgcgtggatatcgtcatggggcacgctggtgatggaacgggtggcgttgtggctgggcggcagcacgatggccgtcatcccatggaaagacggcgttacgggcgccgtgctgattgtgacggcggaaatcggtatcggcatgctactggtgttcgtcagccgttgcctccagcatgtccgtcgttatgaggccggaatgtctggcgtgcgcttcggttccgcttggcgcgtccgcctcagtctctggtgtgaggagacgagacgcctctttacgcggcggcaagccgaatagccaatgcggtattcggtgcagcaaccatcgcaatcccagccgaataccactatctcgacggcaccggcaaaatcgtgatgccggcaggtcattgtccaacctgtgtggcgagatggtggcatggcgaaaacagcagcgaatgcaccggtaaccgtggtgcccggaggcgactcgtatttgaacgacgcacgcaccaaggcactgtgcgcgcaggcgttgaaggcgcggcccgacgccgacctcatcgaactcgacgccacatcggccgaccagtatgccttcgatgaagccgtcagcccatcgttgctttccgacgttgccgtggtcaaactcgtcaacctgcagaatgccgacgacaagctcgccgaagctctggtggcgtacaccaagcaggccgccaaggatccgaacggctccagcgtggtgatctgccagcacgagggcggcgtcaaagggcgcaaaatcatcgaccaactggtgaaagccggcgctcgcaaagaggacgtgccggatttgaagaaaccggatgcacagctcaatttcgtgctcggagaattcgagaaacgtggtcgtagagtcgaaccgatggccgcacagcagctggtatccgtgctcggcggcaaaaccggcgaactcgccgccatgtgcgagcaactgtgtttcgactttgacgataatccgatgggcctcgaccgtgtcaaccagtatttgaccgccaatccgcaggtcaccggttttgccgtggcagacaaggccgtggaaggcaaaaccgcagaagccatcgtcatgatgcgtgcagctgtggaacaagggaccgatcccatcgcgctgatcggcgcgttggccatgaagctccgtaccattgccaaagcctcggcggtacgggccggcacgatttcccaggccgaagcgaaaaccaatccgtgggtgctgaagaatgcgatgcgccaacttggcggctggacttcggcaggactcgcgcattgcatccgtatgctcgcctgggcggatgagcaaagcaaaacaaacggtggcgacccggtatatgcgctggaacgctgcattgaagacatcagtcataaaggtcggtaaaagtcgataaaggggtatttatgagcgaacacactattgcggctcccaccagcgaggccatgcaggagctcggccgtcgtgtggccggaatggtacacggcggcgatgtattgctgctctcaggccctcttggtgccggtaaaaccacattcgctcagggcttcggggcggggctgggcattaccgaacccatcgtgtctcctacattcaccattgcccgcgaactcgacgggcatttcgccgacggcactccgtctcatctggtgcatgtggatgcctaccgtctgggcggctcagcctatgcgccggggcaggacgccatcgggcgtttgttggacgagctggaatcgctgggattggacgaagaacttgaagaccccggcgagaacacggtggtgcttatggagtggggcgaacaaatggccaccgccttggcgccagaacgacttgaaatccatatcgatcgacctctcgattcctccgatgccgcatccgctggatcagacggcgaactcaccagcaacggcactcgtaccgtcgcattcgtcccagtcggcaagcgatgggccgcgttcgatctgcagtaagccatgcgcctatagactcctcgatgtacactctctagaggctttacgactaggaggattcatgggttgcacgttggtgattgacacctcattcggctcgacggtcggcattgtggggcgcgatcccattgtagagaccgattcgcgcacccatgtggagaaactgcaggtcaatatcgcgcgcgcggtcgaggaggccgggttcccagcatctgacattgcaacagtcattgtgggtaccggtccagccccctttactggtctgcgtgccggtatcgttacggccaaggcactggctttcgcaacgggagcgacgcttatcggccataatgttcttgagtctcaggtgcaatggaatctcattcgccgtggcaaagccggcactctcggcgatactcataaatgccatgtgctcactcttgccgtaaacgacgcacgccgcaagcaactctattttgcgttgtactcggacccgctcgttggcgatcccgatggcgaaaccgtggcgacggctctgattgacatggatatcgattaccctgcatccatcgcgcagcgcgtgaatgatgccgttcatacgtaccgcgacggacttatgccagaagacagcaatgtggatgtggtcgtggatgttgtgggtcatggggcccgcaaatatgcggatgcgctgggtgcaatcgagcagcttggcgacatcaccgatgaatccgtattggaccaaggggagcaaggtctcgctatctttgccactgatgcggaactggttgccaaccgtaatcccgatacgccggtcgaaccgttgtacctgcgccggccggacgccgaagtgcc

SEQ ID NO: 3969 - DNA, 6189 bp, Unknown
  R22_24m  MAG No. k141_33668
ccgcacctggcagtacatgttctcgaaaatccgccccgaattccccgaggcggcgttcgtcgccgaatgtgggccgaccgaacgaatcgatgcaggccggattcgacatggacttctacctcgactggcgctgggacggccccccaacgctctccccgcagtcgttcgtcgtgctcggataacccgctaattgcccaactcaccgaatgtattgcaatcgttgtcaatatgagttacggtaaagatagaacagctcggacattggtctgtcagattgccggaacctcaacgcagagcggccctcgaacagcaatgcaaacgactagcagtacccgatttgcaagcaaggagtcatcatgactgacgcgcacggcaacgacgcagcgaccagcaccggcaccatcgcagacaccaccaacgacgccgcttccggtgccccgcagcgcgcggaaagcgcggaacgactcgcccgtccgctggtcaagctggccaaagcatgcgggctttccacctcgttcatcgaccagctcggcacctacaccgaaatcagcgacgaggccttggtcgccgtgctcaaggccctcgatgtggacgcctccagcgacgaggccataaaacgttccatgaccgaacttgaggccgaaaacagcaaacgtttgctaccacccaccatcgtggccaccaccggcaagccgacaagcctgaccctgaattgcccgtcggacgcggacatcaccgtctccatcggactggaggacggcaccgcgtttggccactttgccctgctgccgaacctcaattccggcaagccggacttgaccatcgcccccgatttgccgatgggctaccacacactgaccgtcacggtggacgggcgcgagggcaaggcggccatcatcgccgcccccgcgcgcattcccgtgccggaggcggtcgccgagcaccagcggtggggctggatgacgcagatgtattccgtgcggtcccgcgaatcgtggggcatcggcgattacggcgacctgaagccgctgctggcggacgcggccgacaagtccaaggccgacttcatgctcatcaacccgattcacgccggcgcgccgattccgccgcttgagccatcgccgtatctaccggaatcgcgccgattcctcaacgtgacgtacatccgcccgcaggacatccccgaatacggcacgctgccggccgatatccgaacgcaggtggatgcgctgcatgattcagtggccgcacgcaacgacgaatcgaacccgatggacatcaacgcggcgtgggcagccaaacgcccggcgctgcgcctgatcttcgacgcgggccgcaacaacaagcgcgagctcgaattcgagcatttcaagaccaccgccggcccagacctcgattccttcgccacctggtgcctgtgcttcgaggtatggggcgcgccgtggggcgagaaccgttggttcttcgagaagaccatcgacgacccggccgtgcgccagctcgtcgaggagcaccacgacctgttcgagttcaaccgctggctgcagtggattgccgccgagcaggtgaacgccgcgcagcaggaggcgctggaccacggcatgacactgggtctgatgcaagacatggccgtgggcgtgcacgggctcggcgcggatgcttgggccaatccggaacgcttcgcctccggcggcgtcacggtcggttgcccgccggacttctataaccagcagggccaggattggggccagccgccgttcagcccacgctatctggaggccaccggctaccaggtgtaccgcgagatggtgcattcgatgtacgagcacgcgggcgcggtgcgcatcgaccatgtgctgggcctgttccgcctgtggtggattccgcaggggctcggcgccctcaacggcgcatacgtaacgtacaaccacgaagcgatgctgggagtactggccatcgaagccacgcgcgccggaggcatggtggttggcgaggatctgggcaccgtgccggattacgtgcgccgcattctggcagatcacggcgtactcggcactgacgtggaatggttcagccgcgtggacgattcgccgaacaccggcgacccgtaccgcgcacccgaggactaccgcaagcaggcattggcctcggtgaccacacacgatctgccacccaccgccggctacctgaacttcgaacacgtcaagctgcgcgaggagctgcatctcctgagcgagccggtggaggcgttcgccgcctcggcgatggccgaacgcacggccatgatgaaccgtctggtggagaacggctatatctcgcagaccgtggcggatgatgtggaaggccatgtgcaggagatcgtggaggcgatgcacgccatgctcaccgatacgccgtcgctgctgctgcaggcagcgttggtggacggcgtgggcgaatgccgttcccagaatcagccgggcacttccagcgagtattcgaactggcgcgtgccgctggcggacagctcaggccacgcggtgcataccgacgaggtcttcgacctgccacgcgtgcagtccctagccgccgtgatgcgccgagagaagcggtgatcgattccgcaatgggaaattggtctaaatcggcttcgaggggctgatttggcctttcccggacatccacttccgcttcaaggggccggcgcccaagtagacccagcgcgagaacggcggaatgacgttggcacaaagtcgtttgcacttgtggtttcaccggcaaggagccccttgaaacggaagtagatgtccggaatgccctaaatcagcccctcgtaatcgagatagccgaagacggcgacttgttatgggcatgttatcgttgtcatgacaatgattgttcgcgacggcgaaggagcgacggcatatgaccaaggcaagcattcaggcagtggcccgcgaggccggcgtttccgtatccacggtgtcccggaccttcgccaagccggatctggtgcttcccgagactcgagaccgagtgatggccgcggccgaaaagctcgactactcagtctcacgctcggccgccgccctaaaatccggccaatcgttccgtatcgcactacttgccagcgagaccatcgccagttggttcaattcgaacatcttcgccggtcttgactcggcgctgcgcccctccggctacgacactgtgccctaccccatgcgcaacgccgccgagcgccacgacttctttgcggatttgcccgtgcggcgcaatgcggatgcggtgattgtcagctccttcgacatcgaaccggctgaagtggagcgactgaagcatatgcacgtgccgattgtcggcatcaacatcccctccaccgatgggttcgacgcaggcgtgagcattgatgattacgccgccacacgttcggctatcgagcacctgattgcactcggccaccggcatatcgcgttcgtcggcagcgcaccgaccgaaaccaatatgcgctacagtgccgaggctcgtttgcagggcgtcattgatgccgctgccgcccatccggggatcgagctaacgcccctgagcattcaacgcggtcttggcgaaagcaacgcggcattgaacgccgtactgaacgcctcccccagcatcaccgccttctgttttgaggatgatgaaatggccgcgcccgtgctgtatcgcctgcgtcaatacgggcggcgggtacctcaggacatttccatcatcggcttcgacgattccaccctgtccgccgccgtgggactgaccacgctgcatcaggacccgttcgcaatgggcgcgactgccgggcacatggtattggatgccattgccggcaagtcaatcgaaccggcattcgtacggccggacactccgctaatactgcgcgaaaccaccgcgccgcctgccgcgacagcagcgcccgcgcaggcgtgagcacgttaccaccgcaaaacgccgataaatcgatttttgcatgcataattcacatgatatcgttgtcatcatcaatacaacggtcgggccttcacacagcagttcgggcgcgaccggaacaacccaaccacaacgcacccggaacaggagggaatcggcatgaccgcaaataacctcaatgacgactggtggaagcaggccgtcgtttaccagatttacccgcgcagcttcaaggacgttaacggcgacggcatcggcgacatcgccggcgtcaccgagaagatggactacctgaagagcctcggcgtggacgccatctggctttccccgttctacccctccgatctggcggacggcggctacgacgtaatcgactaccgcaacgtcgacccgcgcctaggcaccatggaagacttcgacgcgatggccaaggccgcgcacgaggccggcatcaaggtgatcgtggacatcgtgcccaaccacaccgctgacaagcacgtgttcttccaggaggccctcgccgccgagcctggctccccggcgcgcgaccgctacatcttccgcgacggccgcggcgagcatggcgaactgcccccgaacgactggcaatccttcttcggcggcccggcctgggcgcgcgtggccgacggccagtggtatctgcacctgttcgataaggcgcagccggacgtcaactggaagaatccggacatccacgaggagttcaagaagaccctgcgtttctggtccgaccacggcaccgacggcttccgcatcgacgtggcgcacggtctggccaaggacctcgaatccaagccgttggaagagctcggccgcgaatacagcgtggtcggcgtgctgaatcatggcttcagccacccgctgttcgaccgtcgcgaggtgcacgatatctaccgcgaatggcgcaaggtgttcaacgagtacaacccgccgcgctttgccgcggccgaggcgtgggtggtgcccgagcaccagcacctgtacgcttcgatggacgagctgggccagtccttcaacttcgacttcgcgcaagccaactggtatgccgacgagttccgcgaggccatcgccgccggactcaaggcggcggccgaaaccggcggttccaccaccacgtgggtcatgaacaatcacgatgtgccgcgcagcccctcccgttacggcctgccgcagatcaagggcgcgccctaccaccagctgccgcacgactggctgctgcgcaacggcactacctatcccgaggatcgcgagcttggcacccgccgcgcccgcgccgccgctttgatggagctcggcctgcccggcgccgcctatatctatcagggcgaggagctgggcctgtttgaggtggccgatattccgtgggatcacttggaggatccgaccgctttccacactgctcaggccacgatggacaagggccgcgacggctgccgcgtgccactgccgtggaccgccgccgatgagccggccttggccgacttcagccgtccgactccggccgatgacggtaccggcgagaaccatgtgccgctgtgcgccgccggccagttcggcacgggcgcttccttcggcttctcgccggctacgcgcgctgagggcgtgacgccggccgccgacccgcacctgccgcaaccgctgtggttcaaggattacgcggtggacgtggagcaagccgacccggactcgatgctcgcgctgtatcgcgccgcactggcgattcgccaggagtcgctgaccgccacgcgcgacaccacggccgagcaggtggacatgggcgacgatgtggtggcgtacacccgcgcggcggttggcgggcgggtgttcacctcgatcaccaatttcggcgacgctccggtcgcgctgcccgatggctccgtggtgctggcgtccggcccgctgacccccgaaggccagctccccaccgacacgtctgtgtgggttattaagtaactttgtggttcaccacgatgtcagcgtaattttgcattccgtggaatagaaccgttttgcgtcaccgcgtggtgggcagttcgctacgtcgtggggatttcacctcgcgatggaggtttgactacgtggtggggaccatgcgaaaggccgccgctccgaatgaatcggagcggcggccttttggtacgtgctgggtactctcctcaggcgcttatgcgccagcgggagctacaggggctcactgaacctgggcgcgggcgatcttgccggtgaagg

SEQ ID NO: 3970 - DNA, 8252 bp, Unknown
  R22_24m  MAG No. k141_33926
cccggccgccgtccccgacccgatggacaccacgtccgggcttgggcgattggtacaggagctcgatgccgccgtatcggccgaggagcggaagatcgctgagaccgctgccgccgctgcggtcgctgagcagggcgataaaggcgataagggcaaggccaagaacggcaaacccgccgccaagcctcagcgctcctccaaacagaagcgataacataccagtttgcagcggcgctgatgcgttctataaagaatgcctataacagttgccgcacgtcgccacacggtttcggtaagttgaaataccatgtgcagattactgggatacgcgacggcaggcttcaacctgagtctcaacgccgtgttggggcaagacaatgtcgaggatttccgtgaactgtctgaaatccacaatgatggctggggtgtagcccagctttccgatcccgccgaagcgccgcacgtgcgcgacggtggcgcacccaccccggaaaccggcacccgaatctacaagtcgaccatcgcggcccgtcatgacagcacgtttgagacgctggccgacgaaccgtctcgcggtgccatctggcacctgcgcttggcaagctccaatctgccgctcatcatggagaaccagcacccgttctatgcgaacggcctgagcttcatccacaatggcgatatctcggacgccaatggccgcaacatcgtcaccaaccgctcatacccggtgaaccacagcgtgctcctctccaccggcggccgttccgactccgctatcttcttcgcggtgattctggaatacatcggtttcggcttcccgctcgacgaggccgtggcccaggccgtgcgcgaactgcgccaagcctacccgaagtccagctacaactgcatgattcagtccgaggaccagctcatcgccctgtgcgccgccggtcgtgagaagaccagcccgcgcatcgtggaaatctacgatgagtacggccgtggcgagcaggccgccgactaccgtgtgatgcgctaccgtgagctgcgcgacgacaacggcgactccgccggtgtggtggtctcctcttccggctatgagcaggaaggctggaacgtgctggagaacgaccagatgatcatcgcctccaaccgcaacggcacctaccgtctccgttccatctgaaatagcttcataagctccctctgacgaggggggctgtcagccgacagactgactgggggggggggaggcccctagagcctcaaatcatccgcatcccatacttctccgccaacgccggaatatccggcacgccatacttggccaccagatccagccatcgttgtttgttctctccgccaaatcgctcggctcgggccgtatacgtctcgacctgcaggaacttcggcggcactgacttgctatggaacttgtcggcgtacatcaccacttcctgctcgagattcatcggcacatagtcggctggtgacaatggcagctcctggcgcaccacatcctcgcgcgtaagtcccacgccggtatggttgcggcagaactgggcgatggactcgtccacgccctcgtcgagcagatactcgtagcccttaagaccgtgcagaatgtagcgtttcttgctgaatttgagcggttcgtcgtcagagccgtcatgcttgaacacgcggtaggtgccgatgtcatgcagcagtccgccgatgagtactaaatgctcgtcgagcagacgcggcggcacatggccgccggtgacgcctgcggtgggcggtacctccgcgtccttcggtaatgtgcagcggcgcgtgaacagcgcgttctgccggcgcacgatctggcagccgatggtcgctacaatcacgcaatgcgtatgcaccagctcgtacgccgccttggacggcgcgattttgcggtgcaactcgtcgatctgctccagtgtgggaatatatccggtcatgattatcaggtttcgcctcgtacggtcagatttatcctcagattagcgcggcaatgagccgcatcaggattgtcaggagctgattcggacatctcgacatgcctatctccgtttcaaggggctgattcggcatcctcctgaggtctacttccgtttcaaggggctggtgcccaagtatacgcggcgtaaaaacggcggaatgacgttggcatgaagccgtttatactcggggtttggcggatgaccagccccttgaaacggaagtagacctcccggaacacgcaaatcagcccctcgaaatcgaaaaagctcacgatgtttggtatgtatccgaacatcgtgagcttcaagagcctgtgctggtgtgtctggtgtgtattgctaccggacagatcagatcttgaagagtgtgtcggctgcttcggcgatctcgcgtgatgcggtgagcacgataacgcaatgcttcgggtcaccggtgtgcgccagcttggccagcgcggcgaacacggtcacctcgtcatccgcgttcagccctcgtgtcggctcgtcgaggatcagcacttcggcctcggtgctgattgcacgggcgatggccaccaaacgctgctgcaccaaaggcaatgtgccgacggccacgccgctggtggcctcggagaagccgaccttggccagcagttcgcgggcgatcaccggcttgggcttcaggaagttgcggttggacgcatccatggcgtacagcacgttttgttcggcgtcgagcttcggctgcacggcgtgcagctgcggtacgatgcccagacggtggccgcgcagttccacgggctcgagctcaacaatgttggcgctcttgttcatcaccgtgccagacaccggcgtggccaaaccgctcatcacgcccatcagcgcgcgacgtttggcgtcggcggtgatgcccgaatcggggtcgtcgctgatcagcagcgcgtatgcgtgtccggagtagcagaagaaattcgcgccatcgaggatgttgaccttgcccttggggccggcgaccgtcaccttgttcagggcaaaggtcgggtaggtcttgagcagaatgtcgtcggaaccgccgcccaccaacacgcgatcgatacgcgaggccagcgtcatggtgggttcggtcgctttgccctgaggctccgcatgctcggccaatgcgcctttgcgatcggttttggccagtcggagtgtttcgttgacgcgggcggcattgcgctcggtcacttcggcggatgcgttggccgaagcgatggcgtctgcttcggcctcgctggtctcgtcggtttctccggtttcggcagatgccagtgcgctgtaaataccatcgtcaacagtgctttcgtcatcaacgtcatcgaaggtcacgctgaactgcacggagtcagctggaacggattcaatggcgtcgttcgtctcagtctcagaagtcacttcgtcagccgttgcgtcagtggtcttctcgagttcctgatcgttgttcttgtcgctcatgcctgtgcctccgcatcgtcggttgtggtggtcgtcttattggcctcgccggcatcatgagcggtggcctcagcagcttcatcggtctcagcagcgccagtggtttcggccgtttcaatcgcctcagtctcgctcacggtgccccagtcgccatcggcggcgaacagcttgttcgcgctgaagaacgcaaggcgcagggcggcaagaatcgccaggatcaggattgaacccagtccataccagaccatggtccaaatcaggtccgatgtcaccgggatggcatggccggatgccagagcaggtccgatcggcttggcggcgaacgcgcctccgaccagaccaattacgtagaagggcagggtgacgatgaacacttccagcatgaactgccatcccaaacgcccgcgagtgacgccggacaccagtgccatgccgatctcgtcatcacgcttgggcgcccacacgcctgacagcacgaggatgagcaacagcacgccgcccacggcaaccaacgcaatggtgccggtcttcgcgcgcgaggatagcgtatccagcggctccagagaagcgttgtaggattccagcgaaggggaagacacctcgtatcccttggcgggcagcttggacttcttgagggtggataccaaggacttgtatgtagcgggatcaccggtgtcgaacaccacgtccagatccggcatcgcccagccggaggcggtcttgtcgttggactgtgggtcgagtccggccttggcgaaggtctgatagttggtgaagatcgcgttctcgcggttgcgggcggccgtcaccggattggcgacggcggattcggatgtgtacttgtagatgccgcgcaccttgagctcggccgtggtctgggcgtccgaggcggccgccaccttgagcgtatcgcccaccttcaggttgttggcggaggcaaacgcttcagagaccagtgcgccggtggtgttcgggttggaggacttgttgtcgtagctcaggtccttgccgtccacgatttcgaaggtaccgaggtcgctggccttggcggcatcctcggtccagaaggctcgccaaatgagctggccgccggtctcatcatcggaggccgagcccagcgatccgccgtccagggccttcaaatcaccgctcacgcgggccggcacggtttcggtaaccgtaaagttcaacgagttggtggccgaccggacgagcgtggcgtattcggtgtatgaggtccacgtcatgtaatgcttggtggaagccgagtccgtagcggagaccttcttccacgtagccgcagtcgggcgaatggccaacgtggccttctgctgatcgtacgcggtggtgtgtgcgttggtatcttcttgaatgatggccagtccggcgactgtgccgaaggtgaccgccaaggtgatgaacgcggtcagggccgtacgtcctttagaacgtgtcagggcccgccaggcgttgctgaggacgaacatgtaattacctctcccgttctcctaagccgaacagatcaatacggctttaactattgttgcgtttagtgaccgttttcttgcgcaatactgttatacccctcaatgaagtctgagaacattctgacagcgatgtggtggtcatgaggggatttgcacccggtatgggataaaccctcggtctatttcggtggcatcggtacactggcatgagatatgcgtggcgtcacgtgtgctccggcatgtctgcgattccggattcgcccggagtccggcatccggaagcgtggccttgcgccgttggataagagtatgagctgagcagattttcgggtaggataagtatgcgattcacttcagggcattcgagccataaggctgtggggcgtaggagaagccgccatgccggtaacgggaaatccaatcgctccgcatctacgaatagcgctgcaaatcagcagacgggtcccgtaaacctgaagactccccagcacgtgggtggcgacggccgttcgctggtcagccgtacaccgatatgggcgcgagcggtggttgtactgctgctgacgttgctggccagcgtcacctgtgtgggcacgctctacgcggcatccgtctcgagaatggccacggatgcgcagcgtgtgctgacatccgccgaaagtctggccaattcggcacttggctgcggcagcgataagagtctgtcggacatctcccaagagttggtcaatgccaccaatgatctcaacgaggagctgaacggcccgcagtgggacttcttccgcgaccattcgcgatttggcagcgacatcaccgctgcccgcgaaatgctggcttccgtggatacgctggtcaacggtccgttcactgatctgctgaacctgtccaaacgattgcagggcttctccctgaagaatggctcggtggacgtcagcgccctgatggatatgccggatatcgtcaagcaggcgcataaggatatctcgcagcagctcaccaagctcaacaaggtgccgactccgagcgtcgccaaggtggccaccgtgctcgaatccgaaaaggctgcgctcaagaccgtggattcgatgctcagcgaatacgatggcctcattaacttgctaccgcaactgcttggcgaggacggcaagcgcacgtatctggtgatggtgcagaacccggccgagctgcgttcggcgggcggcatggtgggcaccatcgccgcaatcacggcagataagggcacgattaccatcggtgatttcgccaccacttctggttgggacattcctgagaagccaatggatgctacggtgctgaaggagcgccaggtatttggcgacacttttgaccagtacccggccaccacgaccatcgaccccgaattccagcgtgtggcacagatgaacaaatacatgtggctgtatcagaaaggcaacgaagacgagaacgtagcgggtgtattgtcattcgatcccgtattcctccaggcattgctgggagccacaggcaaggtcaagctttcggacggccgagtgctggatggcaccaccacggtgccgttcttcgcttcagacctgtacacggattacccggacttcgagcagcagaacaacttcgtttccgaagcggctcaagcaattatgaaccatgtgcttggcaacgcgaatgcttccaccgcatccccgctgttgaaggcaatcagagataccagcgctagcggtcatttcaagctatggatggctgatccggatgagcaggaggcgctgattgccaccggacttatcgacgataaggccagtggcgagttgtctgctgacagtcaggtacctgaaaccggcatctatctttcggagctgcagcaaggcaagcaggattggtatctgaagacctccaccacggtcacaaaaacctgcggcgacgcctcggccagccagaacgccctgtattctggcgtgctggataagcgcatcacgacagccgtgcgtaacacgcagctgggtcagtttacggaagatcagctcggtgacgaatacacggtcaccttcaccatgaagaacacgctgactaaggctaaggccgaatcgttgcctgatttcgttaatggcggctcggagaatccagtgctcggtggcatgctgtaccgcgtggtgcttaccgccccgtacggtggcgaaatcaccgctgtgcaggctgatatagattcatggggtaccaacaccgcgagcctgtatgaccgtcagtacattatgttcaaccagcagtggatcgagcccggaaaagaattgacgattgcctataccgttcgggtcagcagcgatgccacacatccactgaacgtggtaaccacgccggtggtgaatgcggatggcgtcgagacgggctccaacggtaaggtgacggatgagtgcccggccgatacgaacggcgccgatggtgcgaacggcgccgatggtgcgaacggcgccgatggtgcgaacggcggcaagaacgacgcgcataagggcgcgtcctccgatccctcggccggcctggacaccttggacaagctgaagagccagatcagctgcccggtcgatctgaagtccctgacgggatccatgtgatgaccatgcccgattccgtttccggcgtcgccgtttccgacgccaccgtttccggcgtcgccggcaggccgcgcgacgtgaactacgatctgctgcgcgtggtggcgatgtgcctggtcatcggcgtccacgtgatcaacaactacatgcccgtcaagatgaccctcgccggcagcgcggaaacggtgcgatccgtgctgttcgcgttgttcatggtctgcaatccgctgttcattatggtgtcgggccggttcaacctgacattcgatgccgaccggccggtgagcacccactcagcgggccgtctgccgggctctggctctgatgcccgggcaggcggcggtgccggccaagccgatcccagcagcctcgcgccgtacgtgcgctactactacaaacgttttatctcgctgattgtgccgtatctgctgtatgcgggcggcatgggattcgtcgcctacctggtgattgatcatcgttcggttggcggcgctgtgtctggaacgttgttcgatctgttctccgggtatgacgattccgtctattggttcgtgttcatgctcgccggtttcgtgctggcgacgccgttcctggccgcgatgatgcgcgcgataggccggtcgggcgcctggctgctgatcggcctggccgccgccgtggccgccgccgagcagatctgcaatcttgccggatac

SEQ ID NO: 3971 - DNA, 8028 bp, Unknown
  R22_24m  MAG No. k141_34122
ccatgcccgccacgttcaaatcctcgatgacgatgtccgcgtaggagcgtgcgagcatggtggtggtcttgtccagtaggtcgcggcgtaggtccgccacgcgggcgtgcagacgcgcgaccctcgttctcgccttgcgtcggcggttggagccttttcgtttgcggctcagattcttctgttcccgcctcaatcgtctgaggttcgagtccaacgcgcgtggattgcggatgatggtgccgtctgacagtgtggcgagctgtttcacacccaaatcgatgccgacactaccgcctttcggcggcgatggaaccggcaggtcggcgcgttcgacggtcaggctggcctgccagcgtcccgcatgccgggatacgctcatgcgcagcaccctcgcgccatccacccgcctggacacgtcctccatgcagtgcacgcggcctatcttcgggagccgcagcgcataagggtcacagtcaatgagaccaaacgagcccgtcgtgtacgcgaatccgggaaccgccctgtccttggatttgaagcgcgggaagcccatcctgcggcctttccgctgccccttgcgggacttggagaagttcttcagcgcgtcggccaatgattcgaggccgctgttgtacgactccttgctgttctccggccaccacggcttgccggtctccatgctgacggcgagggcgtccttgttggcgttccaccacctgcgcagcccgtagtacgaccattccggcttctcctgccgttcaagcatggccttgacgtgcgcgagtcccgcgttgtacgcgaatcgcgccgcaccggcatgggactccaagagtcgttcctgccgtggcgtcgggtcgagcgccaccctgaccgcctcaagcatcacgcgccgccctcaacgccgcgtccgtcttatgcttggcggcacgacgcccgtacagccgggcgcagaacgaggtcaacacctcggtcatgtcgcgcaccaagtcgtcgtccggctccgtgtcgtccaccacgatgattcggcgtccctgcgccttcaacgcgctctccaccagtcccgcgttcatgcgggcgagcctgtccctgcgctccacgatcagcgtgcccacggtcgggtcggccaatagccggttgagcttgcgccgcttgtcgttcatgcccgagccggtctccgtgaccacctcggggctcttgacgcccatgttgatggcgaacgccttcaaccggtcggcctgacgttgcaaatcgtccttttggtcggacgagctgacacgcgcgtaacacaccgtcctgccgttcgccgtgggggcggcgggctggttctcgtatttcgggtcgtggatgataatcgtgcccgtgttcatgcgctcgaacgggacgggcatacggttctcgcgacaccactgccacaccgtctgctcgttgaagccctcacgcctcgcccattccctgacacgcatgacttaattatatcacacgaaaacaaactaaagcaaataatcaatctagcaggttataaccccatcaccatctactttttaggaaacatcttcgctgagacctataagttgatccgagagtacattctgctgttggggagcaggattggcgtttattttattcctcgtccgccctgttctggcgcagctgctcaatgagatcgatgacggtttcgagttcaggagtcacatcgtctgaaggacgaacgttatcctcttcgtcgtccatctcatcatcctcatcatcatcggcaacggtgttgttgaggatgtcctcttcggtggcctcgtcgtcagcatcagacttggactcgtcgctggaatcagctgcatcaacatccacaacggaatcggatgcgttctgtgcaacagactcatcaccggcagactgggattgcgaggtcccgtcgcctgccgcctcctcagcgggctcagtatcgacggcgttcccgtcaacagtcttctgtgcttcgatatcatcaccggcaggctcgcctgtcttgtcggtttcgccttcggcctcgtcctgggcaacctgctcctgcttgcacggacggttggcaaccacgtcgatatgcagatcgtcaaaggctggcttggactgcacccacagctggcttggctcgggaggttcgatttcggaatgctcaccgcagccgtggtccagggagaccacgcggccgtcatccggactccacttgttggcgcacacgccgaacatacggtcgagttcgcccgcgagcggcacgaagaaaccacaggtggagcacaggttgccttcggcggttttggtgctcaacgctttggggcctcgcggaccttcataccagcgcttggcagcctgcgcacgacccaacgaggtcagcacgtgacggcgggtcagtcggaaggtctcgacggcatcgttgacatcctgcagcgaggattcctcgacttcgccttcctcgatgcgctcgtcatccggatcggtaccgatcgaatcggtgggagccagatctgtgggctcaaggcgatctttccaaggaatccacttgggcggcatcaacgcgccctcagtggggatcaaggaggattcgttgacggtccaggagtcgatctcctcgtcgtgatacagcgtcaccgaccattgccatccttcgtagccacggatattcgcggcgaagcggaagtcagtgacgtgatcctcaagatcatatgaggtaacgaaatcccccacctgatcgctctcgtcggccacttcgagcagcacggcgcgcgcgatggcgtgagggtccggtgtcacgatggtttcggtggtatcagtcatagatcagatcagtcctgtacatcgaattgatccgccaccgcacgcagcaacgtggccagctttttgctgtcggcagcagatgggtaacggtgacggcgcaacgtattgccggccgcatcaagcatcttgataaggtcctcgcagatggcggccatgtcatccgccttcgggcgggtggccttgaccaagctgggagtggaggcgatcaggcgaacatccatggcctgcggcccacgacggccgtccaccacggaatactccaccttggcccccttgcgcaacgtggtggcgccagtgggtagggcctgagccggcaggaacacgtccttgccttcctcactggtgatgaagccataacccttggctgcgtcaaaccaacgaactcgaccggtgggcattgcgaaccttccttaatcctcaatggaaatagtaaaccgaaggtacagtttacctcacagggcttgacctcacgctttgggctgagtcgcctgagtcttacgctcagagctgaaccaagaagtcttctgtttggcgtccttggttttgccggtgggccgcttgggctcaggagcgacgatctgctcaatcggcagcaccacggtgaaggtcaggcctcccccatcggtgccggtggcgcagataaagccgtgatgtgctttgaccacggattgcgcgatggccatgcccaaaccggtaccacccttttcgcgggcacgggatgggtccgcggtgtagaagcgttcgaaaatcttcgagcgcgattcaggcggcacgccggggccatggtccacgaaacgcaatacggcgtatcgatagccggtctgcatcgaggcacctacttcggcggcgtcgatgaaccgccgcattgacgcgtcgctggcgggcatgcgagcgagctgtcttggatcgatggcggccggcatcacaccgagcgcggcctcggcaggcgaatcggcaggcgtgtagcggtggatgttgcccacgatgttggtcaccacctggcgcagtcgagaggcgtcgccgggcagcacgacctcgggccaatcgccttcggcaaggttgaattcggcgggatggttcaaatcgcgcgccggttcgagggaaatctgcatgcggcgaacggcacggtccgggtcgagcgcatgcaagtcgtcgacggcgtcggtgaccagcgacgagagtttcaccgtgccggtcacatcgatgccgcgcccctcatcgagacgggccaaagacagcagatcctcaacaagaacagtcatgcgctggctggaccgttcgatatgtccgatggactcgtccgcacgctccaaggcaccaggcatatcgcgctgcatcttatacagctccgcatagccatggatggcggccaacggggtgcgcagctcatggctggcgtcggagacgaaccgtttcatcttgtcggtggtctcctcctgttcatggaaactggattctattcgggtgagcatggagttcagcgaggcggccagggagccgacctcggtgttttccggcgcggaaggaatacgttggctcaggtcgccggcggcaatctttgcagcggttttctcgatgcgcttcagcggcgtcatcgtgtgctggatgatcagcgtggacagggagccgccgagcagcaccacggcgatgccgaccacaatgcagtatcgggtgagtgtgttgacggtgtcgatctggtcggccagtgacaagccgatgtacaccacggcacggtccttgccgttttgctggaaggtcaccggcagaatacgccatggtgccctcgccgtgacgatggcggcatggttggcattgacagtggggttggccagtaccttggcgatggtgtcagaggaattggagtttccgttggccggatcgttctggctgtccgcactgtcggactgcaccgtgatgatctgcttggccactgcctgcgtagtgaatgcctggccgagcgtgatgccactggtatcaccataggtaggaagaatcggcaccgatacgataccgtcctgcatctgcggcatcagcggggtcacgaccagaggattgccctctttgtctttggtgccgtcagtatattgaatctgcagaaagtacgagttcggccccgatgagtcattttttgacagcagatcgatattgttgaccaccagctggctttgcgagcttaactgggtgtcggttttctgcagcatgtagttgttcaccaacgcgcggatggagaaggaaatcaccgacacgccgataagcagcacggcgatggtgcaggccaccagcttgctgctcaacgagatacggtcgatatgccgcatcagcatgtttttcttacgttcgtgccgctcttggaaatgggcggcgaacggcggcattgcaggcatgggattcgtgttcggggcggcgttcggcgtgctgctcggcggtacgccgcctgactgcttatcggggatactcatgagattgcgatgcgttatggatggggcgactagttcttcggttcgcgaatcatatatccgatgccgcgcttggtttcaatcagcgaagtcaccttgcgcttgccgccttcgccgtcgtcgacctcgatgccgtcgactttcttgcgcaggtaggagatgtacgattcgacgatggctgcgtcgccgccccagtcgtattgccagacatggtcgagaatctgtgccttggacagtactcggccctcattgtccatcaggtagcgaagcagcttgtattcggtggggctcaggtcaaccggctgccctgcacgggtcacatcgtgggagtcctcgttgatttccaagtcggcgacgcgaataatcgggtcgtcttccacctgttcgcgggtacggcgcagaatggcgcggatgcgagccacgacttcctcgaggctgaacggcttggtgacgtaatcgtcaccgccgacggtcaggcccatgatcttgtcttgggtgtcgtcacgagcggtgaggaacagcacaggggcgttaatgccttcctggcggatgcggcgggtgacggtaaatccatcgatgtcaggcagcatgacgtccaacacgatgagatcaggctgcactttttcgataacctcaatggcttcggaaccggaagcggcggtgtttacctcgaatccggcgaagtgtagggaagcgaccagcagttctcggatggacggctcgtcgtcgacaacaacaatcgatgcttcaataggcttactcatgcttcctagagtgtcgcgctcttctgggcgtttcctgaatgtcatcttggagttcggccttggaatccttcttgatctccttgcgccgacgaatcaccaccatgaccacgatgatgatgaccagcgccaccaacaccacacccatgatgattatgcctacggtcaccgtggatgatgaggtggaggcttttttggatttcacgatttgatccatcattgccgttgccgcgccagaccagctcggcgggttttccagtaacggctgctgtgcggcttcggatagcttatcgacggttttgttatcgagaagccacttatcggagttcttggacacgacgaccaccaggttgccgtcattcgaggccacggcaagcatcactgtgttcggcttgggattcatggactccatcacggttgccgcccagtcttccggtttctgttgactattgaaactggaaagatacagcagatgcacgtgtacaccggtttccttctcggttttggcgatggcatccgtgacttcggccgcatgggagcccaggagattttccgtatccgtgatgttctcggtgatggtcacgccgctgtcggtgctgctgctggagctgtcagagctgtcgcccgagttatccccataggcatttgcggttatccacattgcgttcatcgctactgcagcaaggacgcaaatggcacaaacaagccattttcggaccatattcccgaaggccgaacaggacggctccgaagataggaccacaatagttgtttttccgtcttcccgattcgttgttgacatatcctccaccttagcggccggtattggcaagcggccgccatacataccattaaccctctagaaaaggagcaacgatgccccaatatcaggtagattccgagcgaatccaatcatcctcggccgcagtggccacttcgatctcgcagatcaggcaggccgtgggcggcatgtacaccaatctcaatgccttgcaggatgcatggcgaggttcggcggccacccagttcaccgcggtagccgaacagtggcgtgcggcccaacagcagatggaggcctcactcgagtccatccaacgctcgctgacgcaagcctccaccgtgtacgctgacgccgaaatccaagcttcgcgcctgtttgccagctagtttcttggctctcctccctgaggggagctcgatcgcgaagcgaaactgagggagtatccctacaccgcagctccccttagtctcactgcgttcgacagctccccccaaagaggggagccagaatacaaaaaaggggactcccgaaggagtcccctttcagctcaatcagctagcgatcgcttgcggatcagtagcccatgtcggcaccggcggccggggcagcaggcttcggctccggcttgttggcaacgacggcctcggtggtcaggaacagaccagcgatggaggcggcgttctgcagagcggagcgggtcaccttgaccgggtcggtcacaccggcggccagcaggtcttcgtaggtgtcggtggcggcgttgaagccttcgccatcaggcagggaacggacggtgttgatgaccacgtcaccggacacgccggcgttctcggcgatctgcttgatcggggcttcgatggcgcggaacacgatggcggcaccggtagcctcttcgccggtcagggaggcgacggcctcggccttctcggccttggcagcagcctgaacgagggccacgccaccgccgggcagcaggccttcctcgatggcggccttggcgttacgcacggcatcttcgatgcggtgcttgcgctccttggcctcaacctcagtggcagcgccgaccttgatgacagccacgccgccggccagcttggccagacgctcctgcagcttctcacggtcgtaatcggagtcggtgttctcgatctcagcgcggatctgggccacgcgagcgtcgatgtcttccttggagccagcgccctgaacgatggtggtctcg

SEQ ID NO: 3972 - DNA, 7453 bp, Unknown
  R22_24m  MAG No. k141_34277
atcgggcgcgactctgatcgcgcagactggctggattcgcacggatacttccggcctgggccagttcgcgtccatcgaatcgtatgacggtatcgatgcggccgcgctggacggtttcgtgcgccagcgtcttggtgagtagaaataggccgattgtatcggcattgcattccggtgtgtcgcaagtatttgcaatgtttatatcaaccatttgatgtctgttttgacaaacttctgaaacgttatagaattgttgccaacgaagaaatctgaaacgttctagaaaaaccggcgcacagcagcgtcggttgactggttttccgctccggcaaagcatgcccgagtattttctatggccagtttctgaaatgttacagaaaaagaagatgaggtccaagggaggtcatcatgacggcaattcaggaagccgttcccgccgcagcgggggcagcgcaaagccgtgggggagaggtgagcaacgcggctgcggcagccggcaaacgtgttcgtgcccgcaagcacagcggcgcatcgcagaactcatggcaaagcaagctgcgcccctacctgttcatcgccccgctggtcattctctccggcgtcttcatctactactgcatcggcttcaccgtggccacatccttcaccgactgggacggcatctccagtgagatggacttcatcggcctgaagaactacaccaagctgctcgctcccggctccgtgttctggacggccttgatgaataacatcatcttcatggtcgtcaccgtggtcatccaggccgggctcggactgctgctcgcggtgatcctcaaggagcgcctgcgcggttccagcttcttcaaggcgatcttcttcatgcccatcgccatggccccggtcatcatcgccgccatcttccgcatcatcatggatccgaacgtcggtgccatcaacgaggccctgcgcttcctgcacttggacttcctggcccaaagctggcttggcgatccgcacatcgccctctactcgatctgtgccatcaacatctttgaatggatgggcttctcgatgatcatctactacgccggtctgatgtctatctccgatgacatctacgaagccgccaagatcgacggctgcggattctggaacaccctcttccgcatcaccattccgaacctgtccggcaccaccaacacgcttatcctgcttggcatcgtcggctcgctgaagaccttcgatatcgtcatccagaccacaggcggcggccctggccgttccaccgaattcctgaacacctacctgtacaaggccggcgtgcagcagttcaacggcggtctgtccgcggccatcggcgtgatggtcctcatcatcgccgtgatgctctccctgattcaacttgccttcaacaagcgtgccaacaactaacgagaggacgtcatcatgaagcgtaaaaccagtgcgacggtcatcatgtacaccgtcctcgtattcttcttcgtcatctggattttcccgatttacacggcaatcaccaagtccctgcaggcaggcggctggaacagctacctgtccgtgatcaacaataaggacgtgcactacttccgcgtggtgttcaacagctttttcatctccgtggtcaccgccgtgatcgtggtggtcatcacctcgctcgccggctacgcctttgccaagatgaagttcaccggttcccaggtgatctacgtgctgctgctcgcctgcatggccgtgccgattgcctccgtgaccatgccgctgttcttcaccatcaagacattcggcctgaccaacacctacctcggcatgatcatcccgttggtggcgttcaacgccctgcagatgctgttgctctggcgcaactacttcaacggcgtgccagacgaaatcatcgaagccgcccgcgtggacggctgcggttccctgcgcatctgggctcgtatcttgatgcctatctccaccccgatgatcgccaccaccggcgtgctgaccttcgtctactcctggaacgaatacctgattccgttgctgctcatccgcgacgaatccaagtatccggtcacgctggcctccacctacttcatggagacccgcagccagacgccggagatggtggcccaggaatacgccgccctgattctgatgacgattccgtccatcatcgtctacctgatcagccagaagtggctgcagtccggcatcaccgccggcgccgtcaagagctgaggtgacccaaaatgaccgcaaccatcagcaacggtgtatccgccagctacagccctgcggaagacgagctcggcgcagctgaccccaccgccttgcttgccgaatctggcgatttgaagccgctggccgaacgcacttatacgaatccggttccatatgcggacggtaagtcccataccgcgcccgacccgttcgtgctcaaataccgcgacctctactactgctatgccaccgacgagcacggcattctggtctccacctcaccggacatggtgcactggacctcacatggattctgctacaccgaagccggacgcagaaacttctgggccccatcggtgattctcatcaacggcgtctttcacatgtacttctcgaatatgccggccgaggagaccgacacccacacggaaatcatgcgtgtggccgtgagcgaggatccgctcggcccgttcgaaaagaaagcggagctgttcaacaccttcgccatcgactcccaagtggtctatggcgatgacggccagttgtacttgctttacgccgacaatcaggtcaccggcctgagcgatgaccggcccggaacctccgtgatgatcgatcgccttgtgaccccgtattcgcgtgagaacaaaccgcgcccgctcatcgtgcccaccatggacgaggagatctttgcccgcaaccgtttcggcgatggccgcgactggcacaccgtagaaggcgccacatacttcgcctaccgtgaccgcgcgttcatcacctactcggccaacgcctacgagcatgaggactacttcgtcggatactcgtacgcacagctgccgaataagcaggccgacgcccacatcgatcagctcgattggacgaaacagctcaacgagaaccgcttcgatccgctgcttatccgcagcccaaaggtcgaaggcacgggccacaactccatagtcaaagcgcccaatgccgttgatgactggatcgtctaccacggccgtaacgccgatgacgagctgtatgtgggcaccgaacagcgcgtaatgcgcatcgacccgctgtactacgccgaaggagggctcgacaccccaggacctaccgccgccgctcaaagcgcaccgctgtatggcactgtgcatgatgattttgcggatggcctgaacgccggatggtcggttatttccggcgcggcccacaccgaatccgatgtggacggtcacgcgcttgttgccgacgaatccagtgtattcatcgctgtgtcgggcaaatcgtccgcaacccaagtgattgacgtctgggccaaagctcccgtcaccccactgggcgcacgattcggtatcgtggtgcggtaccaggatgccaacaacctcaccaaactcgaggtggatgctggccgtcaggtaattagcgtggtcgatgtgatcggcggcgttgcctccgaacgcgtgaccaatgccgacctccatgacttcgattcccatgcctggcatgagtaccggcttgagcgccgctactgcaggctggagatccgcattgatggccgtttcgccgcgtcctgcaccatcagtgataagcccggtcgggcgggattgttctcgttgcgaacgggggccgcgttcagcgcatatgcggccactgaacatgtgaatctgtggggtgccggattgcgggatctcggtcgagaattgcatgctgaccgccgactcgtcatcgacggcggcgtgaggtccagcggcgtgtgtccggtaacactcgaactggcatacccgctggtcagcaaccgtttcgtccttgatttcgctgggcagacgagccgtgggcaggcgctgttgtctcttggcgaataccgtttgtccggcacggcatcatccgtggagttcatgcgcaacggcaagtctctgccttccaccccggagccggccaggctgcgtgtctttgaagacaacgtccgccgtgaccgttcgggccgagccgtgctcaccatccgtatcgaagctctgaacggcacgatgcgactgcacctacgtggcaaaacctggcaggtgccgtttgcggacaatgcggcccgtgcccgtatcactcttgatcgcgcatccctgaccggatacgagaggacatcgctggaatccagcatcgaggaaaggagtgcgtccggcaattgagccaacatcagccgcacatatcgggtgtggctggcttcgccatccaattccgatgatcttccacaacgaagtgaaccaataagagaaacaaggaaaataaggagaacaatcatgttgaacatgaagaaggcgatcgccgcagtgggcgctctcgctatgtctgcaggtctgcttgccggatgcggttcgggcagcggcggctccgatgagggagtcggtaccaaggacagcccggttgagctgaccttctggacctggcagcctaccgatgcccagtggaagtcgatttacgccgccttccagaagaagtacccgaatatcaagatcaactggtggcgtacttctgaaatggccgactaccagaagaagctgcagacctcgatggccggcggcgaaggcccggatgtgttcggtgtgcaggccggttccactgtggaacagtacggccgtttcgccgacgatatgaaggagctggccgacaagtacatgcccggctgggattccaaggtggccgagggcgccgtggcgcagaccaccaacaaggatggcaagatggtggccatgccgaccatcacctccggctccgaatacatcctgtacaacaagacgctgcttgacgagcagggcatcaaggtgcccaccacctacgacgagctcgtggctgccaacaaggaactcaaggccaagggtctgatgccgctggccctcggcgccaaggatggctggcacctcgacgatatcttcgtgtggctgtccaaccagtacggcgaaggtgacgtgtacaaggccgccgaaggcaaggccaagttcactgatgagaccttcgtcaagaccatgaaggcttggaagcagatgatcggtgatggtctgttccaggatggtgcagttggtactgcgacctacccggatgctcgcgacaactacttctacgcccgcaagtccgctttcttcccgaccggctcctggcacgtttccgccgtgctgccgaacgatgagaccaagggcacggccgttgagaaggacgagctaggcatgatggaattcccgcaggtgggagacaaggctaccggcccgaccactggtgtggacttcggcctgagcgtgaacaaggactccaagaagaaggaggccgccatgaagttcatcgagttcatgaccaccggcgaaggccagcaggagtggatcaacacgctgcagggtgctccggtcgacaaggacatgaaggtcgaagtgccgtctgacgccacggaatccgccaaggccagcatcgatttggtgaccaagggccaggcctcttccaagcttgagcgcaagctcacctcccaggaactcaacgacgagatcggtgtgcagatgcagaacatctacaccggcgacgccaccgttgactccgcgctgaaggccattcagcaggtcaacgaatccatcgaaaggtgagcctatagataggaatatcgcatagtttctactcctcgagtgggcccgtccggtacgaattctcgttgtctggcgggccttctttgttggtttgccgaagtggccctgatttattaccgccggcggagtctgttgacggttgcagcgggagtcgtgggcggcgtgtcggacccgtccctgctagcggggctgtcggcaaggccgactgggggtgattctgcggacgcctaagcgaaacggcctgcgggggcgatatcccacatggtttatgctggaaacacacatctgaaacgttcgacaaccaatatggcgacgtggatggtgccatgccgagtggttgatggactgaacataagggggcgctatggttgcgagttcgcgcaaggcgacgctgcacgatgtggcgaaacgtgcgcacgtgtccgtggcatcagtgtccaattacctcaacgattacccctatatgaagccggccacgcgcgaacgtatccagcaggccattgacgagctgggctatgtgaccaaccagcaggctcgcaatttgcgttccggccgcacaggactcatctcattgtctctgccggatttgaaccagatttacttttccgaactggccgaagagatgatcacgcgggcacgggaatatggataccgcatcatcatcgaatcgaccggaaacgaccgccagcgcgagatcgagagcgcacatgccatggccagcaatatgaccgacggacttattttgagccccacggccatgcgggcggaggatgtggccgagctcgagggcgactacccgctggtagtgctgggcgagcgtatcttcaacgcacctgcgccgcacgtggtgatgcccaatgaattgggtgcccaagccgctaccacgcatctgctggaggccggatgccgcaccgtcgccgtggtgggcggaacgttggacgaatccgtgccgtcctctcgttcgatgcgaaccaaggggtatctcagcgcctttgcggaacgtggagtgacgcctgatctgaacctgatccgcgagtgcggcgaatggaccagtgccgagggcgctcaggcggtacgtgagatgtatgcgcagggcattcgaccggatggcatttttgcgctgaatgatttgctggcgatgggtgttatcagtcagctgcgggaaatgcgcgtgcgagtgccggaaagcgtgcgtgtggtgggcttcgatgatatcgatgaggctaagtacacgattccctcgctgaccactgtggatccgcagcgcgcgcgtattgctgagattgccatcacgtcgattcttgatcaggtcaagacgggggctcgggcgccgaggcggcgtattgatgtggagtattcgttgcgttaccgcgcttcctcgccgcaggtgtagcagttgtgttagccggctggtagggtatttgacggtttgcatataactgtctggttcattgggctggcagctcaatacaagatttaggactcataggaaacacatgggcttcgttaatttcatcctcgaactgctgaaggatccgcgtgccgcgattgccggttggattgccatgggcgtggcgccgaccctcggcttcatcttcctcatcgtatttatcgaaacgggtgtggtgttcttc

SEQ ID NO: 3973 - DNA, 4404 bp, Unknown
  R22_24m  MAG No. k141_34392
accagctatggttctgaaactattctgatggatttaccgcagttcgcctgccaagtatggctccacgaatgcgaggttgctaccgcgttcgagtgagtggaggtcttgcatggcatattgccaagattcctcccacgttgtcggattgccgtgtattcgccgaagagattgaagggttgtagagaacaggttcgggttgcgggtaaagaggtctgctagtttgatggcgctgctctgcttgtgctgtgcgtctagattgtcaatcctaccgcgaaatgcgtgttcgaggttgcggctgacgtagaacaggcggtacgggaccatgagcgtggcgcggccgttcttcttcctgaacccatcgagtttcagtaaggcatccacgccgtttcgcttggtcgtgcgatccgcaatcaggatagtgcggtttggcgtgatgatgtcggtcgttgaatattgcgttccatccaccaatgggtcttcccgcactcggtcgtcagatgtgaacgccccgtctaggtcgcagatctggatgacatggccgagctggccccaggtgcggtcgtggtctctgaggtagtactccacgagttcgcgcaccgtctggacaggattgtccgctggatagaacccgttacgacgtcggaactcctcacggtggtttggcgcagtcaacacgtcgcagtggaattcctgcccttggaataggtggttctcgattaacgacgagaatgccggcacgagcaggctggcgtcgcttgctccttctacgaccagcaggacgatcttgcgtttagccacggttcaccttcgttccggaggtgttgagtgctgccagatcgtcgtcgatgtcatcgtcctcatcgggatggccggcggcatagagactgttgccgaacatgcgtggtatgggcgaatcatagatgtcggggccgctccatccgagctcgctggccgtcaggtaccgtcggcgctggttgttcgtggaggacttgcgggggatgatcgcgaaccggttattgggatcggtcactgtagtgcgaatgcagccgttcggcagcacttccaacgcacgcaggttatgggcggtgaacaccagctgccctgcgcacccgtccgccaactggtacagcatgtcaccgagcagcaactcgaacacgccggagtcgaactcatccacggcaaccagcgcgttctcgtcgttatacgcgtgcttgagatagccaagcagcgcggtgatgcgtatgatgccttcgctctcacagcggaatgggaccgtgatatcgccacgacgcgagaacagctccgcggtgacccggtcctcgccatctttgccggaaggcgcggttccgatcttcagcaggacatgcagaccaggcacgagggtgggcaggatgcggtcgaaggactccacggtctgtccaagtcgtttcgcctggctcggggtcagcgggttcggttgcaacaggtcgaacagaaactctgtgttgcgacctgcggaatcctcctccatgatggggatgaacgcatatgcggcataggagccacgacgggtagtggatacgaagacatcattggtcgcgtaatcgcataaggccttgcgtaggcgtacgaactcatcgaaacgttcgttgatgtatgtcagtgatctggcggacacaccattcgcttcccgtacgcgggagaccgcccagtcgatgaggaactcggcatcgggccggtcttcaagcgtggcacaccgcgagaacaggaatgagcgcccctccatgtacgcacgatcagcggtgcgtgagaccacggttttcaccgaggtgaccgcctcgatggagcgccacacatataccggagttgacacgaaaccatcggtctcagaatcctccatccgatgccccaacgcctccctgcctaggcgtgagagatcgtcgccgatgcgaaccgactcggaaacgacgcgcgctcgcgttgaatccgggttcgctctacgcagggacaccttgtattcaaggtagctgggcttctgttttcctccgatgaggagcgtcgccgtcaaggttgcaagaccggtgctgacgctaatggcatcgccggcggtgtccggcagcatattcccggatagcagcgcgcgcagtatcccgatggcatcgataacggtggtcttgcctgatccattctgtccatagatacccgttacgctgccgccagcgggcagatcgtcaaaatccaagacgccgtgcgatatgttcctcatgttgtctagaacaagtctttgtaaacgaatcatcgcattaccgttctttaaaagtcataataatcaatttataattgaaatacatgattattgtacaacataagatatattttcgccaccaaatctcgcaatcggtattcattgattgcgctgtcagtgacctatcggcggcctgtcaatggctatcagtgcccttgcttccggtacttttcctcagtcccggctttatcaggcatccaccagttttcgtgtgctcggtaccagtcgatggtcgcggccagaccttcctcgaaatcggtgtactttggcacccagccgagctcggtctgaagtttggtggcgtcgatggcatagcgcttatcgccaccggggcggtcgttcacatggtcgaagtcattggcgtcacgacccatgagcttcagaatcatgcgcagcacatcaatgttgttgtattcgccattggctcccacgaggtaggtttccccgatgcggcctcgggtgagaatcgtccagatggcactgcagtgatcttccacgctgatccagtcgcgcacagccagaccttgcccgtagagtttcgggcgaatgccggcaagaatgttcgtgatctggcgggggatgaacttctccacgtgctgataggggccgtagttattgctgcaattgctgatggtggttttgagtccgtgcgtgcggtgccaggcgcgcaccaagtggtcgctggcggccttggacgccgaatacgggctggacggtttgtaagggctgagctcggtgaatttgcgcggttcgtccagagccagatcgccatacacttcgtcggtgctgatgtggtggaatcgaatatcgtggcggcgggcggcctcgagcaacacgtacgtgccggtcacgttcgtgttgaggaatggggaggcatcgagaatcgaattatcgttatgcgattcggcggcgaagtgcacaatggcgtcaatcgggggtactgcggctgcagagcgttggttcagcccagaaaacagggattccacaagctcggcatcgcaaatattgccatgcacaaaggtcaggttcgcggccggcacgccatcgagattctcgcgtttgccggcatacgtgagcgcatccagaacagtcatgtggacctgcggatggttgcgcgccacccagtgcacgaagttcgcgccgatgaaccctgcgccaccggtgaccagaatgtgttgcggcgcgaatgatgggttggttgcttcgttggatgctttgttgactgcttcgttggttgagtcgagggcctgttcggaattgctcatatctaccaatcgtaacctgaggtttgcctgagtgcgggggcttatattggtggttgcgttgttctgcgctctgtctttgtggcggcgaacgggtccgggcaaagacgcagaaatgtaagaacatgccatcgttttgccttgagtctgtcgtctggtcttggattgtgtccagtctgctggtaagtctaggaagattgccgatttgcaattgggtgagtaagatattttctcggaaatcgaacataataattgatatattgactttatgaaagggaatgcgcgcatgccggaaactactcaatacccagacctagtcattgtcggcgcgggcctgttcggtctgacggtggcgcagcaggcggtggagcatgcgggtgcccgtgtgcatatcatcgacgtgcgtgatcacatcggcggcaacgcgtactcgtacttcgatgaggagaccggcgcggagatccacaagtatggcgcgcacctgttccacacgtccaataagcgtgtgtgggactacgtcaatcgtttcacgagcttcacgaactatgtgcaccgcgtgtatgccacgcatgacggcgaggtctatccgctgccgatcaacctgggcaccatcaaccagttcttccatgcgcattacacgccggccgaggcgcagaggcttatcgccgggcaggcgggcgagctggccggcaccgatccgcagaacctcaacgacaagggcatccagctcatcggccgtcccctgtacgaggcgttcatcaagaactacacgggcaagcagtggcagaccgaccctgccgagctgccggcggccatcatcaagcgcctgccggtgcgcttcaactacgacaaccgcta

SEQ ID NO: 3974 - DNA, 12273 bp, Unknown
  R22_24m  MAG No. k141_34747
cttcatgcgtgtgcccggtgtggatctcatcgatttcagcggcgtccacaaccagcggacgcccgtcgatggtcgtgctcatcatccgacttgtgcacatgtgtccgattctgccgaatcggacgtctgagttccgaaaaatgtgttctgtgtgtccgattctggagaatcggtcatgtgtgatgtgaattgggatgtttggatgtccgtttctgcagaatcatctttgctctgtactcgttgattcgcaaatacggcgcatggctcgtcataccggccatgctcggcggcgcggccttcctggcggactcggtgctgacgccggccgtgtcgatctcgtccgccgtcgaaggcctgaagacgctgccggcgttggagcatctgttcaccgagaacaaggatctgacgatgatgatcaccgcggtgatcatcgtgatcctgttcgccgtgcagtcgcgcggcaccgaatcgatcggcaaggtcttcggctcggtggtgatggtctggttcgcgttcctggcgatcgtcggcgtggtagccatcggcaacgactggtccgtgctcgccgcactcaacccgtactacggcatcaagttcctgttcagtccgaataacgccaccggtctggcgctgatgggcaccgtgttcctttcgaccaccggcgccgaggcgctgtactcggatatgggccacgtgggccgcggcaacatctacttcacctggccgttcatcaaggtggcgctggtgctcaactacttcggccagggcgcgtggatgctgcgcaaccagaacaaccccgaactggccgacgccgaggggatcaacccgttcttccagatgatggatccgaacgtgcgctatgtggccgtcgtgctgtcggtcaccgccggcatcatcgcctcccaggcgctgattacgggcgcgttcaccatggtctccgaggccaccggcctcaactggatgccgcatctgcaggtccgttaccctgcccgtacccgcggccagctgtacattccggtcgtcaacgtggtgctgtgcgtggccacgctggccgtgctgctgctgttccgcgattcggaacatatctcggcggcctacggcttggcactgaccatcacgatgatcaccaccacgatcctgctgggcatctacctgtggcaccgcagcaacaagttcggcgccgttgtgttcaccgtcgtgttcctggcgatccaggtcctgttcttcgccgcctcgatggccaagttcctgcacggcggctggttcacgctgctgctcacgctggcgatcctcatgatcatgtacacgtggaacgagggcaccaaactggagcgctcgcagcgtcggcacatgatgccgaaggacttcctccccgcgctggacaagctgcacggcgatagccgcatccaccggttcgcggacaacatcgtctacctgaccagcgatccggacctgaagcgtctcgatacggacatcttcttctcgatcttcgccgaccaccccaagcgcgcccgcgcatggtgggcggtggccgtcgagaccaccgacgagccgttcacccgtgagtattcggtcgagagcttcggtaccgactacctgttccgtgtgcgcatccgcctcggcttcaaggtctcgcagtccatcccggcctacctgcatcagatcatgcacgatctggagaagaccggcgagctgccgaaccagcagtcgatctacccgaagcttgacgccgatcccggcatcggcaccatccgctacgtggtgatccacaaggcgctgatgcccgagtcgaaggtctccggccgtggcgccctctcgctgcagatcaagtacgcgatccgccgcgtggccggttccccggtcaagtggttcggcctggcgccgtacaacccgctggtcgaggtgcagccgctgttcgtgtccacgcgccgcccgccgcgcctgacccgcgtggccagccaggcgcccaagcgcgagggctgagccggcaggccgaacagccggtgcgagccgggtggcctaatggcatgtcagggggccgcgaaccgtcatcgtacggttcgcggcctttgcatatgcgaatgatgcagagtgggcggtactgcttgtgaatgtagcgggtggacgggtgacgtggttgatgccttttgccgtatgttcacggtggctatgcgtcggatgggactgtaattcgacttcttgggatcttttttgctgcagtggtgcgccaaaaggtctcagccgtctctgcgacgcgccttccggcagtcagtacaaggttgtactacactggtggctgccacacggatgtccccggtcgcccgcgcctccgcggtacatcgttgtatggatacgtgtcacgtatgcagagtgcatgcagatatgtagaaaggaatcccatgccccagcaggaccatctgaccgcacgtctcgtcgtcgatgacgattttgaggtcgctccggtcaacaatcgtctgttcggttcgttcgtcgagcaccttggccgttgcgtgtacaccggcatctacgagcccgaccacccgaccgccgacgagcacggcttccgcaaggacgtcatcgacctggtcaaggaactcggcgccaccaccatccgctacccgggcggcaacttcgtgtccggctaccgctgggaggacggcatcggccccaagcaggaacgtccccgtcgactcgatctggcctggcattccaccgaaaccaacgaattcggcctgcacgagatggccgaatggcttgaggccaccggcggcaacgagctgatggaggccgtcaacctgggcacgcgcggcctgcaggaggccctggacctgctggagtacgcgaacgtgcccggcggcaccgagctgtcggaacgtcgccgcgccaacggcgccgacaagccgttcgatatccgcatgtggtgcctgggcaacgagatggacggcccgtggcagctcggccacaagtccgccgaggactacggcatgctcgccgcctccgtggccgccggcatgcgccagatcgatccggatgtggaactggtggtgtgcggctcctccgcccatggcatgccgaccttcggcaagtgggagcagaccgttcttgagaagacctacgagaacgtgaacttcgtctcctgccacgcctactaccagccgttcttcaaggaggacggcacgcgcgacatggccagcttcctggcctccggcgtggatatggacggcttcatcaaggacgtggccgccaccatcgacgccaccaaggcccatctgaagagcgcgcacgacgtgtacatctcgttcgatgaatggaatgtctggtaccagggtgaggagccgagcaagacccccgagggcatcggcaactggccggtggccccgcgtctgctggaggacatctacaccgccgccgacgccgtggtgttcggcgatctgatgatcacgctgctcaagaacgccgaccgcgtgcgcgccgccagcctggcgcagctggtcaatgtcatcgccccgatcatgacggagccgggcggcccggcctggcgccagaccacgttccacccgttctccgtgaccgcgcgcctggccaagggcggcaccgtgctggagccgaagctgtccgccggcaccgtggatacgccgcgctatggcgaggtcgacggcgtgaacgccgtggccgtgcgctgcgccgacggctcgctcgccgtgtttgcggtgaaccgttcgctcgaggcgaccgccgagttcgagatcaggctgcaggacggcgcgcagccggcatccgtcgaggcgcagacgctgcacgacgacgatctgctcgccgcgaatacgctctacgaccagaaccgtgtgaccccgcacgccaacgggtcggccatgtacgatgccgagtccggcgtggtccgcgtctccctgccgccggtgagttggaccgccctgcacatcaagtgacgcgatgggccgcgcggtccgttccggagaaggacggatcgcacggcccttgcttcccgggccgggcggaggggaccggaccggccggggaaaacgcgttatgctggaatcagacgggcgttccgcctgaaccgtgcggaacatgcccgatggtgcgacgagaggggtgctgtggcgaaacgggtgaccatcaccgacgtggcgcgcgagacgggcgtctccatcaaaacggtgtcgaatgtgctgaacaacaccggcagtatgcgcccggagacgcgccagcgtgtccaggatgccatcgaacgcctcggataccgcgttaacgtgtccgcccgcgccatgaaaaccggcggcacgaagctcatcggactggccatcaccgatttctgccagccgttcatgccctatctcgccgacagcatcgtggcggcggcacgttcccgcgggtacgcggtgatcaccgatacctacaacagcgccggcggcttggcgcaggcgatcccggagacgaagaagctggccgcggacggctggattttcttcatgggctcgccgatcacggatcgcacgatactgcaccagccgtatccgttggtgattgtgggcgattacgatacgcagggactggccgattgggtcacgatgccgaacgtggaggccgtacgcaccgcggtgggggcgctgctggattcgggatgccgtaggatcgcgttgatcggcggcaccgcggagaacgcatgcccggatgccgaccgcgagtcgcggcccgaaaccaccagcacgatgcgtacccgcggctatgtgttggcccatgaggagcgtggcctgcaggtcgattggcggctggtccgtaacgcggattgggtgcagtccggcggccgcgatgcggtggcggggctgttggacgatccggatgcgccgcgtccggatgcggtcatgtgcctgaacgacgcgctcgccatcggggtgattcatgagctgcagcggcgcggcgtgcgcgtgccgcaggatatgcaggtcattgggttcgacaacgtgccggatgccgagtactgcatgcccggattgacgacgatcgacccgcatgtggatgattacgcgcgacatgccgtggatatgctgatcgcgcgcatcgaggggtcggcggatccgttccgcacgtatgtgacctcctacgatctggtgcgtcgtgcctcgacgtgttgacggcccggcgttcgcctggacatgggtctgtgacgggctgctgtcgcctctcccgtggcgtattccgggagaggcgacatgcgggctaggatcggagcagcacctccgtcagcgcttgacggacggcgctcggcatatgcgaatcggagcaatcttccatgtccggcccgctgacgtgctcgagtgaatccatcgtggccaatgcgtcgatgccgttctccgctatggcggcataagcctgttccttggtcagatatcgcatttcggcatgccgaaggatgtcgaagacgtcttccatgcggggatcgggggccatcgtcgtgtcgccgatggtgacacgtatctcgctgcgggtggatacgtcggcgaccgttacctgcaatgtgagggtttcggcatcataccggcgatccgaatcgacggatgcgccgtcggcctgtacggatatgtcgctgtcggtaatgcctcggaacaggaaatcccatgttctccgggccggcagagcgtgaacgtctccctgggctggcgataccgtgagtgcggatgtggcgccgtccttgcgccatcgataggtgatcgcggtggtcgccggggtgatctgccgagagtaatgtcccgaatcctccatcagcgtgaagtcgccgtccgctccggggaagacgatgatctccagatgctgcgggttgtcgacggagttgatggaatccccctcggacaggggctgcatcggcacgatgccgccggccttcgcgaacacgggaattccgtcgagcggacgccagacggtcatgcgccgtccgttgggcgaagacgcgctataccggcgcccggtgaagaagtcgaaccagtcgccctgcggcagccatacgtcggccttgccccgtcgggaggatttatccatcggttccgtgatgggcgcggccagcagttcggtgccgaacatgtattcgttgggaacgtggtatgcggcgtcgatgtcgggcgatccccaatacatgggctccaccaggggaaggcctgtccgggatgcgcgccagttcatggtgtggaggtacggaatcatgcgatggcgcaggcggagcgcatcgtccatgatcgcacggatctccgggcggaagttccatggttccttgccggagaacggcgagcagctggaatgcaggcggttgatcgggctgaacacgcccagctggtaccagcgggcttccagctcctcgtcgcggtagccgaacatgtggccgccgatgtcatggctccaccagccgtaaccgatgttcgacgcggtggccgtgaaatacggctggaatctcaacgactcccaggtcacgatcgtgtcgccggagaagccgaccggataccgctgcgagccggggccggcgaaccgggagaggatcagcggccagcggccgtcgcgcgcggaatcgcagtagtgcatgtggttgagcacccacagcgggtccaggccgggctggcgggtcacgccgccctgctgccagtcgatccaccagaagtcgatgccgtcggcctccaggtcgtggtgtatgtcgaagtaggccctgacgaagcgcgggtcggtcaggtcgaactcgaccggctcgccgctgtccgggggaatccccatcgttttcgccgctgaaggatagcagtcctcgaacgcgcggatgccgtcgcgcggatgcacgttcagggagacgtggcagccgcgctcgtgcagatcccccagaaaacgttgcggatcggggatcagcttgcggttccaggtgtagccggtccagccggagccgtacttggggtcgacgtcgtccaccagatgccagtccatgtcgatcaccgaggtggtgaacgggatgccctcggacttgaaccgatccatcaatgctacatactcttcgcttgtgtagcggtggaaacgactccaccagttgcccaaggcgtatcgggggagtagcggcgaccttcccgaaagacggcagaaatcggccaccgcatcggcataacggtggccgtgcccgaagaagtacaggtcaatcccggcgttcttccggggcttgatgtcaccattgtcggcgaataggcaggtgttcgaatcgtcgagaaccgaccagccgtcgcgggagaccacgccatcgttcaggggaatggcgccgtcggcccaatcgagcgtgcgggccgtgcctttcatgttgccctcctgcgcatcgccgaaatgccaggtattggttttggtgtctttcacgcctttgaccacgatgctgagtccctccttgctgaagggccgcatgtcgtaggtcagacgtagcgcggtcgtttccacggtcagcagaccgtcggcgatcgaggtggaatattccgggggtgtgccgaaatcgcggttgacggccatgagcgtcgcatcatcgttgaactcgccggtgtctgaccattccagtcgtagcagcgaatcggagaggactccgattctccagcagttccctgaaatgacgcctttgctgttcgtgaaaggttgggtattcatacggatgtactcctgtgttttcagtgattctgtgctaataacatagcatttttcaaagagagtttgcaaccgtgtgcaaaatatgctattttcaagacaagaagattttggtcttcgttgcaatatgacgctgcgcatggattcaagaatgaatcttctgcagatatcgatctcggagaggagatgcagacaatgaccactgtcggaaaagtggtgcgcagagggtgggcgctcttcgcactacctacagtgttgtgtttcgcggtgttcttcgtcgtgccgcttgccatgggtatctacctgagctttacctcgttcaggacggtgaccgatgccaagtgggtggggctgaagaattatgtggatgcgctttcggatcccgaattcggagccgcgctgtggcggtcggtgctgttcaccatcgcgacgaccatcgtcgtcaatgtcgtctcgttcctgctggcctatatgttcaccaaggcgatgcgcggggcgaatctgttccgctcggtgttcttcatgccgaacctcatcggcggcatcgtgctgggctatatctggcagctgctgttgaacggcgtcctcgcgctgtgggaccgttccctgaccacgtcggcggtctatggcttctggggcatggtcattctgatgtgctggcagcagattggctatatgatggtcatctacgttgcaggcttccaaagcctgccgactgatctgatcgaggccgcgcaggtcgatggcgcatcgaacggtcagattatgcgcaggatcatcatcccgctgatgatgccgtcggtgacggtgtgcagcttcctgacggtggccaacggattcaagatgttcgaccagaacctggccctgaccaacggcgcgccgtcaaacgcatccgaaatgctcgcgttcaacatctaccgcaccatgtacggccgcaccggattcgagggcgtcgcgcaggcgaaggccgtcatcttcttcatcatcgtggctgtggtcgcattcatccagaaccgcattacgaccagcaaggaggtcgaggcatgaccgacaaactcaggcacgggccgctgtggacgaccattttcgccatcatctcgctgatatggatctatccgatcgcgctggtcttcatcaactccttcaaaaagcgcgtctacatctccaaggacgtgttcagcctgccgaccggcgacacattcgtcgggttggagaattacgagcgcggcatagaaaagacggatatccttccgagcttcggatggacgatcatacttacgcttgggtccgtggcgctgatcctgctgtgctgctccatgtgcgcatggtggatcgtcagggtcaacaactgggtcgccaagcttatgtatctcgcgtttatcgcaagcgtggtggtgcccttccagatggtcatgttccccctcagcaagctcaccgacacattggacctcaacacgccgtggggcatgtggctggtgtatctgggattcggcgcgggattgccggtgttcatcttcaccggcgtgattaagtcgattccctcggagatcgaggaggcggccatgatcgatggcgccggctccatccgcacgttcttcaccatcgtcctgccgatgatgcgtccggctcttatctccgtggcgatcctggagacgatgtgggtgtggaacgacttcctgatggcctatctgtgcctggatcttcaacggttcaagacgctgtccatcgccatccagtacctgaagggcggatacggatccgtggacatgggcgcgatgatgggcgctctggtactggcgctgctgcccatcctggtgttctacctgtgcggacagaagtacatcatcaagggcgtcaccgctggggcggtcaagggctgagccccaatcatttcaagaaccaatcggttcatcaaggaaaggaaagaaccatgaaaaccaagaaaatgatggcgatcgtcgccgcggccgtcatggcgatgggcgcgatggcggggtgcggatcctcgtcggcggccgatccggacaaaggcaaggtctacttcgtgaacaacaagaaggagatcgtcgaccagttggaggatctcgccgatcagtacaccaaggagacgggcgtgcaggtcaaggtgctcacggccgccgacggctacgacaatacgctggcctccgagttggccaagaccgaagccccgacgatgtggagcatcaccggctaccccaatttcatcaagtggaaggactacatggagccggtccaggactccgccgccttcaagctgctgaccgacgagggcaaggccaactcgtatcaaaccgacggcaaccactacacgttgccgtacgccgcggaatggtacggcatcatctataacaagaagatcgtcaacgactacgcctcgaaggactatgcggtcatcgactccgccgacgatatcaaggactgggatacgttcaaggccgtggtggaggacatgcaggcccataaggacgatctcggcatcgaaggcgccatggcgacccccggactcgaatcttcggacctgtaccggttcgcatcccatatgacgcgtattccgctgttctacgaatataaggacaacaacaccacgttcatgcctgagatcaagggcacgtacgtggacaactacaaggccctgttcgacttggagatgaacaactgtccgacctcgcgcacgctgttgacctccaagacgtatgaggacgtgaccgcggagttctcgctgggagaggtggccttctacccgaacggcgtatgggcctacacgcaggtcaaggacaacgaggtcgccgatgaggatctgggcatgctgccgtatttcatgggtatccccggcgaggaggagtacggccccgctggcatctacgacgcgtcctgggccgtgaacaagaacgccagcgagaaggacaagcaggcgaccttcgacttcatcgagtggctgttcagcagcgacgaaggcaagaaggtcatgtctcaggatatgggcttcgccgtgccgagcaccgcgtacggagatgaggatcagcccgacaacccgctgaccgccgccgcccgtaagtacgagacgaatggcgttccgatggtgaggagcttctccacgcttgacgcctggggtgcagacgtgcaggacgctcttgtggagtacgccaaccaaaccgggaagtgggacgccgtcgccgacgcatacaccaatggctgggccaaggagtggaagaccttcgaggacaccaacggtgtgctgccggaggccaccacgttgaatggcgacgagcagtaaatcgttcctcctccccatccccgaagcggggccgtatcctctctacggccccgcttcccctattcggcgcctattcgtcgacgtcccgcggagtcgcggtggtggatcggatgatcagctcggccggataggttcggtacggttcggaaatcgtcttatgattgataagatcgagcagtttttccgcgacgtcgtgccccatcaatcgcggctgctggcgtatggtggtcagtcccaattcctgcgagtaggttccgtcatcgaaaccggtgatcgagatgtcgccgggaatcttcaacccgaattcccgtaaacggcacatcaatggtatggcgatgccgtcctcttggcagcagatcgcggtgggcatgggctgcatattgatcaatgtgttgaaggtcgactgcaacgaatcgtctccgtccggaataaccagaacgtcgtctttgatatgggcctgcgcgcaggcctccttgaatcccctgatgcgctgagccgcactgagtgtcagcaacgattgcgggtccctgcacacgtatgtgatgcggcgatgcctcagggacaccagatgccggacgataagccgcagtccatgcgcatcgtcgatggccgcccataccgacatgttttcgttggagacggtgttgatgcccgcaatgggcacattcatcgttttcaggcgcgcgacctctctggaatccacgttgaacgaggggactatcactgcgtccgcattgcgtcgcgccggcagaacgtcaaagaaatccgccctgctttttacattgttgatggggtagatggagatatcatagccggcgggatgaaagaccatgtcgagcccttcgaagatgttgcctccgaaccatgtcgtgaccggggtgctcagcagtagcgcgatacggaagctctgcccggacttgagcgccatcgatgatctggaaatggagaaattgagctcggaggcggcttgcaacactctgtttcgagttttttcggagacaagctccggccgtgtgaaggcgcgcgaaaccgtggacgcggagacattcgcacgaatcgcgacgtcgtgaacagaaggtgtggaggtcataatgctcaattatagaaggttgtgcccgaatcggacacattggagtcggacaggctaagctgcatagaacaccgcatctaatcggttcgacacgcgcatttcactgcgcgactggacattgacgtccctttcgaggtaatatcgaaccggttcgatacatacgtgagtatgcaaatacgtaaacaacaaacaggcagatgcgcacgcaaattgcacccgcgcc

SEQ ID NO: 3975 - DNA, 16373 bp, Unknown
  R22_24m  MAG No. k141_34846
gatgctgacctgggtggaggcggagcaacgcatcatgcatgggccgaactgacccacgcggccgaggtagtcggtcattgcatcgtagcgatccttggggttgaccggcacatccgcaaagctggatttgggctggtaaccgtagttgaccagtcggaagtcgagatcgtcaagaatcggggcgagctcgcgatggaacttggaatacaacgtattcaggtcggacggcttcttcagaatgccgattgaagtctccacctggccgccgggttcgagcgagacggcgacgccggggcgcgcgagccccaccagatggccgttctcccagtattccttctcctcgtcgtagtacggagccaagcgtttgagcaatgcctcgatgccattcggctcgtagtagcttacggcagtgtcgtcgctgttgtgcacgggcaggtgctcgatctccacgccgaagccgccggcgccccgctgggagcgtccattctcaaagaacttgagcaggctttcgacgtgcttggggttcggcttggcgagcaggtgcgcgtaactgattcggggagtaaccatgctttgtatcgtattcgagccggccggtgcgcgtgcccgaaagcccgtaatacgctatacgaaaaaccgatagcaggctccggcccggtttctcgctctagagactcccctcagtcgctgcgcgacagctcccctcacagaggccgagccgtaaagcggacagcccagtggactgtccgtaggcgagggtgagccgataggcgaaccagcatgtcgcgagcgaagctcgtccttaattgcggacgagccagagcataaatcagtccgcggaggtgaagccctgcggctcgccggcctcggcgaacttggcgttgtgagccttcttggcggcggcgatcatcagcttgatacggttgagctgattggcctcggaggcacccggatcgtaatcgatggagacgatgttggcttccggatgcaggcggcggatcttgccgaacatgccgcggccggtcacatggttgggcaggcaggcgaacggctgcgcgcagatcacgttcgggcaaccctgttcgatgagttccagaatctcggccgtcagcagccagccttcaccggcctgcacgccgatggaggtgacttcagcagccttcttgaccagttcgggcatcggctcgtcctgcttgaacttgccgttcgatgtggccagcgcggccttgatcggcgcgttgtacaggtcgaggcccttgcgcatcagggcgtaaaccgtcttgttgccgcccatgccgaggttcttctcgttccagtcggtgatgtaggggcgggtggtcatgaattccatgatgccgggcaccacggcctcgcaatcctgggattcgatgacgtcgaccacgtggttgttcgcgtccggctggtacttgacaagaatctcgccgaccacgccgacacgcaccttgcgcgggatgtcgcgcagcggcaatgcatcaaaggatttcacgatctccttggccagcacgttatacggcagatagcccttcttgatgctcggcgccttggctgcggtcttggaatagccgtgatgctcgatggtctcacgcacgatggtgtcccacagctcgtacagcttgttggccgaacctttctccacctcatacgggcgtacgcggtagaggcacttcatgagcaagtcgcccagaatcagcgccttgatggcacggtgcagcaggggcagggtggccttgaagccggggttgtcttcgaggccctgggtagaaatggcgatgaccggaatctgtgggtaaccggcatcgaccaaagccttgcggatcaggccgaagtagttggtcgcacggcacatgccgccggtctgggtgatggcgagcgctacatggtcgggatcgtattcgccttccagaatcgcgtcgatgagctggccgacgaccatgatggccgggtagcaggcgtcgttgttcacgtatttgaggccggtttccacatcgccacggctcgcgtgcttcaggatgtcgaacttgtacccaccggaacgaatcaccgcttcgaccaaggacatatgaatcgggctcatctgagggccaacaatcgtatagttcttcttcatgtccttgacgaacttctcgcgatgcgcgtatcgggacatggtggcgttgttgtggccggacttcttggcgttcttggcgttcgtcacgccggtggtgccgtccgaagtgccgttcttgctggcgactgcggcctgcaggtcgcgttcggcggcacgcttggaggcggcgcgcatggccttggtgagcttcgggttggcggccatggtgctgtcaagcagaatctggcggccgggggttggcgcggtggagccggtcttgcggaatccggcggacttggggccttgcacggccttggccgcggcggcttcgcgggccttgttggcttcgcgttcctcgacggcggccttgagcgagcgcagtcgaatcttggcggcacccaggttggagacctcgtcaatcttcagcagcgtgtacacgtccgccttgtctgccaggatttcggccacctgatcggtggtgatggcgtcaaggccacagccgaaggaattgagctgcacgagttcgaggcccgggtaggaggccacgaagtgtgcggccgcgtacagacgggagtggtaggcccactggttggtgacgcgcaacggcatcttggtgactgtgcggtctcccacgtggcggaatccggcggcgttcttggagcgcgggtcggcttcgccttccgagaggaattcggtgaggttgagcttctcccccggctgcagttcgcagatggaatcctcggagagcaccaccatgccgagcgagcagatggtttcggggatgccgtggttgatttcggggtcgatgtggtagggacggccggcgagcacgatgcctcggcagttgtgctctttcatataggcgagcgcggtcaaaccttcctgctgcacgtcatgcttgaagaccttgtcttcggcataggcggccttgaccgcggtttcggcctcttcgcgggtcacgttggcccacgcaaactcttcgacgatgcggccaaccatgagctcatggttggcgaggttgaagtacgggtgcatgtagcgcacgccgtcctcacgcagctcaggaacgttggcgccgacgacgagcggatagttggccacaaccgggcagttgtaatgattgtccgtgttgggcacgaggttctcctcgtagctcacgcacgggtagaagatggtcttgatgcccttgttgatcagccacttgatatggccatgcaccagcttggccggatagcagatgttttcggaggcgatggattcgatgccagtctcgaacagctcgtgggagctgcggccggaaatcatcaccttgaagcccagcgtggtgagcagcgtgaaccagaacgggtagttctcgtacatgttgagggcgcgcgggatgccgatttcgccacgggtggcctttttatcggtgagcctgcggtaggcgaagcaacgcttgtacttgtagtcgtacaggttcgggcggtcggaacgcttctttttggcgtcgccgccgcgttcgcagcggttgccggtcacgaagcgcgagccgtcggagaatgtggtgatggtgagcttgcagtggttctggcacagcttgcacacgtcacgctcggcggtcatgctcatgttgtcgagcgcttcgccggtcagaatggagctggcggtgtgagtcacaccgtccacgacaacgacatgggcttcgggcttggccggctcggtcttcttgaaggctgcggccttgggctcggacttgggtgcgggctcggcctcggactgttcctcggacccatcggccttaaccaccacgtccaagtggtcggcctcatcctgatagtgcatgcgggcggtcagggcggcgccaaacgcgcccatgaggccggcgatgttcgggcgggtgacctgacgttcggtgagcagctcgaaggcgcgcagcacggcgtcgttgaggaacgtaccgccctggaccaccacagtgtcgccgagttcgccggaatcacgcaacttgatgaccttgtacagggcgttgcgcaccacggagtagcataggccggcagcgatgtcctcgatggaggcgccttccttctgcgcctgcttgaccgaggagttcatgaacacggtgcagcgcgaaccgaggtccaccggatgggtggaagccagagccttttgggtgaattcctgaatcgtcaggcccatggacatggcgaaggtctgcaggaacgagccgcagccggacgagcaggcttcgttgacggcgatcgagtcgatgacgccgtcagtgatggccagatatttcatatcctggccgccgatgtcgatcacggcggtgacgccggggctgaccatctccgcaccgcgatagtgggccatggtctccaccacgccctcgtccaggtgcaggccggtggtgatgaggccttcgccgtaaccggtggcgcaggagcgtgcgatccatgcgccttcgggcagctcggattggatcttcttgacgatgttgatggcggcggtcagcgggctgccttcgttgttggcgtagctggaccagacgatttcacggtcgtcattgacgagcgtggccttgatggtggtggaaccggcgtcgatgcccaggaagtgcgggccatgcgcgccttcgagggtgccgatgtggatgtgttccttgtggtggcgcttgttgaagtcctcgcggtcggcctcggtggggaacagcggcggcatggtgggcgtgttggagggcaggttcttcagctcgtccagacgcttcaggatctcatcgcaggtgtgggcctcgaaatggtggccctgatcgtcggaatccatgtcggcctgcaatgccgaaccgtaggccacatacaggtgggcgtcggtcggcacgatgaactcgtcgaccttgccttcaagggcacgctggaaagcggcgcgcagttcggacatgaagaacagcgggccaccgaggaagatgacggtaccgtggatcgggcggccagcagccaggccggcaatggtctgcgtggccactgcggtgaagatggaggcggcgagatcaggcttggccgcgccgtcgttgatcagcggctgcagatcggttttggcgaacacgccgcaacgcgaggcgatcggatacaggttctcgtagctcttggccatctcgttgaggcctgcggcgtcggtgtcaagcagcgtggacatctggtcgatgaacgcgccggtgccgcctgcgcacgaaccattcatacgctgctcgggcgtgggcttcaggtaggtgatcttggcgtcctcgccgccgagctcgatgatgacgtcggcctgcgggtattccttgtcgatcgcctcggtttcggcgatgacctcctgaatgaaaggcacatgcagattgtcagcaagcgccagaccgccggaaccggtgatagacaggcgaatcggctcatcgcctcgacctagttccacgagctctttacggatgtcgaccaacaggccggccacggtggcacgcacgttggcgtggtggcgtcggtaatcggagaagagggtgtctttcagggaatcggactgatcaagcaccacggccttgacggtggtggaaccgatgtccaatcccacacgcaggggcttcgggtgtgaagcgggctttacgctcgcgtcagtgacgatgtcaaccatgtgttcctcttaattccgacttccgggtatgtgcgccttcaggcatcatgagccgtttcgggacggctggcagatacctgcggacggcttcgcccggctacttcttctggaatattagtccgaccacctgcccaacgtgacgccgggcatggtgatttcgctcacgggaagggcgttccccaacagttccgacgatattgctgagtgcggcattccggacctgctactacgaggcctgttggccttcgccggcttcgcggtctctcaaatagatttcggggatatctcgttcttgatcgtggagcttggcccagatgaccggttcgccggcttctagggacttggacacatcgaggatgcgctggtttctggagccacggaattgcagcagcgagtccttctggtctttgaggtagcggccgtcgacgaggatgtcgataagatgcagcaattcaagcttgtctggtgtttctccgaggcgcatgagctcttcccatgtgtagccggtccacgaccagatatctttggtatgaccgaattcctggcggatacgttgtgcgagcggcaccagcacgggagtgttgaggaatggctcgccgccaaggaacgtaatgccttgcacccatggcgctttcaggtcttcgatgatcttgtcttcaagtttttgcgtgtattcgtggcctgcttggaagtcccagatggaggcgttgaagcagtcgacgcagtggaagggacacccggagacgtaaagggagttgcgcacgccttctccgtcggtgacgatgaaggttttgtagtcggcgatcatccgcttggacatgcgccggccatcccattgaccggctttcggatcgttggcaagaccgttggagggtacggaggggccacgcccggtctcgctggccgcaaagtcatggcgcttgggttcgggcttggtcgtatgcaactccggcatgattccctccttgcggaaagcattagctcccctctttgagggggagctgtcgtcgtaggcgactgaggggagcttcggaatagctcttcggactcccctcagtcagctttgctgacagctcccctcagagaggggagcctactcacgaataaccctacttggcctcttcgaaccactcgcgggtggtgccgtcatccagcgtcacacgaccggtttcgccgctcatgtgcttgactcggtgggcgatctcctcgtgacggccgtgcaccatcgggcgctggaccgggctgccgaggtagccgcaggtgcgcttggtgacgttgcacttgtccgggttggagttaccgcactccgggcacttgaagccttcctcggtcggctcgaagtcgccctggaagccgcacacgaagcagtggtcgatcggggtgttggtgcccaggtagccgatgccgatgttgtaggcgtaatcccacacggcttcgagcgccttcgggttgtcctgcaggcacgggtactcgcagtagttgatgaagccgccggaagcgtagtacgggaagtccttctcgtagctgagcttctccatcggggtgggctgcaaccacaccgggtagtggaaggagttggtgtagaagtcgtggtcagtcacgccttcgatacggccgaacttttcacggtccatgcggttgaagcggtcggtcagggattcagccggagtggagtacacggaatagtggtagccctccgctttgctccactgcttgcacagctcgttcatgcgcttgacgatggacagcgcgaactccttgccttccggatcccagccgtggtcgcgaatccagttcttgccgtagaagaccgcggtggtctcggcaaggccgatgtagccgagcgacacggtggcacgctcgttcttgaacagctggtccacgttgtcgttggcaccgagacgaccgaacgcaccgaagcggaacagggtcggggcgttgaccggggtggcttccttgcagcgcatgatgcggaactggagggcctgatgggcgacttccatacgctcctcgaacagcttccagaagcgagccttgtcaccgtgggattcgatggcgatacgcggcacattgacggtgaccacgccgaggttcatacggccatcctcctcgtccttgccggtctccgggttgatccaaccctgcaggaaggagcggcaacccatcggagccttgaaggagcctgtgatcttgacgatgttctcgtagaacaccacatccgggtacatgcgcttggtggcggactcgagggcgagctgcttcaaatcgtagttcgggtcacccgggtcggcgttcacgccgtgctgcacagtaaagacgagcttcgggaagatggcggtgtggtgttccttgccgaggccacgaatacggttcagcaggatcgcgcgctgcacctcgcgggagaaccagtcggtgccgagaccaaagccgacagtcacgaacggggtctggccgttggacacacggttggagttgatctggtattccatggtctgcatggcatcatagatggccttgcgggtacgaatcttggcgaggatttcacgctcctgctcaagttcgtcaacgtcggtgtggaacggggtgtccatcggcagcggttcgcgggaaccgaaatgcagcttggcgggctcgttcctcttggcgctctcgacctgacgacgggcgaattcaaccggcatgccgtcggggatggtctcacgagcttcctcgaggaacttctcgtaatccttcttggcatactgggcaagatgctcgtcggcacggttggcggtctggccaccatactggctggaggccacgtccttcatgatctgggtaatctgggtggccgcaatggcgatggacttcggggaagccatcggagcgttgccaagagtgaagccattggccaacatgtcccagaagttcggcaaggagcagttggactgggcagtgaacggcgagtagtcggcatcgtggaagtgaatgtcgcccttcatgtgggcgttggacaccgccggcggcagcatgttgaacgcggcggccttggacacggcaccggccagcagatcacgctgggtggagtagacgttggaatccttgttcgcgttctcgtgaatcagggtcgggtcgtggttgatgaagcgggaaacggcctcgttgacatcagtggccttggcacgctgaatgtccttgtcgagacggtagttggtgtaggcgcgagccacatcgtacaggtgggcgtcaatgagggcgtgctccacgaggttctggatgtcctcgatcttggcggggccggcgtaacgccccttgatttcgccttcgacttggttggcgaaaccacggatcatggcatcttcttcggggccgacttccttgttcaggtcaccgaaagcagacttgaccgcagagatgatgttaatggggtcgaagtcgaccacacgaccatcacgcttctcaacgagcacggtggaggccttggcggccaccttggtctcgttatcggtgacgatttcctccaacacctgtgcgcccatcgggcacccctttcctataaggcgaacactctcctgagttccgcattttggccgcactcgacgtgggccacacgaaattacattgatgtcgttttttgaacctctagaagaatacggcatccccaccactatatctagtgctcaacagtggtgtgtcgaactatttatagggttttcggctattttccgccaaaaccacaagtgtgtgattagcgtaactgttttctgctcgcgtgtcgcacagcgagctcactaacgactctcaatcgtcagcgcaacgcatatctcactcctcttcatagcacccgtttcttcgccataatgactcctttcttctgatgcaccagaccatctccatcatcggctgatacatcgcttcgtacggttctcgcattcatcatcacaccgttttcaggcgacggtaaatatttaccgtcatcaaccaacgcacttatagtggagtgcatgactactgcaatgggctacccatctaccggccgtccaccgaccgccgcttcactggcctcggctggctttgagccgggtcaaggcactttcgcgcctgatcagggcaccatcaatctgccgaatgagcctcgccctatcgatcagctgcctgcacgcgccgctgaaaccagcgcgcaaaatccgtggccggtaagtgtgctgagccagaagttctacggtgccgtggaacgatggccgtccgcgtgggtcaccggccagatcacgcagatcaatacccgtcgcgccggctcggcctacatcacgctgcgcgacgacttcgaggatatcgccatggaagtcaatggcttcggcaggttcgcggccgcggccagccagttcgttcagggcgaccgcgtggtgattcatggcaaaccgaacctgtggatgaagcgcacttcgctgtcgttgcgcggggacacgattctcaaggtcggagccggtggcagcctcaaggccatgatcgacgaattgcgcaagcagcttaagggcgagggcctgttcgatgccgatcacaaactgcctctcccggagtttccgaagactattggcctgatttgcgcacctcaggcacgtgcggaaggcgatgtgatcaccaatgtgaaccttcgttggccttccgtaaccttcaaggtggtccatgtgcatgttcagggcgagcaatgcccggccgaagtggttcaggccattgcacaactcgatgccgacccgagcgtggatgtgatcatcgtggcccgtggcggcggctcgtttgaggatctcatcggtttctcggatgagcgtgtggttcgtgcggcgtatgcctgcaccacaccattaatctcctccatcgggcatgaggatgactggacgttgctggatctggtcgccgatcttagagcctccacccccaccgatgcggccaagcgcgtggtgccggatgtgcgtgagcagtcgcagctcatcgaaggtgccatcgaccgtatgcgactgcgggtccgttcgcgcgtggagaacgagattcgacttatcgagggatatgcgaaccgcccgagcctgacccaaccgcataccatgctcgaaccgcatcagcggctgatcgacgattccctgcagcggcttgacatcggcctgcgacgcatcgtggacgatgcccagctcaccgtcgagcgagctcacgcctcactgaccgcactcagcccgcaatccacattgaatcgaggctatgcggtggtgcagtcctccgatggccatgtgctggatgacgcttcgcgggtcagtaccggggatgacatcaccgtcaccctgaaaaagggcgtcattaccgccaccgccacatccgcaaccgcaaccgcgtaatgcaccatatgcattcacgcatatataccgtatatataaggagaacaagatgaccgagaacaccacacccaccgacaagaacacccccgcctcgtccctgacggacaaggaacgcgagctcatcgcccagatgtcatatgaggaggcgcgcgacaagctgattcaggctgtccaggcactggaaaccggcggcctcaatcttgaccagtcgatgcgtcaatgggaaatcggcgaggccttggccaagcgcgcccagggcctgctcaacgacgtacgagccaagctcgaccaggcacaagccgagcaagccgccaacgaagccaccgcaggcacgcagtccaacctcgactgagttgcctcccggcgcggcatcatcgtgcaagcttgcggatgatgccgatgcgctcctgcatggcggagcagatggcgtcaatcacatcagcggacagccggcggttggtggcgagctgtgcccgtatcagttcaggcacctcgtcgagcatccccaaatcataacggtcccaatcgtcgataagtcccaactgccagtaggcgttgtccgcatcgccgtagtcgtcgacccagaacggcttcgccgggtagtcttcgttggtgatggcttcggggtccatgccgttccacaggctggcgccgctgtcaaaaatcggggccgggcgaatctcgaatgattcgacgtcacggatgagaccgaagttgttgtaatgccggtcggtgttgcgcagaagaaaatcaaggaacagaaaatcgttggtcgccgcatttgccgtatcatgacttacgccgagttgctgacatgcgtccagccatatcatcttgcgttcggtgttgtcgccgcgtcggaagatgcgcataacctgccctgcgggaatcagctcttgcgtgtcttcgagcatttcatcgcagacggagacccggatgcccttggcgcggccgatgcggtattcgacatggtcgatgccgaacagtcgtgccgtatgccaggcgatgcgctcgttgtccggctcctgaccggtgcgccctcccttgatcaggctgcggacgccatcgggaccgataatccaacgtttcggcaggtcaccggcactggtgacatccggggtgttcacgttgccgatgcgcgacgaattaccgaagaataaggcctgcccaagtcgttcgtcaaaatcgttgtggaaaaagttcagtttttcccacgtcagatcgggccggtcgagaggccgcacccaatactggtccgacaggctgagtcccaaggaacggtccagcagatcgttcgtcgaagcgatacccgaaccggcaaatacggaacgcataccgtcacgggtcatgggaatgccgcgagaacgccaccacccggtaatcgactcaccggtgggctcaggtttgccgtccacatacatgccgatcgggattcgggactcgtcgtagatctcccctgccctcagggcgtatccgccgcgttcgaaatactcgaactccattaccggatgggtacggcacatcagcatgcggttcatggtcatgtgcgcctcccgttattcagtccaccgacgatatccgcgtcatatcccatcctatccgctttaggactcgtatatgcggcccactgaagcttcagcgccaaatcatcagtcagcatcctttcccgcgtcaattactcatccgcggcatcccgcggctcgcacctgaatccggactggactgagttccgcttcccggcatacgatagtggtgattaggccacattggtagcagttatagaagggaaatcccatgtcaacgctgattcttgtattccatccgcacctgaaggacggctcgcgagtgaacgcccgtctgcttgccgaactcgccgcacaaggcgaggacgacatcatcgtacacgacgaatacgccgaatatccgaacttctccgtcaacgccgacaaggagcacgagctactggaggccgccgaccgcgtaatcctccagttcccgttctactggtactcctcccccgcgctgctcaaggaatgggaagacgaggtcatcaccgcaggctgggcctacggtggaggccacgcactcaagggcaaggagctcaagctggtggtcaccactggttccgacgccgccaagtaccgcaaggatggcgagtacagccacaccatggaggagctgctgagcccgtttgaggtcgtggcgtacaagatcggcatgaactatgctgagccgttcctggtgcagggcaccgccaccatcggcgatgcggagctggatcaggccgccgccgattatgtttcggcgattttggactgaataagctgaggccgggtgcaagtcgcacccggccttgttgtttcgcgggctagccgcggtctctcccagtcagcctgcggctgacagctccctcgtcagagagagcttattttttggatcagagggagttgatagctacttcttcaacggcacgtagatcacgtcgtcaatgagctcgcgatagtgctcaacgatttgcgcgcgacgggtcttcaggctcggggtcagcatgccgttggcctcggtgaattcgtctggcagaatctcgaacttacgaatcgactcggcgcgggaaacgccctcgttggcggcgttcaccgcacgctctacctcggcatgaatgatggcgttcttggccagcgaggccagatcgggttccggtttggcgccctgggattccaaccagttgttggcatccgccagatccagcgtgaccagagcggccacgaacggcttcttatcgccaataaccaagcactgattaaccacgggcgaggtcatcacggaagcctcaagcagacccggcgacacgttcttgccgccggcggtgatgatgaggtccttcttacggccagtgatggaaatgaatccgtcttcggagatatcgcccaaatcaccggtgtgcagccagccatcggtgatctgctgggtggtgacctcagggttgttgtggtaccccttgcacaccagcggtcccttgatcaccagctcgccatcctcggcgatgccggcggtgatgccgcacatcggcatgccgatggtgccgatgcgattgtcttccggcaagctcacgcacaccggaccacaggtttccgtcatgccgtagccttccagcaccggcatgccgatgccgttgaagaagtgggagagctcggaatccatcggggctccaccggtgacggcaaagtcggcgttcgggccaaagatggtacgaatcttcttgtacaccacctgctcgtagaaagcgtgagcaatacgaccgggaagcggcagcttctcgcccttctgctcggccttggaccattcgcgcgcgttttcggcggcgcgcatgaacatcttgcccgcaaaaccgctgccggcacgctgggaggcggcgttgtagaccttttcgtacacacgcggcacggcaagcagcagcgtggggccgaaggtctcgaagtccttgaccatggtcttcatattggagctcagggccagagaaatggtgccgccaaaactgaagaattccaggaatcgggcgaacacatggctcaggggcaggaacagcagcagacggcggttgggccatgcgccggcacgaggcatgtactgcaggccggagcgcaccaggaacgcgaagttgcggtgggtgagctccacgcctttcggggtgccggtggagccggacgtgtaaacgatggtggcgcggtcgtcgccgtgggaggcgctcttgtattcccagaattcggcatcggtgacgctttcgccataggtcttgatggcgttcaggccgcctgcttcgatgacgaacacgttgcgcagggtgggcacctcgctgcgcacggattcaatcttgtcgcgctgaccgtcatcctcggcgatggcgagcgtgaccttggaatcgttgaaaatccagctgacctggctggcggagttggtctcatataccggcacggtgagtgcgccgatggacatgatcgccatatccagagcggtccactcccaacgcgtgcgagacacgatggccacggagtcgcccttgttgatgcccagaccaatcaggcctttggccagatcgatgaccatgtcacggaagacctgggcgctgtacggctgccaggtgccatcctcagttttatattcgatcatggcgccatcgggatcgcgcttggctcgctcatcgagcagatcgaacaggttgatgtcgctgtcgatcggctccttgacgggattggtgaactgcttgacgatacgagtatcgtttatggccttatcagcgatgttttcagtcatactccccatgtaactccacggatgctacaaaacacgcgcgaaacaacggattgtccagaccaaatggccccggcaatccgttatttcgggcaaaccaggtaaatctgtcgcaccgtacattcggcagattactcggcggagttattggcctttttcagctcgtcgcgaatctcctgcagcgtggcgagagtctgctcttcaacgctaggcccctgttcttcagcgtcagcctcatcctgggcagcagtgagatcacgaagcttattaatcggcaaaatcacgcagaaatacaccgccacgccaacaagcaggaagctaatcagcgcgttaagaatcgcaccaaatgaaacagtcgagttgttgaacgtgatggtcagcagtccggaaagatccggtacgccgccaatcatgccgattaatgggctgatgagattgtctacgatggaattgaccacagcggtaacggcagagcccatcaccacacctaccgccatatcaatcatcgatccgcgcgacaggaatttcttaaagccattcaacggacctttatcggtcaaagcaacaactttgcgagcggttcctcccgtggccttggcaaagtcggcggcaatattcatgggattgtggctactcacaacggcactccttacgaaattcggacacttcacttgtatccgactggttttcccacgactccattatgccgcttgttggaatatccctataccactgcggcgttcccgtacatgactatgtacgagaacgccgccaaccctgcttgcagagaacctgttagagctgcttagaactgaatgtaatcgacttccgtatgttcgccggtttccaagtatttcgccacatcatcaggaccggcgaaaaccagttcgaccgcttgcgcaatcatcagattgacacgatccattggcgtaaggttttcgaaatagccgtacacc

SEQ ID NO: 3976 - DNA, 4597 bp, Unknown
  R22_24m  MAG No. k141_35118
caacaactacccggtttccgtggacgttgccttccaggtcgctttcgcgatgattaccgtcggcctgatctgcggcgccatcgccgagcgtgtgaagtacagcacctggatgatcttcgtggcgctgtgggttaccttcgactacgctcctatggcccacatggtctggaacggtggtctgctgtctgctgacggcgccatctccaaggccatcggcgcggccgcccacgatttcgcaggtggtaccgtggtgcacatcaacgccgcagtcgccgccctgattatcgtgctcatcatcggcaagcgtaagggcttcggcacgcagccgttccgcccgcacaacgtgccgttcgtgatgctcggcgccttcctgctgtggttcggctggttcggcttcaacgctggttccgccttcgccgccaacggcaccgctggctacgcttgggtctccacttccgccgccactgccgctgccatgctctcctggggcttcaccgagaagattcgctccggccactacaccgctatgggtgccgcctcgggtatggtcgccggtctggttgccatcaccccggccgccgatgtggtttccccgctgtgggccatcgtgatgggtgccatcgctggtgttctgacctgcctggcctgcggtctcaagttcaagttcggctacgatgactccctcgacgtcgtcggcgtgcatggcgttggtggtttcaccggtactgtcctcgtcggcttcttcggcgaaggcaccggcctgctggctggcggcgactggaagcagctcgtcgttcagctggtcatcgctctcgtcgccatcctctactccgcggtgatcaccgcgatcatcgccttcgctctggagaagaccatcggttggcgcgtcaccgaagctcaggaagtcggcggcatcgatcttgccgaccagggcgaacgtgcttacgattttgctggtactgccagctctgttctcaaggaggtgaggtgagatgaagctcatcaccgctatcatccagccccataagctcgacgacgtcaaggaggccctcgcggccgccggagtgcacggtctgaccgtgtccgaggccaacggctacggccgtcagcgcggccacaccgaggtctaccgtggcgctgagtacaccgtggacctgattccgaagattcgcgttgaagtgctgtccgatgacgcggatgccgagacgctggtcggtgtgatcatcaagtccgccggcaccggcaccatcggtgacggcaaggtgtgggtcgctccgctggactccgtggcccgcgtgcgtaccggtgagaccggttccgccgcgatctgataacacagacgtccatgcctagaaggggatggactgcatgggaaaggtccccgcacgccgcgaattgacgccgtgcggggacctttttggcaatgaaagatgaagcaatgacttcagcagtagatggcttgaaacaacgattcatggatatgagccagccggatgacgatggtgtctaccggaatggtgcgaccaagcgtaaagcccgcacggaactggccatgcaatgcctcacggagctgtggaatgcggcctgcaaggatgtctctttccccgtgcccgactccggcatcggcttcgccgcggtaggctcgctggcacgtggtcaactgggccccagctccgacctcgacttggtcatcatctacgagcctcgcacgttgaacgaccagcagctcaacgagttggccaacaaactctggtacccgctatgggacagcggtctggacctcgaccactccatccgcacgcgcgcccaatgcgaggaagtcaccgaccatgaccttcccgccgccatgggctggctggacgtgaagcccatcgccggcgacactgctctgattaccaccaccgccacatccatcctcgaacgctggcgcaaggccgcccgcaagcgcctgcccgaactgctcgactccgccaaagcccgactcgacgaattcggccgcctccaatacgtcaatcagcccgacatcaaggagacccgtgggggtttgcgcgattcggtgctcgtctccgcgctcgccgtctcatggctggccgaccgcccgcacggcatctacgacgaagccgtggaacgtctgctcgacgtacgcgactgcatccatctggtggccggcaaggataccaacctgatgctgacgccctatcaggccaaagtggctgccatgcttggccttgccgatccgacttggcccgaaaacgagcgtgccgcctactcgatcgacgatttgcagacgctgcttgcccgtatcggccggcgcatctccttctcgcttgattccaccgcatcccgcgctggacattcgctgacccacgaaaagccgcgattcgcgttcttccagatgttctctcagcgctctggcggcaagcgtgaagccccgcaattcgacgtggtggctcccggcgtggccaagcacgaaggcgaattggtgttggcacccggtgccgagcctgccaaggatgccaagctggcgttgcgtatggccgtggcggccggcgaattcggtttgcccatcaatccgtctaccttggttaatctgaagcactgcccgattcacgacaaccagtgggatgacgaatcgcgcgagctgtttattcgcctgcttgcatgcgggccgaatcttatggaagtgtgggagagcatcgacttcgtggacattccgggtcgatggatgccggaatggctcggcgtccgcaaccgtccgtccgcctcggccgcccaccggtacaccatcgatcggcatatggtggaggtcacgtcgcgtctgggtcgtgagacaccgtccgggggacggtatgatgacgatcatttcaaggcgttgctgttggccggtattacccatgacatcggcaagcgcgcgttcgtggccgatcacgccgccgagggtgcccgccatgtgccggtgattctcaagcgtatgggctacgcgccggacatcgtcgactgggccaccgtgctggtgcgtgagcatttgaccctatccgaatttgccacgggtaaggacccctatgatccggccgtggcggaggagttggccgaccgcttgcaccacgacaagatgctgttggatatgctgttcgacctgacccgggccgacggctcctcgctcggtgccaccgccggtgagaccatcaccaagcaatacggctggtccaagtggcgcgaacaaatcgtgcgcggcatgtattccgccgctcgcgccgcgatgtaaacggaatcgcccagcacttcgcgcggccgatacctacttcatccatgcgtccgagcgcacgcgcagcccgttggacaggccgcgcccgcccatgagcaccacgttgaacgcggcccagagcacggcggtacgcatcaggtcgctcgtcagcgccggcgtcaccatattggccagtatgagtatgagcgtcacatacaccacggcggtcagcgtgcaggtgcctgccagatagcggtagtcgcgcgcgccgataagaatgccgtcgattgccatcatccagccttgcagtgggaagaagatgcccatcgtcaccatgccaacggcaatcaacgtctgaatatttggcgtaggggagaagaagtgcccggcgaacaggccgactaccgcaaaagccgtgccgattaccgcgccggtgaccagccccgcacgcccggtcgcccgcgtcaaccgccgcgcctgctgcacgctgccagcgcccagcgttgtggccaccagcgtctggccggcgatgcccacggaatccagcatgttcatcgcaaaattccaagaggagttcacggcctgaaacccggccaacacggcagtacccatgcgcgcggcacaggcgaccgtagccaccatggccgcacgaatcgccaatgtacgaatgaacaatggcagtccgtcgcccccggctgccgcaataccggccaaacgaggccgcagactcgcaccgtccgcccgggaccacagaatggcggggattaccaggaacagccccatgaaccactgagctatcagcgtcgccactccggagccggcaatgccccaattcagcacaataacgaacaacacatcaagcgccgtgttcaccaccgcgccgcccaccgcagcgatcagcgtgatacgaaccttctgcaatcctcggaaaatgccgttcgccgcatataccatcagcatgcctggcgcacccagcacgattgcgcgcgtataggtcacggcttgttccaatacttcgccctgaccgcccagtgcccggcataatggctcggcagccgcgaacaatcccaatcccagtacggtgccgatgctcaaggccagccacaggccgtcaatgcctgcctgcagtccctcgcgacgacgacccgctcccagcagatgcgccacctgcgcagtggtcgagtaggccaggaatatgcatagtccgactgccgtgaggatgatggtggagccgattgacaggccggccaacgccgcatccccgatatggccgacgatggctgtgtcgataaggatgaaggtcggttcggcgatgagctggccgaaggtcggcagggccagcgccatgatccg

SEQ ID NO: 3977 - DNA, 9691 bp, Unknown
  R22_24m  MAG No. k141_35812
ggcttgccttcggcgaatcggcgattgccttggagcatacggctccacgtcgcatttgcggtcgattcctgttcaacgtctgcctgagccatgaaaacctccattatcagcggactgctggtacccatagtagcgattggaagtgcggattcgcgactgcatgcataatctggctttgcccaaagcataatgagaacgctcacaatctcaatcctgtttaagggtgggccgtgatgatagtcagcacaagggctgtggctggtgtgataaggctcatatgttctgtccgtgcgagccctgtgccgccacactacgatgggttctggtaatcgcctgaagaatcctgaaaggaccgaaaatgactcttctgcagcatgaactgaccgatttcaaggtgaacgcattccagaacaacgagttccacgaagtgaccaaggacgatgtgctcggccactggtccctgttcttcttctacccggccgacttcaccttcgtgtgccccaccgagcttgaagacctggccaagaactacgccaagttcaaggaaatcggctgcgagatctactccgtctcctgcgacacccacttcgtgcacaaggcctggcacgacgccaacgagaagatcgccaagatcgagtacccgatgcttgccgacccgaccgccctgctggccaaggacctcgacacctacaacgaggccgatggcgtggccgagcgtggcgacttcatcgtgagccccgagggcaaggtcgtggcctacgaggtcatctcctccaacgtgggccgcaacgccgaagagctgctgcgccgcgtgcaggcctcccagttcgtccacgagcacggcgaccaggtctgccccgccaactggacccctggcgaggaaaccatcgagcccagcctcgacctcgtcggccagctgtgatcgacactgaataggcggtaaccttggctcccctctctgaggggagctgtcgctgaaagcgactggggggagtgctcgcgagagctagcctgatccgatatgctcccctcagtctcactacgacagctcccctcagagaggggagccagtgtatgtaagggagttttcatgactcagaccaacaatctctatgacgtcgtcgtcattggtggcgggccggctggcctgacggccggcctgtacctggcccgcgcccgctaccgcgtgctgattctcgaaaaggacgatttcggcggccagatcaccatcaccaacgaagtcgtcaactatccgggcgtgggccgcaccacgggccgcgcactcacccagaccatgcgccagcaggctcaggacttcggtgccgaattcctctccgccgaagccaccggtctcgacgtggatggtgacatcaaaaccgtgcacacctcacgcggcgacctcaagaccttcggcatcctcatcgccaccggcgccagcccgcgcaagctgggcttcgagggcgaggccgagtacgccggccgcggcgtggcctactgcgccacctgcgacggcgagttcttcaccggcaaggaagtactggtggtcggcggcggattcgccgcagccgaggaatccgtgttcctgaccaaatacgcctccaaagtcaccgtgctcgtgcgcgaaccggacttcacctgcgatgccgcagtggccgccgaagccaagaacaacccgaagatcgacgtgcgttatcaggtcgagctgaagggcgtcaccgccggccaaggaggcctgcgagaagcctcgatcctgaaccttgccaccggccagaccgaaacgtggaagcccgccgacgccggcaccttcggcgtcttcgtgttcgccggctatgtgcccgccaccgatttggtgcgcggcgtggtagagctcgacgaccacggttacgtggtcacgcacgactacctcagaacctcggtgccgggcgtgtacgcggccggcgatctgcgcgtcaagaacctgcgccaagtggtcaccgccaccgccgacggtgcgattgccgccgtggaactggagcgttacgccaagcagatgagcgagaaaaccggcttggtgccgccgcgtcccactgcttccgcttatgaggagtccgaggccaaggccgcctccgccgcctcggccgctggcacgacgcccgccccggctcccgccaaacgcagcgccgatgccgatgccgcagccagcgccgccaagaagcccggcgaactgttctccgccgccgtcaagcagcagcttggcgtggtcttcggacgcatgacccgcccggtcacgctcgctctcgagctggacggcactccgctttcggcggaattgcagggtttcatcggcgagatggtcgcgttgtcgaatggcaagctgaactcggttgccgttgatgccgcagggctgatcacggcggtggatggtgcttctgtgcctacttctttggtggttggcgagccattggccgtcaccttgccggacggcaccgaactgcccacttatggttcgttggacgattccggccgtgccacgttcgacgtcgccggcgtcctgccgctcgcccgtccgactgtgcgcatctgcgtgccggctgagggcgacggcaaggccggcaaggacggcaatggttcactggtcttcaccggtctggccttccacggcgtaccttccggccacgagttcaactcgttcgtgcttggcctgtacaacgcggccggtcccggccagccgctgggcgatgacctggtcgaacgcgcgaagtccatcacggacccgctgaacatcatgatcctcgtctcgctcacctgcacgatgtgcccggaaaccgtgcttgcttcccagcgcattgcctccctgagcccggccgtgcgcgccgaagcctacgacgtctcgcacttccccgaactcaaggaccagtacggcgcgatgagcgtgccctgcatcgtcatcacccacgccgacggcacccagcaagtcgaattcggcaaaaagagcatcccccaaatgctcgaactggtcggcgcgtaagccgcacgacctcaggtactcaacagcaacaacaacgattctgccaaaatcgtgacgtacatcgattgatgcgatcgatgcgcccgactccggcagaatcgttgttttgcggcagctcagcctcggtcttcgacggccttcgtgacgtttctgtcgccgaggtacttgaccaggctgatgctgatcagggccacgacgaacaggccggtgagcaccgggatgagtgcggcgtagcggtgggcctgatcaggcgcatgggcaactacgaacgaggccaactggttgccggacagaccggcgaacgcccaggcgctcagcgtcagaccgtgcgtggtggagacggttttggtgccgaagtgctgatcaagcagcacgggcagcgtcgagaaaccgccaccatagcccgcgttgacgaggaacagcatggccagcacggcccacagcagagcgttgtcgatgctgttggtgaagatctgcagcaagcacacggcaatcgacatgatgaagattacctgatagacggtctcgcggcgcttcaggtggtcggagagtgtggagaagcccacgcggccagctgtgttgaacacggagtccacggcgagcaccagtccgatgatgccggagatggcggcggcaaacttggcggggctcaggttggcatactgcgggaaggccctgagcacatcgtgcaggatgtccttctcttggctgatgagggccaggccgcaggtgatgttgatatagaaggctatccagatgccccagaacacgggcttcttgaggattgtcttgcggctgacgtgtgaggtcgcgggatcgtacacccagccggccggacgcttgatgagcaggaagccgacgaacatcatcaccgcgtagaccgcggcgaggatgaagaacatgctgaccaggccaaccgtgccgatgagatattccatcagtgggctggcaatggccttggccaggccgaagccggcgacggcgatgccggtggcgaggcccttgttgtcggcgaaccaaagcatcaggttcttgaccggagtcagataaccgacgcccaggccgatgcccatgatcgcgccataacagatgaacacgcccggcaggaagttcagggcgatgctcacgcccgtgccggcgaagccgaccacgaagcagaccatggagacgagtgcggatttcttgatgtttttctccaccattggcccggcaaacgcggcggacatgccgaggaagaagatggcgagtgagaagccccattccacggaggcggggctggcgtggagacggtcagcgataagctgcttgaacacgctccagcaatagacggtaccgattgggatgtgaatcagcagtgcgggaataatcgcgctggtccaacgattctcggtaaaccttgccatatatggacggatcctttcgtaactggtgtacgatgacctgccgacccgaacgagagtcgcatcgcccatatccacgcacatcacgacggcatgcccccgtgaaccatccgggctgcacgaatcgaatcaaatcgaatcgtgcgaactgcgaacaattcgctaaacatccttggtgtgcatttcatcggcgctgctggctcttgtcgacgccgacaaacagaactataacgctgttatggggttgctgtggctggtttctgtggtcggaagctatgagctttctcacatcgaaaacagttatatgacggtatcggcgtgattgatacgtgacgtctgcccgtggacgcggcatatccctctcggaaaacaatgactccgtcatgtccatttcttggtttgacatgttttcgtttgcagcgtcggtgctcaccacggtgaccgcggcgttcgagtcgccgggcagggcctcgaccgagggtctcatcctcggctgagatgtgggcggtactatggattcttatcgataaggttcgtgatatgcggagatggtaacgatggtgaccttaaaggatgtcggcgaactggccggagtgaccgccaccaccgcctccgcggccctgcgaggcaaggattacgtcaagcccgaaaccacgcaacgcgtgtgtgacgccgcccgcaaactcggctacaaaatcaacctgtctggccggtccctgcgttctgggcggtccgataccatcaccttccttacctcgggcctcgagggcgactatttctcccatctggccatgtgtgtggctgaggaagtgcacaagcgcgactcgcacatgctcatcgaactgtcccggtatcttaccgacgacaacgatctgtcgtacacgttttcggacggcatcatcgccatcaatgcgccacgtgcggtcgatatcctgaagcggcacccggccgtcatgctggaaaactacgacaccagcctgcccatcgacaccgtgaacgcgccgagcgacgccggctcgcgggcggcaatcgaacaccttatcgcgcgtggctgtgcgcgcatcggcatcgtcggcgacaatcacgatcccaacaatcccaacatcattcccggctcgcgtgatattcgtatgcgggccgccaaggagacgattctcgcggccggactgccgtttgacgagcgccgtgatttcatcaaatcctcgtggtcgattgacggcggtatcgaggccgggcgcggcttggccaagaaaggcaagtgcaagtacgacggtctgtactgcctgaacgacggtattgcgctcggtattctgcgtggtctggcggacgatggcgtaagtgtgccgggcgatgtgcgcgttatcggcttcgacggcctgagccagagcatgtacagcgtgccgactttgaccaccgtggccaccgatttcaagggcatggcggataccgcgctgaccttgcttatgcggcgtatcgagaacctggacgacgagttcttcccgcagaccgtgaatgtgggctataagctcatcgagcgcgaatccactgcggcgtagagtctttggccgtgttgagcttcaattgggtgattggactggcaccagcggctgatatcagatatgccgaaagcagcgatgatcggatttaagttgctggagatgacaggatggattgctctttacccctttcaccatcttgcaataattcttacatgtaagaactctctgttaacatgtaagaattattgcaagatggtgaaaggggatgctcatgttgccggccaaagaaagtttgacggttgagttcaagagtgagcagaagcgccctcaatcgcatgatgaaattgttgacaacgtagtggctctagccaataccgcaggcggcacactgtatctcggtattgaagacgatggcactgtgaccggcgtatgtgacgagcatcgcaatatcaatggacttgcggtactaattttcaataagactgttccgcagcttcccgctcgcgtggcgctcttgtatgagaacgaggtgccgatagtcagtattgaggtggataacagtcagcaaatcgtatctaccagtcaggggaagacattgcagcgccggctgaaagcagacggctcgcctgaggtcgttccgctgtttgtttcccaattcattagccgtttatctcagcaacggttctacgatttcagcgcgcaacctgcaccagaggctcggttggacgatttgaatccagactcacggaacaagttgagaagccatattcgcagtgccaatgcgcaaaactcgttgttgtcttttactgatgaggatttcgatcgggcacttgagctggttgttgatggcccgtatggattgcagccatctgttgctggtctgctcaccattggttcggttgatgctattcatcgatcggttccagccgcatcggctgtttttcaagtgatgaaaggcatgtctccaaaggtcaatatggatccgttcgtgttgcctttggtggatatgtttgatcgtgtaggcgagctgatggagccatggaatcccagccacgaagtcatgagcggcttgattcgtgtcgatctgccagacttcgatcgaggggcattccgtgaggcaatgattaacgctttttgccatcgcgattatgcacgaatgggttcggtgagattcctggttgatgatgatgggttgaccatagctaatcccggaggattcatagagggtgtttccgaagataacctgcttactgcacaaccgcgttcccgcaatccgcagcttgccctgattctgaaagctgccggatatgttgaacgcaccggacgaggcgtggataccatctatgccgggtcggttgcggcgggcggttctttcccggattattcacagtccagtgctgaggaagttatcttgttcttgcgccgtgtggtacctgacgaggcattcgtgaccatgattggcgacgaggaacgtcgacgtggggctccattgccggtctggtcactgattgtgctctcgctgctgcgtgagcatcgtaggcttaccgtggtccaattgtgcgatttttctcatttggagcatcgacgcatcgtgtccgctgttgagaatctggtggaagctggtttggtagagggggtcggtagcgggagctctcgttcgtatatgctgagtgcccgagtgtataaacgttcagaggggctggcgtcttacgtgcgccagcgtgacatcgatgccacccggcgcagtggccttgttctggagttcgccgaaaaaaatgatggtgtcgtcactacggcggatgtcatggatttgtttggcctgagctatatcagtgcataccggttgttgaagaagctagaggatgcgggcaagttgcgccgcgaggggaatgggccgtcatcccgatacgtgttgggatgattggcgcgcgtgaaagtaagttctttcatcacctttcaataattctttcatgtaagaactctctgtttacatgtaagaattattgcaagatggtgaaagatgcacacaaaacggggaagccccgctcacatcgagcggggcttccccatatgcgctggtgtgtagatcagcctgtgttctgcaggccggcagcaacgccggagacggtgcacaggatgaggtagatgaatcctgcctgctggctttgcgtgttttgcttcaatttttcttaagcagagtgagacccatcgtatcgttcgattctacgacgaacgttttgcatcaagcgcagataatgtggtgagtgcatattcaacaatggcggacggtcttgatgcacttggtttgacaaatattggaatgagcgaaagcatcctaaaaaaggctgccggtacagacaagcttcctgataagcaggaagctgaagtgagtgctcgggcgttcgctgcattcattgatcagccaagacggtagctcgcataatgcattatgtgtgggcagatgtgtcgtctgcccacacattcgctgttgtgctttcgatttggaattcctctgccagatacggggaaacttctaaaaggccgctatgccgaggaagagtcctgtaataccggtggccatcaatacgatgatggtgatgattccggcgaagatgcgtacaggaagggtttcttttccatggtttgatgggctgtccgcaactaatctcattactccagctgtaacccagcaaactgcgcccaggactagtgccaggaattctcgacaccattccgtttcaagtgcgggaatgccgacgattgatgacgggtcgcttgccagtcttggcggaatagcgcataggatacgctccaatatcaggtaaggggtatcaaaatggatcagagtcaaagcgaatgggagctgtagcgccagtcctatccaccacagcgtgcgtcggatggtcgcgagtctgtcgcccggcctagtgtccggcttgccgccttcgccctccgtcccggcaccgtccgcgggcgtgtggtccccctcgtgcgcgtccgtcgttccgtccgtgtccttctcctcattcatatgtcccctttcgatcatccgagtctgtcactcggccagcgcgcccgttctatgcgcgccgtcgccggccagtctagggccgtgcgacgcgaacggggaggcccgcgtcgcttatcggcacggaacctccccgctcgcttttgtcgatcggtcggccgggaatcagcccgtgttctgcaggccggcggcgacacccgagcaggagtgtcacaaagcccctgccgctctgggtacccaggtggcggtttatgaggacagcatcggtcaactcatcctgcagtggcttcgcaaacctgagtactggtcggaaggtagttccggcacgcaggcactatggcacgcgtacacacctgagtcggttactcccagtgaattggccttgtcgcgtcaggcatgcggtgtcgcatgtgatgcacagcctgtcatcaaaggcacgctgcccaatcgggacatcgcccatatggccgccacatccttgggatacttgacatggggcgttacgaacgatccaatggactatggtctcggtgatctgggcggatgggccctggatttgttgcagatttggggaagctacctggcgaatgccccggaagaggacctggcgtcatggctgcacgctcatctcggcgagcaagacgcccgtatgggattcagttacagcgatgttctcgcggactgtgatgcatggttgctggcgcggtccatgcagagcgattcctccgaaaggtctttgtccaccgctatgcgggac

SEQ ID NO: 3978 - DNA, 32533 bp, Unknown
  R22_24m  MAG No. k141_36477
cagaccatcatcgacggttacttcaacatgatgatgattgtcgactacgccaacgcggacaaggacttcggcgcgatggtcggcaaccttgaggacctcggcgacgacatcggtgtgcgcatccgctgccagcgtgaggaaatcttcaccaagatgcaccgtatttgaggaggcccgctcagcaggccgccgcacgcgaggaggcggaaagcccggtgggctttccgctgacggagccatccttatccctctgatgagggtgaccgccaaactagtctttaaatatcctgtaaggaacaaaccatgctgaacatcatggaggtccacgagaccaatcagatgatcgagcaggagaagctcgacgtccgcaccatcaccatgggcatctcgttgctcgactgcgcctcggacgatgtcgacaagacctgcgacaacatctaccgcaagatcactacctatgccaaggacctcgtttccaccggcaaggccatcgaacgcgactacggcatcccgatcgtcaacaagcgcatcaccgtcaccccgatctcgctggtcggtgccagctcctgcaagacgagcgaggacttcgtcaagatcgcccacgcgcttgacaaggcggccaaggaggtcggcgtcgacctgatcggcggctactccgcactcgtctccaagtccatgaccccggccgaggagttgctcatccgctccctgccgcaagccctttccgagaccgacatcgtctgctcgtccgtgaacgtcggttccaccaagaccggcatcgacatgaacgcggtcgaactgctcggccacatcatcaaggacgttgccgagcgcaccgccgacaacgactcctacggctgcgtcaagttcgtggccttctgcaacgtgcctgacgacaacccgttcatggcaggcggtttccatggcgtgaccgaaggcgacgcggtgattaatgtcggcgtttccggcccgggtgtggtctcccgtgcattggacgaggccaagggcaaggatttcgagttcctgtgcgaaaccatcaagcgcaccgcgttcaagatcacgcgcgtcggccagctggtggcacaggaggcatcccgtcgccttggcattccattcggcatcatcgacctttccctcgcgccgaccccggccgtgggcgactccgtcggcgaagtgcttgagaagatcggcctcgaacaggttggcgcaccgggcactaccgcggcgctcgccatgctcaacgaccaggtcaagaagggcggcatcatggcctccagctacgtgggtggcttgtccggcgcgttcatcccggtctccgaagacaagaacatgatcgacgcggcaaccaatggctgcctgaagatcgaaaagcttgaggccatgacctgcgtgtgctccgtcggcctcgacatgattgccattccgggagacaccaccgcagccaccatttccggcatcatcgccgacgaggccgcgatcggcatggtcaaccagaagaccaccgccgtgcgcgtgattccggtggaaggcaaaggcgtaggggagatggccaacttcggcggcctgatgggctatgcgccgatcattccggtgaaccagaccagctgcgaggccttcgtgacccgtggcggccgaatccctgcgccgattcacagcttcaagaattgattcggtagggtatctgctttcagagaggtacatttggcccctcgcggagagctatctgctttcaaagaggtacttatatgcggaaaccccgggtatgagcgttggaatatcaacactcatacccggggtttctcgattgcggtacctctttgaaggcagatagcattctgcaaacgctcgaatgtacctctttgaaggcagataccagctcgaattacctttctggaggtctattcccgtttcgaggggctgattccgacctttctggaggtctacttccgtttcgaggggctggcatatatgaagaccccgagtacaagcattgatatttcaacggccatactcggggtctcgtcctttgacagccccttgaagcggcagtagacctccggcggatgccaaatccgcccctcgaaacgcaggtagccttatattcagcgttcatcactgcgcgaagctcagtgtttccgctctcgcgcctgtcggcgttcgttcggcgtcgctactcgaaggcccaccgggccttctcctcacgctccgcccgcaaaattgagctggcgccaggcttcgtagatggcgatggatgcgcagttggtgaggttcagggaacgcagggacgggcgcatgggcagccgcacttgttcggccacatgagggccctccatgatgtccatcgggtcggggatgtcgccgggctcggggccgaacagcaggatgtcggtcggcttgtattccacctcggtgtagagcttggtggcatgtgcggtgaacgcgatgatgcgcgaattgggcatcgactccaccagattgtcgaaattcgggtgcagcaccacgtgggccatgtcatggtagtcgaggcccgcacggcgcagcttggtgtcgcgcaggttgaagcccagcggctccaccagatgcagaatcgtgccggtcactgcgcacaggcggatggccgaaccggtgttgccgggaatacgcggcgagtaatagcacaggtgcggcgtcacggtttcggtggcggcggccttctcggcggaaagcatcgcgtccaccacggagatggggttgccgtgtgcgtcggtcaccagctcgtccggcccgtaattcgacttgcgatagccgtattcgaacattttctcgactttggtttcgggattggctggattcggtgtgctctgggggttgtgttttgcctcgttcgtcatagctgctaagaataagaacgatgaacgacacagcaatttctttgcgattgggagcatggtgggaggccaatgcgcgtgacttgccatggcgcttcggacgggccacgccgtggggcgtgctggtcagtgaggtgatgagccagcagacgcagatgagccgtgtggtgccgtactggaccgactggatggaacgttggcccgacgcccgctcactcgccgaggcccccaaggccgaggtgatcaccgcatggggccggctcggctatccacgccgtgcgctgcgattgcaggaatgcgcccgcgtggtggccgagcagtacgccgacaaactgccgcgtacgtatgacgaactcactgcattgcccggcatcggcgattacaccgcctccgcggtgctgagctttgcgttcggcgaacgaatcgccgtgatcgataccaacatccgccgcgtgctgagccgtgtgttccttggcgtcgaatcgcgcgggggagcggccagcccggccgaacgcgcgctggcgaaccgcatgctgcccaaagacgagattctcgggcgcgatgctgacgtcgccgataatgccggtagcgccgaacataccgtgaacagcactatccgtggcggcaaacgctcccgactgcatcgtggcgaacgcccatcggtcacatggaaccagtcggtaatggaactgggggcggtgatctgcacggccaaatcgccgttatgcgacacctgcccgattgccgacgattgcgcgttcctcaaggccggccgccccggactgggggagcgtcgcacccgcccacgccaacgattccaaggcacggatcgacaggtgcgcggtctggtgctcgccgcgctgcgcgagcttcccgctggagtcacgttgcccagggaagatgccgacaagctttggaaggaccagattcagcttgccgcctgcatcgccagccttgacgatgacggcctgatcgagattctggacggcggcctgcgattacccagctgacattgtgaaaaatggtgggctccccaagcgtgtatgggtgtggtgaccgtagactggaagggttatggcagtgcagaggaacacatcaggcgcgagaacggcacgcggagccggcaccggggccaatgggccatccggcgggcccgcccgaaacgaccgttccggcaagccgcgcaagcgcaggatcagcaaaaagcagcaggccatctatcgtcgtcggcgtatcgtggccggcacggtgttgctgctgataatcgcgctgattgtattctgcgtgtacagccttggccggggtatcggtgccgtgaacacgatgattcaccatgacgaggtgtatgcgatttcccgcgacgccacgccggctccgaagaaagtcagcaatgtcaaggattgctcggccagtgatgtgacattgcagctttccgcggcctcccaatccgtgccggtaggaggatcgcttgatttcaccgcgaccatcgtgcacgaggggtcaggcaactgtttggtggacggggccgattccggccgtgtgctcaccattacttccggtcaggaaacgatttacaagtccgatgtgtgtccggcggattcacgtctgctgctgatgtccaagggtgataaggacgttcagaaggtcacgtggaataccgatgcgaacgccacgctcaccgaatgcacggatgagtcggattgggccaaggtcaatgcgggaacgtacgtggcgcagctgagtttgaaggatcatccgaaggtgaagagcgatccggtgacgtttacggtggggtaggacctgcggttggtgtttggacgctgggtctctccctcagtctcgctccgctcgacagctccctcgtcagcggaagctaaaaatgtcctcgcatatcagtattctgttgactttgcatgaggtgtgtcatattgcgggcatgccgtcgacaatgaagcgtccgcataggcatatggtggccatgccggcgctcccaggggaattaccacatattagcgagcgataaggaacgtccattggctactgagtctacgacgaacaccaccaccatcatcgcacgcgccgaccagcatgacattgatctgcacaaggcgtcggatcgcgtgaacttcggttccatcaaggaacccatcgatgtgccctacctgctgggcgtacagaccgacagcttcgattggctgatcggttccgaccgctggaagaagcgtgtcgaagaggatgaggctaacggcaccaacaccgtggcccacacctccggtctcgacgaggtcttcaacgagatctccccgatcgagaactttgcacagaccatgtccctgaccttctcggacccgtacttcgaggagccgcgccacaccgtgcaggagtgcaaggagaaggattacacctactccgctccgctgtacgtgaacgccgaattcgagaacggcgacaccggcgagatcaagtcccagaccgtgttcatgggcgacttcccgctgcagaccccgcacggtaccttcatcatcggcggcaccgagcgagtcatcgtctcccagctcgtgcgttccccgggcgtctacttcgaccgccagcaggatcgcacctccgacaaggaggtcttcggcgcgaagatcatcccgagccgcggtgcatggctcgagttcgagatcgacaagaaggaccagccgcaggtgcgcgtggaccgcaaacgcaagcagtccgccatcgtgttcctcatggccatcggcatgaccaagtccgagatcgcccaggccttcaaggattacccgctggtgctcgacgccctggagaaggaaaccctcgagacccaggacgaggccctcgtcgacctctaccgcaagattcgtccggccgacaccccgacccccgaggccggcaagaacctgctggactccttctacttcaacaccaagcgctacgatctggcccgcgtcggccgctataagatcaatcgcaagctgggtgtcgaggccgatttcaacgatcgttccctccaccaggaagacatcatcgccacgatcaagtacctggtggccctgcatgacggtgcggcgaccttcccgggcaagcgcaacggcgaagacgttgacctgcgcgtggacgtcgacgatatcgaccacttcggcaaccgtcgcatccgtcaggtcggcgagctgatccagaaccagctgcgcaccggcctgtcccgcatggagcgcgtggtgcgcgagcgcatgaccactcaggacgccgaggccatcaccccgcagtccctgatcaacatccgcccggtgaacgccaccatcaaggagttcttcggcacttcccagctctcccagttcatggatcagaacaacccgctgtccggtgtgacgaacaagcgtcgtctttccgcactgggccccggcggtctgtctcgcgaccgcgcctccatggaagtgcgcgacgtgcacccgtcccacttcggccgtatgtgcccgatcgagtctcctgaaggcccgaacatcggtctgatcggctccctggcgaccttcggccgcgtcaacccgttcggcttcatcgagaccccgtaccgcaaggtcgtcaacggccacgtgaccgacgaggtcgagtacatgaccgctgaccgtgatctcgaccacgtcatcgcccaggccaaccaggaacttgacgagaacggcaacttcgtctccaagtccgcccttgcccgagtcggcgaggaagaggcggtcgatgtgccggtgagctccgtggattacatggatgtctccccgcgtcagatggtctccctcggtgcctccctgattccgttcctggagcatgatgagggccaccgtgcactgatgggtaccaacatgcagcgtcaggcagtgccgctgatcgaatccgagcgcccgctggtgggcaccggctccgaatggcgcgccgccaacgattccggcgacgtcatcaagtccgagaaggacggtgtggtcacctacgtgtccgccgacctgattcgcgtgatgaacgacgacggcaccaccagctcctacaagctggccaagttccagcgttccaaccagaccacctgctacaaccagcgcccgatcatccatgatggcgagcgtgtggaggccggctcggtgctggccgatggtcctgccatccagaagggcgacctggccctgggcaagaacctgctcatcgccttcatgccgtggaacggctacaactacgaggatgccgtgatcatctcccagcgcctcgtgcaggacgacaccctctcctccatccacatcgaggagtacgagatcgacgcccgcgaaaccaagctgggcgccgaagagatcacccgcgacctgccgaacgtcggcgaggacgctgtggccaacctcgacgagcgcggcatcatccgcatcggcgccgaggtcgaggccggcgacatcctggtcggtaaggtcaccccgaagggtgagaccgagctgaccccggaggagcgcctgctgcgcgccatcttcggcgagaagtcccgcgaggtgcgcgacacctccctgcgcgtgccccacggcgagaccggtaccgtcatcggcgtcaaggagatcacccgcgaggatgccgaggaggacggcgacgagctgcccaacggcgtcaaccagatgatccgcgtctacatcgcccagcaccgtaagatcacggtgggcgacaagctctccggccgccacggcaacaagggctgcatctcccgcatcctgccggaagaggatatgccgttccttgccgacggtactccggtcgacatcatgttgaacccgctgggtgtgccttcccgaatgaacctcggtcaggtgctcgaactgcacctcggctggattgcccactccggttgggacatctctttggatccgaacatggaagccgagtggaagaagctgattccgtccggtgccgagaaggccgagccgaacaccccggtcgccaccccggtgttcgacggtgtcaagcctgaagtcctgaagggtctgctgtccactacgctgccgaaccgcgacggcgaccgtctggtcggccccgacggcaaggccaccctgttcgatggccgtaccggtgagccgtacaccaagccgatttccgttggctacatgtacatgctgaagctgcaccacctggtcgacgacaagattcacgcccgctccaccggcccgtactccatgatcacccagcagccgctcggtggtaaggcccagttcggtggccagcgcttcggcgagatggaggtgtgggcccttgaggcctacggtgccgcctacacgctgcacgagatgatgaccaccaagtccgatgacgtcgacggccgcgtgcgcgtctacggtgccatcgtcaagggcgataacctgccgccggcaggtatccctgagtcgttcaaggtgctcctgaaggaaatgcagtccctgtccctgaacgtcgaagtgctcaacgccgaaggcgtggccatcgacatgaaggatgaggatgacgatccggccagctccgctgacgacctcggcttcaacattggcgcccgccccgacgcggccgccaaggaagaccagaaggccgaagagcccgaataccagtgatccctcgggctgcatgcggtcaatacgccgcgtgtagccccgccaacgtgaaatagataacgtacagagacctttccggtttgcactacccctcagtcagccttggctgacagctcccctgacaaggggagcttgggaaggtctcaagaacagaaacggattaacaagtgctggacgtcaacgcatttgacaagattcgcatcggccttgccaccgccgatgacatccgtggttggagccacggtgaggtcaagaagcctgaaaccatcaactaccgtacgctgaagcctgagaaggacggtctgttcggcgaacagatcttcggcccgacccgtgactgggagtgcgcctgcggcaagtacaagcgcgtgcgcttcaagggcatcgtctgcgagcgatgcggcgtcgaagtgacccgcagccgcgtgcgccgtgagcgcatgggccacatcgagctcgccgccccggtgacgcacatctggttcttcaaaggtgtgccttcccgcctcggctacctgctgaacgtcaccccgaaggatctggagcgcgtgatctacttcgcctcctacatggtcaccgaggtgaacgaggacgagcgccacaacgatctgcccggcctgcaggacgagttcgattccgagatcaagcgccttgagcagcgccgtgactccgacatcgaagcccgcgccaagaaggtcgaagaggatctcgccgcccttgaggaggccggcgaggccaagggcccggcccgcaccaagctgcgtaacggtgccgagcgcgatatggccgccatccgcacccgctacaacgaccagatcgcccgtgtggacgccgtcttcgacaagttcaagaagctcaagcccggcgacatggtcgacgacgtggacctgtggcgcgagatgcaggaccgctacggcgattacttcgacggctgcatgggcgccgaagccatcaagaagcgcctgcagtcccttgacctggagaccatctccaaggaactgcgcgaggagatcaaggacgcttccgaacagcgtaagaccaaggccctgaagcgtctcaaggtcgtcaacgccttcctgaccaccggcaacaagccggaggccatggtgcttgacgtgatcccggtcatcccgccggacctgcgcccgatggtccagctcgacggtggccgctttgccacctccgacctcaacgacctgtatcgccgtgtgatcaaccgtaacaaccgtctgaagcgactgatcgagctcggcgcccctgaaatcatgctcaacaacgagaagcgcatgcttcaggaagccgtcgactccctgttcgataacggccgtcgtggtcgcccggtcaccggtgcctccaaccgtccgctgaagtccctgtccgacatgctcaagggtaagcagggtcgtttccgtcagaacctgctcggtaagcgagtcgactactccggccgttccgtgatcgtggtcggcccgtccctgcgcatgcaccagtgtggtctgccgaagccgatggccctcgagctgttcaagccgttcgtcatcaagcgcctcgtggacctgaactacgcgcagaacatgaagtccgccaagcgtctcgtggaccgcggcgacgccgaagtgtggggcgtgctcgaggaggtcatctccgagcaccccgtgctgctcaaccgtgcacctacgctgcaccgtctgggtattcaggcattcgagccgatcctggtggaaggcaaggccatccatctgccgccgctggcctgcgccgccttcaacgccgacttcgatggtgaccagatggcagtccacctgccgctgtccgccgaagcccaggccgaggcccgctcgctgatgatggcttccgacaacatcctgaagccggctgacggtcacaccgtgaccatgccgtcccaggacatgatcctcggtctgtactacctgtccaccgtgctggaaggcgccaagggccagggccgcgtgttctcctcgctggaagaggccgaaatggccctcgaccgccacgagatcgacatgcaggccaaggtgctcatccgcctgcccgagagcttcgtactgccgaagaactgggagcccggcgaggtcaaggtgcttgacccgcgcgaaggtgaggacgaggtcgtcaaggaagagcgcttccacgacggcaccgtgctgttcgccacctcctacggccgcatcctgttcaacgagaccctgccgaccgactacccgttcgtcaacgagcaggtggccaagggccgtctgtccaagatcgtcgacgacatcgccatgcgttactccacccagcaggtggccgccacgctggatgccctgaaggatcttggcttcacccgtgcaccgtggtccggtgtgtccttcgcgttctccgacgtgaacgagccgcccgagcgcgacgagaagatcgccgagtacgaggccaaggccgacaaggtcaacgccaactacgagatgggtctgttgaccgaggaagctcgccgtcaggaactcatcgacctgtggaccgagtgcaccgccgaggtgtccaaggaagtcgaggagaagttcgacccgacctccaatctggccatcatcgtgcagtccggtgcacgaggcaacatgatgcagatcaaccagatcgcaggtatgcgaggcctcgtggccaacccgaagggcgagatcattcctcgtcctgtgaagtccaactaccgcgacggcctgtccgtgctggagtacttcatctcccagcacggtgcacgtaagggtctggccgataccgcactgcgtaccgcagaatccggttacctgacccgtcgtctggtcgatgtctcccaggacgtcatcgtgcgcgaagaggactgcggcaccaaggccggtctgcccatccgcgtcgccgagcgcgacaacgacggcaacctggtgctcgtcaaggccgccgacggtggcccgtactcccgtctgctcgccgccgacgtcattgacccggccgacggacagaccgtgctgtacaagcgcgacgacgccctgtccatggacgtgctcaacgacctcgtggcccacggtgtcgaggaagtcaagtgccgttccgtgctgacctgcgagtccaagcgcggtgtgtgcgccaagtgctatggctggtccctggccaccaacaagctggtcgatgtcggcgagaccgtcggtatcgtcgccgcccagtccatcggtgagcctggtacccagctgacgctgcgttccttccactccggtggtgtggccgcggcatccgatatcacccagggtcttccccgtgtcaccgagcttttcgaggcccgcaccccgaagggtgaggccccgatcaccgagttcgccggcagcatcaagatcgtggagaacgatcgcggtcgccagatcatcctgaccccggacgccgattccggcgcgccgaaggaagacggcgtgatcaagccgatcacctaccaggtctccaagcgcgtgccgctcaaagttgccgacggcgaccacatcaaggttggcacccagctggtcgaaggttccgtggatcccaagaagatcctcaccatcctcggcaagcgcgccgcccaggtcaacatcgtggaggaagtgcacaccgtgtaccgctcccagggtgtggatatccacgacaagcacatcgaggtcatcgtgcaccagatgacccgccgcgtgaccatcatcgactccggcgacaccgacctgctgccgggtgagctggtggacaatgcccgcttccgcgagatcaaccgcaacatcgtcaagaacggtggccgtccggccgtcggtcgtccggcgcttatgggcatcaccaaggcgtcgctggccaccgactcctggctgtccgccgcatccttccaggagaccacccgcgtgctcaccgaagccgccctctccgagaaggtcgacgacctcaagggcctcaaggagaacgtcatcatcggtaagctcatcccggccggtacgggcctcgcccgctaccgcaacgccgtggtcgagcccgacaaggccatccgcgacaccatctacccgaacttcggtctgggcggcgatggcgatctcggcgacgcgagcttctccgacgccgacctgtccgacctgaacttctcgaatctcgagttcggcgatctgaagctcggcgacgacttcaacccggatgatttctactccgatcagggcggtcagcctgacatcgaggagtaaccctcctcacccccgataagatggcccggaactcgtgtggttccgggccatctcgcattttcagacagcagtattgttcttgtcgatttacgggggtagtgtgtcaacttaggagtgtgggtatcgttcccagtggtttgtggctcggtacgtgcacggaagtcgtaagagaagagacaagtgttggagggccacctatggtggggttaaacacattggtcggcaagcggtacaagatccttgcccagatcggcaagggtggtatgtccaccgtctatctggcaatggattcctcgctgaacaagcaatgggccatcaaggaaattcgcagtgcctctgatccggtgcagcgcgacttggtcattaagagcctgaccgtcgaagccaatatgattaagcgcttcgatcacccggcgattccacgtatcgtcgacctgatcgaagaaaagggcagcctgttcgtcgttatggattacgtcgaaggccagaccttggcgagcctgctcaagaaggaaggcccgcagtccgaagaagacgtggtcgattggggcatccagctgtgcgatgtgctcgactatctgcaccgccgcaagcatccggtgatcttccgcgatatgaagccctcgaatgtgatgctgacccctgagggcgcaatcaagcttatcgacttcggcattgcactggagaccggcaaggatgcggacagcaagccgctggtcggtgacgaccgccagctcggtacgccgggcttcggcgctcccgaacagttcgccgataacggcaccgtggacgcacgtaccgatatctacgcgctcggtgccaccctgttctacctgctgactggctcacacccgcgcaagaacggcattgtgccgattcgtgagatcaacccggagctttcgcagggcttggaactggtgattgccaaggccaccagcaagaatccggacgatcgcttccagacctgcgccgacttcgcgtatgcgctgaaacactacaagcaggaagacgccgcataccgcaaggcgctgaattccaagtggtggggcttcctcggcacggcgatcgcctccgtggtctgcctggccctcgccggcggcagcctggtgctagccaaccacgcgcagaacaccgattacgactactggatgaaccaggcggcgcagaccaccgacgcatccgccgcagaagccgcctacgtgcgcgcagtggaaatcaagaccaatgccattgaaccgtacgagcagctgatcaagcgttacaccgctgacagtgatttcagcgacgacgaagagcagatctacaacacgctgatcaaccagcacgccgactcgttgcgcaaggactccaccaagtgggccgagctgagcttcgacaccggccgcatgtattggtactactactccggctccaagatggccggccaaagcgcgtccgccgccaacaccgatccacagcgatacgcccgcatccgcgccgcttcgcagtggatgcacaacgcggcacaagagagtagcttcagcaacgtcaagctcgccaagatctacgccgacatcgccgacttcaatacggagatcgtgccgctgatcaacgaaggatccgattcaggcaagtacaagccgtacttcagcaagctgaacgaactggtgaagtccgccgctcaggaagataacggtgtgatcagcctcgaatccgcgaacctgaccttggacgcgttgcgcgtgtacccgcgcaagttccgcgcggacggcatcacgcaacagcagatgagcgatttggccgatgccgccgcatcgcttgccgacaagaccgaaaccaccaccgatgagctggatgccagcaagaaagccgcgcaacaggccgaaaagcccaccaaggacgccatcgccaacgctttcgttgatatcaagggggacgccaagtgaacgccgatatctataggactctggcagtcgtattcctggctttggccgtgattcttgcggtcgtggccgtagtgctgttccgcaagttcaacattcccgccgtgcgtgacgccctgacaggcaagcgcgcggaacgtgagatcgccgaactgcgtggagtgcgcgccggttcgtgggccaacgccgagaatctgggcgaaagctcgcgccacaagcgcaagaagggtgccctttccgataccaccaccggtacgcatgacaccagcgacatcgaattccgcccggtgaccggtaccggttccggctctctgggttccgccagcaccaagggtggcattactcgccccggcgaagacaagccgtccgcagtgcccggtgccaagcaaaaggcttccgccgctccggccgtggtggacgaggaagacgaaagcacccgtctgggtaccaaggccgcactcgaatctgtggttgagattccggtgtccatggcttccgccgccgaattggcggacgagggcgagacctcgctgatgcaattccgcaagacgaatgaagcatcgtccgacgacgatgaatcccgtaccatcctggttcgtggagggaagaacaagtaatgagcttcgtaactaattccagtttctggcgtaagtcgttgatcggtgcggccgtagctgtggcggctcttgccatgggtgctaccgccgtggtagccagcgccgattcgacttccgacctcaagcccgagcagaccaccggctccgtggtgtccgcacgctccttcaaggccgtcaaggcacagccggctgccgccactacgccgaagatggatttggcttggtatgccgccgataaggacggcaaggtggccgataatgcccagccgctgaccgatggccgcaccaatgcctcgaatgttcgtctgggcgtgacgattactgggtttgatggtttccccgcgggccaatttgaccgtaacggacaatacgaaggtgcggataaagacaagattgcctttaccgtgaccgtgggcatcttgggcgtcaaggaagtcaagtatggcgacttccaccgtacaggcaatgtgcaggacggctacacctacaccgttgagccgaatgatggtccggcgttcgctctgagcggtgatccggttacgctcgatgtgacagttgccgcgccggctgatcctacagcggcagatgccgccattgacctgaatcagttcaaggatggcgacggcacgagcaccatcacggctcctcaattgtcttatgacagcaccaagcccgccgccgtggatacggcggtgttcggcgacgttgttgatactgattggctgaaaggcaaagacaaagacgcgaccgacggtacctggttcacgaccacgtcgccgtccgtaatctttactccggttgcggctgaggcagccaatgtcgtgtcttatgaggtgacgtatccgaatggcaacggcaccaagaccgatacggtcaaggcagatgaagcatggaccgtgcctaacggcaagaccgacctgaccaagaccacggttacggtcaccaattggttcggcagcgcttccgatgcgaagccgttgagcgatttgctcgacgcgaagaccgttattgttgacccgaatgccggcactggtctgtccctgaatctgaccggtaccaccccggataagggtgctgtcaacaacggcaccacgtattacagcaaggtcggcggcttctcggtgagcagcacgagcgcatacttcgccgatgaactcgccctgctcaaggcgaacggtatcaagttgctgaccgttccggctgccgacggcaccggtgccacaatcccggtgtgcgatgccgataatcttacgaatggtgccatggactgcggcgatgccggactggacctgaagaccggtaaccacaccgtaagcctgaactccgcgctgccgggcacgccgactgtaacgcagtcgttcgccatcgacaccaccgctcctaccgttgcgtggaagggctactccaagaacggcggcattgatattccgttcggaaagacactcttcgcagtcggccgtaaagaacgtgccctgaccttcaccgttacggatgatggtgccggtgtgggcaaggtgattgcaagcggtatcgatcctgagacgggcaagcaggccacggtcacgttgaccaacaacggtgacggcacctacacattcctgctcaccaaggccggaacctatgatttgacggacttcaccatccaagccacggacaatgcaggtacgcagtccaaggccgaaaaggtaaacgcaattgccggcgataagttcacctacacgaagattcgtatcggcaagaatgtccagccgaagaccacggtatcggtaagcggcaccgactacatcaacggcactcccaaggtcacactgaccgtcaagaacaacccgtggctggcggacgaactgaagggtctgcaagaaggtgacggcaccaagaacctgaacctgctcaccagcacattgaccgctggcggcaagaccgtgtaccagggcgcgttcccggtggccggcgccacggtgaacgacgccggtgacaagatcgtcatcgcagcggatgccgccaagccgttgattgacgccaagaacacaaacggccagtatgccattacggtaaccgataaccccacattgctggcagtgttgggtgacgtgaccaataacgccaagaccttcggcgtggatacgcaggctccgagcttcaccggtgccgcctaccaggcaggcagagatgaactgacctccaccaaggacgattccatcagtgtcgtgtcccgttctgccgccaccatcactttggacgcgcgcgatctgctgcccgattccacggcaacaggtgccggcaaagacgatgcacagacctctggtctggcaaaggtcgaagccaaggtcgattacaccacgtggaatggcgataaggtcaccggcaagtggaccgaacttcagcgcgtgaacaacgaccccaacaaggtccaactgacgctcggcgaccaggacggcaagtacacgctggccggcgtatccctcagagccaccgataaggcgaccacgaagcccaatgtcagcgatgccgaaaccacattggccacggtgaaggccgcactggccaagtccactgataccaccgtggccgctgcggccaagcagctgccggatacgctgggcgtgagcaagcagaccgcgaaggcgactctgcagctcaacgatgctgacccgcagaatacctacaaggaagatctcaccaacatctccctcaaggtcgccggtgaccccgcgttcgcctaccgctgggatgtggtcaaggccggctatgccgatgccaacttgctgaccggtgcggtgcaatacggcgacgccggttcgaagtccttcacattcaagatcagtgacgccacctataaggacggcgtcatcacgctgggcaccgcaaacctgcccaagcggaccaaaaccgacaaggatgccaccggcaagcagttcaacggcgactaccagctgacgctccagaagaacttcggcaacaatgtcgagctgttcaacgctcaaagcaccggcactaccaactacctgttggacaccaagcgcccagtgctgaccaagatcagcggtccggccggtgccaagggcgagaccatcgtcgataccaccgtgcaaggcaagagctacacggtcttcgccaaggccggtgcacagacgttcacggtctggatcaaggacttgctgcccaacggccagtcctcgaacgactccgccaagaacgaagcccatacgtccggcatcaaggatgactccgttaagctgaccattcctgacggcactgatctgaagggcaagacgcttgccgagggcaagacggtgaatgtcacactcgacaacgaaggcaagggacagttgacccttgatcaggaaggcttctacgacctgagcaagatcacggtgagcgtcaacgacaacctcggcaacgcgctggacaaggaaagcttcaagaaagctccggttcaggacaatgtcaaggattacgacgccgtcgttgccgatgtgaatggtgacgataccaaggcatccttcgcggtcaccaagtccgacaactccgtgcccgactccagtgataacaacaacaagtacttccgtggcaaggtcaaggtggcctacaccatcaccgaccactggttcccgatttacgccaagctcaacgccggcaagacgaacctgctcgctggtagtacttcgaacaccacgccgttgaccggtggccagaacgagcaaaacatcaagccgttggccgttagcgatgcacagtggactgaaggcgatggctacacgtggacgctctccggccagaagctgttgatcaacggcaagaccgacgaagtggaaggcaattacacgctgcacctcgcctatgccggtctacaggcaaaggccaatgaggcatccacccagtccaaagacgtggtgctcgactggaccgctccgaagctgggcgacctgaccgcttccagtgaagcaccgaagaagtgggattggatcttctccactgatgtcttcacggccacgctgaacggcatcagcgataatgtgtccggtgtgactgcggactccaccgcgttctccaccaagcacttcgacaactggctttccggcaagaacgacccggctcccgtctatgcgggcgacgcggccgccggcagcatcagcttcacgatggatggcgacagccagcgcgtctacctcggcgagaccagcctcaccattcgcgatgaggccggcaatccggtcgacaccggcaagctgaatgcctacgaaggcgtgaacggcaaccaagccgccaacgcgctgaagggattgaacggcgtggccatcgacaccgtggctcccaccattgcggtctcctacgacaacaacgatgtgcgcaacggcaagtactacaaggcccaccgtaccggtaccgtgacactgaccgaatcgaacttcgatttctccaagaagtatgagggcgatcgtgtggtcgtcaccacgtcggtcgacggcaagaaggccaccattccggtctcctccttcaagaacgcgagtggtgacctgaagacgtacgtggccaccttcgccgccgacagcgacggcgactggactgtggacgccgcctacaccgatccgggcgatcacccgtcgaatacgattcatgaggagttcacggtcgacaccgtggctccgaagctgaccctcaccttcgacaacaacaacgtgaagaacggcaaatactacgcggccgatcgcaacgctaccattcgcgaagtcgagcgcaacttctccgaggacgaatcggtcatcaccgtcaccgccaaggacgataacggcgcggacaccgcagcccccggcccggcgggctggcagcgcaccggcggcacgcgcgaatccaccgagtggacgaactccgtggcattcacgggcgaggcgcacttcaccatcaaggccaccgccaccgatctggccggcaacaaggccgaagaggtgagcgaacccgagttcgtggttgacaagaccaagccgcagatcaagatcgaccgcgtggaagacaagactgcgtacgccggtaccgtggcaccgttgatcgacttcaacgatgtcaacatcgacatgaagaacgtgagctacacgctggtcggcgaccatcgcggcgaactcaagggcgacaagatgcccaagaacgtcaccaccgatgcggccaacgaccgcaccgtggacttcacggacttcgaacgcaaggtcgacttcgatgacgtgtacaccatcaaggcgcacggcaccgatctggctggcaacacgttcgagaccaagaagaccttctccgtgaaccgcttcggctccacctacacgttcgatgcggacaccacgaacctgcgcggcacctacctgaagaaggcgcaggacgtgcagataacggagatcaacgtctccggtcttgacctgagcaagcgccagatcgtgatcgccaaggacgacaaggcgaccacgctcaccaacaacgactacaaggtcgcgacctctgacgacaagggctggagccgtacggtgtacaccgtgccggcatcccgctttaactccgacggcttctaccgtgtgcaggtgcagtccatggacgaggcgggcaacctctcgcagaacaccatggacaagaagaacgccgaccgtaagggcactgccgaagtgaacttcgccgtcgactcgaccgcgccgactgcttcgctgctcggcatcaagtccggcaccgtgtactacagccagcagggacagcccgcatcggtggacgccaaagacaacctcggcatcaagtccaccgaagtgtatgtcgacggccagctcaaagacagctggaagggcgatgccacgctcaagtccacgccgagtctgacgttcgacgccgacgccaagagccacgagatcgtgatccacacgatcgacaaggcaggcaacgaggcgacgtccacctacgacaacatctacgtggcctccaactggtggcagtacgccacccacaccccgtggctgcgcaacacgatgatcttcggtgcactggtggtcttggccgccatcgccggagcgattgtcgcggtgaaccagcgcagaaagcagtttgcgtaccgcaagaacccgttcgagcggtgaggtgactgcactcgtttcccgttaacgagggttgtttgcggggcgttgcggtgagtaattgctgatgccatagtgggccagtccaattgattctgggctggcccactaccgttgatgagggattgcgtgatgtggtgttggctgggtatgggttgtctggtcaccggctgtggtgttgaacggcatcgcttgtcgtgcgtagacgttggagcaaaggccatgggtggtccatcggcaacacaattatgaatgcccgaaccgggtataccgattttcggggtatccacgacatgaagaatatcgcggctgtcgacacccatcggacggtgtgggacaccatgaatattggccagcattttttggcgtatgccaacgcgacgtatgacacgttgaatacggcgaaagtggtgaagccgtttgtgaatccgactgcggatggtggtctgcagtggaagcattcgccacaggattatttcaagacgctcgttccggatcctgatcatttgtggaatttcaagaccatatatcaggcaccgggaaagttgtccgatggggcggctgaggcatctagtgccattcgagttggtatcagtgatctataaaggatggatgattgacgatgagcaggaaatcggatgctgctgagcgtgggcgggaggcttacgcgcggtggaaggagctttcggaggatgagaagaatgaggatcttcgtcggcgtcttctcgcctccgatcagaataatcccgtggtcagggatatgttgaagactgtcgagaaggatatccggggtcgttcctcggcgaatggtggtccgactctggagtatgagagtcatggtttgtttgcgctgacggttcctcatctgcatggtccgcgtccggggcgtcgtgcgttcggaatgcgtggcgtggtgttgaagtctttgtggttcctgtttgtttttgtggtgtccgtggtggtgcaggtagtgttcatggatgcggcgaaggcgaatgggtcgggtgattggtggctgttggcggccgtccccaacgtcgtggtattcgctctcgtgttcacgtcgatggcgctatccccgtttctcatgttgttgttcggcggtatttggcctcgactgtggggtttgtcgattttgttcggttccttggcgatgcttgcggctggttcgtttgtgggtcaggaggttggtcgtaggtggttgtgggaccggtatgtggcgacgggcttgttgaagccgggggatttcgtggattggtcgtctgatcgtctgcctgcgcctttggcgcaacccgcgtcgggtggttggtgggtgaccggcttggtggccggtgtactgctggtgtcgggttccctgttcctgtaccgggaggatcggcatcgtgggtcgaacattcttcctcgctacatatcgtatggtggcggcgtggttggcttggtcgcggccatcggcatcgcgttgacccgtcatgtgagcggtttcgcgttggtggctgccccgctggttgcgttgttcgtcgggcttctgtggttcccgttggatttggcggctgcctgtttttgtgtggataatcgtcgtgagtcgtgtggcgagtggccggccgcgttctggctcaccgccgaggcgttgttcgtcatcggcgtgtgtacggcgctgcccatggcgtgacggttggttgtgcgctgggatggtagtgtgaaggaaggtgagtgggttgtcaagttcgaggagaagctgcaggatcttcctagggatttcggccgatttgctgacagctttggtgaggtgtcctgtcagctgcgtggctggatgcagtctttggacgggttccagtcggatgccaaaacccagttggaacgtgccatcgccgcacgcgacgagaaggagcggtatgagcggctgtcttgtggggcgcgctcggcattgacgcaggcgggggcggtgtttgacgagttgcccgatgccgccacggatgtgcagcgcaggaatgcgcgtgaggcgaaggaagccgcacagcagatgctggacgggtacagcgaccatgtcgagaccgcgggcgatgagtgggcagatgcgaaacgtcgtgtacgtgatatccgcttggcctatgagagtgaagcgcataaacgtgcgggtgagattgccaaggcacaggagcatgcacctgccgtgaacggtttcgagaagttccattattcggatggatggcagtgcatcgtatcgttcgcgaaggccgcttccgccgtgctcgccatagtgagcctgtttgtttctggatggggaatcgcgctggcagtcgtggcgctgggagccttactgttagcagacaagtatgtagattatctttatagggatgcatcttttaacgaagtgattgcagaaggtgctttcctgattctttcgattattggatcggtacgttgtctttccgccggattgcaaggattcaaaacggctagtgtggcgaagtcgaccggtttggcagatgatttgagatccttcaaactggcgtcggggaatatcgcaactaatctcggggagtgtcacagcgtggcgagtttcggtatactcacccagtattccaaggttctccctacttacacgaaggtgtcggaagggatgacgtttcttggtgatgtgaagagggtttcggatagtgtgcgtgttatcgcttctcaggtgggacgatggggaggcagcggtcggacactgagaacggtattgtattacgccggtcgtgagcatttgttgcagaagggggccaatccggctggccatgcgcatgatttcgtacttgatcaggtcaagtacgggcggcagacatcgggtccatgggatgtggcgaaaatgttcattccggggcttgcccagttgaatgatgcggcagatgcggtgaacaatgccggtgaaggatttgtttatgcgggttccgcgattcgttcctttatggtggagaggtgattgatatggtgagaagtggtggtcggccaccgtgggagcgtggagccgctggtgtgggcggtgatgccgaggctggcggttctgatgtcggcggtgagaatcgtgttctggcgaatggcgcgttgggcgagttcatcgacatgtgcattcctgtgggtggcaggcgtgtgttcactcgtttgggggttgccttgtggactatcatgtggtttgtgctgttccttgcgcaggtaggtttgcaagcccggtatgcgttcttcgaacgtgattccgcaagaggtggtgtgtggttcctgcagatggccggtatctcgttgtcgagcgattggtggcctgtggcggtctttttcgacgtgggtgttgttccgggactattgctgtggctggctgctcatgttatgcgcaagccgtggattgctgttgccggggacgttctgattgttcagtgtgtcgccggtgccgtgggcgcggagattggaaagaccgttatgtatgcgatgtatggtccccatgtcgaaagtttgattgactccacgactggacgtccggacagactgtattacgacagttctcctgctgtggtggtgcctggtttggttgtggctggggttgccgtggtggttgccgtggtgcttgtggtgttgcgtggggtgggtgtttccccgcgtgtgcgtgtgggtggcaatgtggttgccggtttgggattaatgggcatgttgtgggtcggcccggccgatgcgaatcagttgttctgggtgaattccgtgatggcggtcggcatggtgttgttctggattcccggtgagcttcgtgcgatccggcgttgtgtcttggaggggcgtgatgcctcgtggcagcctgtggctgctggtttcctggtgcttgatttcgtcatgttgatgctgcttgcctacgcggccgccacgggtgtgtgatgtgggtgcggcgtgtttgctgttcggatgttggtatggagggtgttgctgtggttgttgacggtgagggttttgtcgggtgtgtccgtggtttgagggatgcgttggctggtttgcctgttgtggttggcttgttgccgtcgagtcgtgcggctcatggggttgtggcgcgtggctatgacgtgttcgggcagggggcgttatcttggtgtgctgcggtatgtcgatgacgacatgcgtgtggtgccggacggtgccggtccagtgtatgcgatgggcggcgtgtattggcggatcggcgtgcttgccgctttgtctgtggcggatatgttggcacaggcatggtgggtgaacatgagcctgagcatcgggtttgatccgtggtggctgggcgtgctgggcatcgatggtagctcgttcgatttcctgggattcatggccggcgtgtgtgccgtattgccggtggttggcatactgttggtcttgcccgcgttcatctggccacgtgaacgcacgttgtttcacatcatgatgctgtgcttctgggaaggcacttcgcgcatgctgggtgccggtttgggccgaacgatcctctatatgcgtggcgtacgtgacggcgtgatcgatcatttcgcgggaagcggcgtgcctggcccgttgaaggaatcggacacggtagttgggatgtggcccgcagtggtagggggcattgtgtttgccgtgattgctttcgtgttcgccgtgattcctcgcagacaaaggcagggtgcggcaaagcccatgattggcattggaatcgcggcaagcatcggcttgttcggcatagtgctggtggaatgcggttgggtgcccatttcttttgtgctgttgttggtcgccctgtttatggcttgggcggtgctgccaagcgaagtggcgattgcccgtcaatgcgccagcaagcgggtcgaaccgttctggatgtggtattccgccgaactcatctgggtcgagactctgttcatattccttgccatcatggttgccatctcaggaatctgacatggccggtgaagcttaccggggctcatgcgcaacgaaccatttccaagcgggcacttgtttgatgacataattgctgttgcggtattcgcgctcgattccatcgccgacgatgatggttccttcatggagcttttgttcggccatgagttcccagagcgcgcgggtttctctctcgatggtccgattatcatccatgcgtgccgtgacctgatatagctcatattgttcatgttcgagtgcatcgcccatcacaaaatcaacttcatagccatgttccttggtatggcatgacgatatgccgtcgcgacgataacctgcggttcggcggcgtagttcgagataaacggcgttttccaatcgttggccatcatctctggcgcttgccatgcttgaggctgcggccagcccgggatctatggcgtatatttttgatgtggaagtggtgctctctttgagcgacatagagaagtctttcattcgaaacaccagataggcgtcttcaaaatattccaataaatctcccagtagcacacggctggtggctagtccggctgaacgcaattcgttttctatcttgcgaatagacaatggcttgccgttgctgccaagcaagcgtcgtgccaatgcggaggcaactcttggacgcgcgatgtcataacgttccactgcatcgcgggatacgacacgctgcacatatgactggagcagggtcacacgttgaggcgttggcagtccctcgattgctgggaatccgccctcttccaggtaggagatcaatgcggccgacagcattaatcgttctttggtggaatatccagctgcttcgttccggctgagcaattctgattcggcgataccgcgcgcgcggacaaactcacggaatgagaaaggcaaaagctcgaagtccaatgctcggcctcgaaattcggtggaaatttcttttgagagcattttcgaggaagagccggtgacatagatcgttgcttttgtggtgtctacgatgcgacgtagccaagcgccccagttctgcatttcctgtaattcgtcaaaaaacaggtacaagccggtgtctaggctttcgggatgcatggagcaaaaggtttcgattacttcatcgcccacacttggagtgatgtcgccgagcctgtcatcttcaaaattgatatagcagatttggttccagctgacaccggatgtatgtagggcctctatctcttggaataggcggtagcttttcccgctgcggcgcatgcctacgatgaccttcaccagattgcctactctcggggtcagtggcttacctagatccaagtcgcgcggcacaatcgggtggaaatcttcgattctaaaatcgcgcagcttttcggcgatgatcggatttgccataatgtgcctttcaagaaaacggtaatgctaccttaccaatattgaggaaaactggtaaccttatcttaccaatttttagttttttggtaaagttacttagccggagttgtgttactgtgttgacgagttttgcgtctccgcaaagcattggccttggtacaggactagacttaagtgctatgagagcgaagactgttaaggatcggcgtacgggggctcagacgctgaccatacataccacgcgaggcgagtcgttggatcttgggcaggcacaatggcttgctgaaggccattggtatatgctgccgttccggtttgaaagtaatggcgcggaaatcctcttctattacgacgtgactcattgcgagaccatgcatggcgtgttgaggtcggtagtgcctggcggccaatatgtgggcatactcgtggcggtattgtccgttatggagcaatgcgaggagcatcgcgtgccgctgtcgtacgtgcagtgggaccccaaaagcgtgtatatctccgcacaggggtatccgctgttcgtggtggtgccggcgctgggactggaacccgatcgcaacaccgccaccactttgctgcagacattggccgatgcacgccggacccggcttgaggatgccgttgtgcaaggctatcagcgtgcgctcgccgagttcctggggcgcaattcactggttaatgcagatgctctgcatgattttatggcgtatttgctgcccggcactgttcagccgcgtcaagcgcagtcagcgcagtcgactcatgaagataatggttcggagacgcaattcggcgcgaccgtagtgtctgacggcaccatggtcggtgccacgcgatttggcgccacagtattgagctccaagcctaaacttcagacgacgccgcaacaggccgcaatgccgacgacttccgcggcaccgtcaacgcatgcaacgccggcggctcctgcaatgccggcagcacacgcggcaccggcacagccgactcctgtaacgtcggcctcgcccgtgacacagccggctcctgcaatgccgattgccgtaaatcttccccgcaagcaggaaacgcagcccgctcgtgagaatctcgttcgcgaacaatatatccgtgaagattccgcccgcggtgtggcatccaatgtggcggctgccgctgccgcgggtgataccgctactgctgccgtggccgagactaacacgggtaacgctgctgccgccgctcacgttgctcacaccgtcaacaacgttgatgctgctcgcgttcccgccactagcaacgtcgttcgccctatcctccctgtcagcgccgtcagcacagcactgcgcgccgatgagaacgacagcgaaggcgagacgatgctgcgcctctacacggacaagtccagaggctttaccgtcacacgattgcgcgacggtaaagcaataacggtgcacgccactcgagccaccatcgggcgatcgaaaaccgcagacattcacatgggcggcaatacgaacgtcagtcgtatccatgcggtgattgacatgctggatgatggacgtttttgcatcaccgacaatcattcggccaacggcactgcggtaggtggccgcgaactggcaagcggcggttgcgaatatgtggcatctggcggcgatttcacgctggccgacgacacattcgtgatctctcctacaatagaaggcagagaagaaccgaagcgatgacgctgatagcggggggagaagaaccatgaaacgatgtgcacaatgcggcaatgcagttcctgacaatatgatgttctgcacgcggtgcggagccccggtaccggcggacgctacggtagtggcatcgcgcgggattccgcagccgggtgtgccgcagccgcagccgagcgtacctcggccgaatgcgcctcaaacgaatattccgcaaccgggcatttccagtccgaacggtccaatgcccggcggccaggtgccgggcagcccggtacccggagcgtatgccggtgccgccggtgccgttcctccggcaggaatcccgacctcgaacaatggcatgccaactggtgcaggcgggcccaacaacggcaatggtgccggcaacaacggcaaaaagccccgtaaaatcgtgccaatcatcatagcgattattgtggtagtggcgctgatagccggcggcatcacgggctttatattctggcgtaacgcgcatcagaaggccgaggccaagccaacaactacctccagcaccaccaaatcgaaacctaagacaaagactaagacaacaaccaaagaccagcagaagaccaagtccgagcccgccaagccggcagccaccgaagtgacgatgaccgatttctcatgcgacggcaactccgccagtgactggaagtggactggcggcgcgatggtctcgaacgtcatccactgctgggatggggattcctcggtcgattcggattcgtcgtccaaatcctcaagtgattccctggacggcagcggcgagtatgccttcggcgtctggacgccggcgctggatgaatcgaaggaaatccacgtatccatgctcgaatcgggggagaaggagtactccgagccgcaagtcgccgccacatacggcgataatccagccgtattcgtgttctacgcggtgaagaccaaggcggtggacaccacgccggaaagcgtgcatctgttcgctcacgaagtcgatcttgaaaccggcgaattgtccgaccgcatcgacctgcgaaccgaggaagacaaccttatcgactatgagcagggttacgaatactcgttgctcgccgagtcccgcaacatggtggccatcaagaaaacgtggcatagcgatgaaaaatacaccgctaacaaggacgagcgctcagcgaccatcaaccacacgcaggtgatgggcgtaactcatgacagtgataccgccaaggtattgcagaccttccaagacaaaatcgtgcttaccactgattctggcgggtaccagtatgcgaaacaggtcaatgcctccgcgagcggcgtgagcttgtacgacgcatatatggtgcgagacaattcgtaccacctgtattcggtcgaagacaacaaggaaatcatgagtttcccgttgaattactgcgatacggactactcaagttgtgatttgagccgaatgcggtatctcggcaagaacatgtatgtgaccgatgattcgtatagcggcaagtttgtcatcgatagcacgaccggcaaacggcaatcgttggaagacgtgctgggactgagcaaggatgaggacgtcaaggccattgaccaattctccgacggcaccctctacgtgcagacggatggtaacggcaacgaaagcaaacgcgtgttcctgctgtcgtccgatctgaagcccacggaagtgttggatgggccgcagtggggtcgtctgttgctgaccgacggcagtttcaagggcatcaactatctgaccaagaccatatacgtgaagaccacggatgagcagatcatcgttgatgcgcaaggcaagtccgtgggcaagtacacgcaattgccattgggtgatgattccacggtgtgcgaccatgccgctatggaatggatggcgtggagcccggaatccagcggagacgtgattgtgaccatcggtcaggccccgggcgaccccgcaccggatctgagcaacagttcgtcgcaaagcgagagtgattcggattcgtcggactcggagtcggactcgtcaagttcgtcgagctcatccagcgataacaagtcagactcgaagaagtaactactgcgttcagcggtcagtgaccgcccagcccggtataggcatagccgagcaaccgtcactgaccgcccgccaacggcaacaataaaccgcaggtaccgtacgggtacaagttgttctcacagcttgcttggtacgttacctgcggtttattgatatctgggggggggtatcgctggcctgtacagtccagaggtcactgctgttcggagaactggaagaactggtctccgatacgcaccgtggcaggcgcgctgagcttgagcggtgtgcccttggtgacttgggtctcctggccgtcggcgatgatgtaggtgccgttcaacgatccatagtcctcgatccacaacgcgccatcggtatcgatgctgatggcggcgtgattacgggacgtggtgcgggtcgggtcttcgatacgctcggccttggcaccctgcggcacatccatggaaggcttgcggcccagcaacgtgctcttgtcgatcacaatggtctggccggtgacatcgttatgcagcaggtacgtcttcttcggtgccttggacgtgaacgaggaggagagcacggtgctgtcccaatcctcgatgtcgttttcggcggcgtgcggtgtggtgtctaccggagcggcagtgggctcagcggcggcagtggcggcgggctctgcggtaaaagcggcattggttgccgcttccgcggtgctgggctgcccgtagtcattctgcggttcggctgtgccaactgcggaatccggggtgccttccaccggatcgtcagaataccaacccagttcaggtgctggagggtagggaagtttggccatgatgatgccgtcctttcactgacgggaagccaaagcggcgttgatcgccgggtcgccgagctggcccagccattcgatcagtgccggataggtgttgggattacgggcgatgcaggcgcgtagttcaggcgcgtattgggcaatctgggcgatttgcatctggtcggtggtggtcagggcctgttcggcggtgaagccataaggattggtggccacaggctcctcgaatgccgcctgagccgcgggctgctgggctgcgtactggtcggcagcgggctgggcagcggc

SEQ ID NO: 3979 - DNA, 29343 bp, Unknown
  R22_24m  MAG No. k141_36575
accatacttgaaaatatgacgcgtgggccctgacgacctctcaaagaacggcatgacaccaccatacgaccagcatcgccgcgtacacaatacacatcacacgcggccggcaagaaaaccgcacaactcctgcgccaccggtagcatctgcgactccaaaccggggttcatgaaacggtcgtagatattccacctatcgcacagggacacccacagatacgcccgccccgaagcaacaatcacattggggcgcaacggatgagcggacaatacctgcaacacattctgcggcggccccaccaactgtggccgaaccgcatgccccaacaaatcgcttaccgagcaccacgcataccccctgcgaacgagccggcacaggcaacaccaccacctgcatataccgcatggcgtaattactcaaaaagccattattgtcatacacattcagcgtgaacgtcagccacggtcccttgctgtagaacctgttcacccgcatattacgcacggcttcgccacgaagcaccaccgtgcttccagcatcgacggtccgtttggcctgccaatcacgcgcatggaccgaatacgtgaccgaagaaactccgggagccggctcataacggatctcaaccagcacaggaaccccgaaaccacggaaaaagcccaacacatcatcgcaatgcaaacgcacgccaccatgaacgacgcgatgacgccgttgcgataccaataccgccacgtcggccacatgcgctgcctgacacggaccatacgccagccgagcaacgaaccagccaccacgaacacgcaccagacaacaatgccgtaccggaaaaccctacccacccagaaaggaaaaccagatttatcagcattcagcagctacagcacgccgacgaacaccacggcctccagcatgtaccacggccaatccaactgccgacgaacaaccgcaccggcaacagcatccacacgatcccacatcatcaaccttctctcatcaaaaaccgcttcgtaaggcaaccatacagtcagcagtacggacaacaagccggctatcacacgtaccagcacagctcctgtgccacacaagcagcatctgcgactccagcgccaggggccatgtaccgcgaatcattgtcgcacacattgatcggcgtccacaggcaagccaggccattcgtcaccttcatgctgtcatgatttccgtggaaggccggggtgagcgctgcagaagcgcaaacgatagccagtggggtctgttcgtccgtccgccatggacagtggccggccgaatacagcctcatgcctgtgggacggcacgcggatttggccggtttccgcgcggcgtcccgcaggaacgtgggatggtagagaaatcaatcgtttgacgttcgtggcgttccacactatcaaccgccagaaccgcgcaatcacgccaatccccgttacggaccataatcatcccccgggctctctgcgggacggcagacgaaaaaccgcgaaatccgcgcgtcgtcccgcacttcgcccggtccacgaacaggacaagcatcaccgatagaccgaacacacatctacagccgcgacaagaaccccaacagctagccgcccgccccggatatcgccgtccaatagtaaatcgagcccaaaacgcaaacccaaagcactgactcagataataaaactcggattttccaccacagacagcgagaaactctcccctataccaagtagcgtacgtgccaccttgctcgatagacgaacaatgagaagtatcggttaacgggcatgccgggcaggtcgatgggctctggcgcgggaacgaagacggcgtaccagcacgaatgggccggcaaacgtgatcgtatacaacacgacggcgaggaacacgctgagccatgcggtgaacatgcccaacggcatctcctctaccggagtggtctcggctatgcatgcaacgatctatcactccgatgttgtggtcagtatgcgcggcagttgttcgtcacggttgaggaaagaacgcgtttggcaacgaagtagcgtacgccggccttcctcagtgcgggtgtataccatggtgcaatgcgtcaggcagcggtccaactgccggcgcagtatttcggcgtcctgctggcggcgggcaaatatggacgggcatgggaagcttacaccgtacgtgcgcacgccccattccttgccgatgatgacatatcgcggattgttgatgggcgcgagtagctccttcataacgccggcgaacagcacctgctcgcgccgcgaaccaccaatcagcatggcacgcaacgccgtgaatctgcgacgtgtctggcggatcgaggaagtcactcacctctttgcctaccgcgttggtttctaggcgctcaggttccgcagtcgccaaatgccagacattggccaccttatcggggtctgcggccacgctgcggttggcggccatgctgtatgcttcactgcatcagtgtaaggcacgaatcaataggttttgagccccagatcgatggtgagaatgatgccggcgattacggcggcggcgcgcatgatgtttgcgggaatcttgcgggtgatgggcggggcgatgtacccgccgatgaagcagccgatgcacagcatgatggcggccggccaatcgaccgcgccttggatgatgaataccactgaggcgctgatgttcgcgcctgtgccgatcagggttttcaatgcattgatcttgtggaatgggccgattttggcggcatcaagcatggcgagagccagggtgccggcgcccgcgccgaagtagccggagtagatggcgactgccaccacgcccagccatacccaccaggaatcctggctcatgggctgcacgagttgttccggcgggcggtgaggtgcggtaggggtggttgcgcgcttggcggcatcagtggcatcggtggcttcagtggcttcgatgtgcttgagttgcgcggtggcatccgcggcggcctgcttggcctgcatgcggccgcgcggattgatggcgatgatcagcgagctcagcaaaatcagcactggtgcggcgaattcaaagacactcgggtcgagtttgagcaacagaaacgcaccggccaccccgccgaacgcgccaatgaccacatacgtaatggagcgtaccgcttggcctttgagttctttgcgcgcgcccatcacgccaccgatgcccgtgccgaccacgccaacggtgttagaagcgtttgccaatacaggcggaatgccgaacgcgagcaaggccgggtatgagaccagtgacgatgcgcctaccgcatagcccacgaatcctgcgccgattccggccaacagaatcagtagcaatgaagttatggaaaagcccgcaatcattccccgtatccttgtcgctcatcgaccggcacattgccggccttgagcgagaatacgctgttgaggattggttgcgggttttatgttggaatgtggacgtagctcctcgcggaagcgattccctcagtcgcctgaggcgacaactcccctcgcacccgaggggagccagaaggaaatcagagcgcttcgttgtattcgcgaaccttgagggtgcggtgggaggatgccacgttttcgacgatcagacgcttcagggcgttgtcggcggcaatgtgctcgtccagccaggcgtcaccgagcttgaccagcgtggcgggatcggcgtaacccgggtacaggccgttgagcaaagcctcggccatgtgataggtcttgttggcccagacccagtccacagtctcgaagtacttggcggcgaacggctcggccaggtcggggcgcggggtggcggagaagccacgggccacggcctcgagctgggagttggtcagctcgtcgttgtggagtgcctgatcccaagcccattccttggcttgcgccgtggccatggaggcgcgggcgccgtaggcgaactcgcggttttccgtggtctccttcttggcgagctgcgcgtccacgtcgtcgttggtcatctcgttgacggaggtgagcgcttggacgatggtccacgtgaagttgttgtcgatttcgaggccttcaagacgcacggtgccgtccagcagaccgtgtgcgttggcggcgaatgcggcatcgccctcctcgccatagcccaggtaggcggtggcgagctggaactgggtgtccgagccggcttcggcggcgttggccagggtccacagctcggcggccacgtggcgcagcacatcgtcgcggcgggctggcgccacgtagtggtgggcggtggtgctcatgcaggccagcgcgtaacggaaggtggtggattcggtttccgtggccagaagacgcagggtcatgtccacgaagcgttcggccgggaattcgccgtcacgggtcatatcccagaaggcgagccaggtcacggcgcgggccagggcatcgtcgaaacgatgcaggttggcttcggcgaatgcctgggattcggcgtcgaaacgaatcttggtgtaggtcaggtcatcgtcgttgaccagcacgaatgccgggcgcggcttgcctgccgcggcctcgacgatggtggtttcgccatccacgtcgagttcgaactgctcggtgcgcacgatcttgccggtttcggcgtcttcgttgtagaagccgacggccaggcgatgcggacgcagcaccgggtgttcggccggcgcgctctgggtgagcttcaattcggcgatggtgccgtccgcgtttacggtcaggccggtggcgatcgtgttgatgccggattcctccagccacttggcgctccaggccttgagatcgcggccggaggtcttctccagttcgctcagcaggtcggccagggtggcgttggagtaggcgtggcggttcaggtagttgtggataccttcgaagaactgcgtgcggcccacgtagaatgccagctgcttcagcacggaggcgcccttggcgtaggtgatgccgtcgaagttgacgtaggtgtcgttgaggtcgttgatcggggcgacgatcgggtgcgtggtgggcagctgatcctggcgcaacgcccagctcttctcaccggagcagaaggtggcccaggcgtcatgccattcggtggcttcggcagtggccagcgtggaggtgaattcggcgaaggactcgttgagccacaggtcgttccaccacctcatggtcacatagtcgccgaaccacatgtgggccagctcgtgcagcacggtcaccacgcggcgctcggccagcgcgtcggtcaccttggactcgaacacgtaggagtcacggatggtgaccatgccgatgttctccatagcgcccgcgttgtattcgggaacgtagatctggtcgaacttggcgtacgggtagggcacgccccaggtcttggcgtagaacgcgaagcccttcttggtgatgtcgaacaggtagtcgacgtccttcgcgaaggccttggccaacgactgtcggcagtactgggccatcggcacggtgcgaccgtcttcgttcaggtattcggtgtgccattcggcgtacgggccggcgcagatggcggtcaggtaggagctcatcaccggggtcggctcgaagtcccacagacgggtgctttcgttcggcttgtcgccgagggtgccgtcgagggtttcgcgcggatcgtcctcgatggtggcaaccggcatgttggaggtgacgatccagctggcgggagcgagcaccttgaaatcgaaggtggccttcaggtcaggctggtcgaacacggcgtagacgcggcgcgcgtccggcacctcgaactgggagtacaggtagatgttgccatcggacgggtcgaccgagcggtgcaggccctcgccggtgttggagtaacggcacttggcttcgacggtgacctcgttcttctccttgaggtcggtcagttcgatgcggttgtcctggaaggccacggctgggtccagggacttgccgttgaggtcgatggatgtcacttcgtcggcaatcaggtcgaggaaggtcgacgaaccaggcttcgcgttgaagcagatgagcgacttggaaccgaagttcttcgcgccgaccgtcaggtcaaggtcgacgtgatagtgaatcggcgcttcgataacggccttacgttcttcggcttcaatacgagtgagattagaaccgggcatgacttcaattactccttacggtcgtccctggataatccggactacttggtttctacggtttcgacgtcctgggcgatgtcggccacgacgggcacgatcatcggcttgcggtgcagctggcgcgcaacccagctgccgagcgtgcggcgcatggtctgctgcagcttgtaggtgtcacgcgtgccctgcatcatctggtcgttgagctgttcgacgatctggtgacgcaccttgtcgaactcgctttcgtcctcggccacggcgttcaggtagatcttcgggccggtgacgacctcgtggttgtcggtgtcgaccaccacgaacgcggatacgaagccctcggtgccgagaatgcggcgcttttccagctcgtcatcggtcagctcgccgacggaatcgccatcgacgtacacgtaaccgcacggcacggagccgacgaccgcggccttgccgtgatacaggtcgaccacgtcgccgtcttcggccaagaccacgttctgcgggtccacgccggtcttgacggcgatcaggccgttggccaccaggtgacggttctcgccgtggatcggcatggcgcacttgggcttgacgatgttgtacatgtacagcagctcgccctcgttgcagtggccggacacatgcacggcggcgttgtcgcggttgacgaccttggcgccgagctgcacgagcttgttgatcaccttgtagacgccgtgctcattgcctggaatcagggagctggcgagaatcacggtgtcgaactcgttgatgtggatgtcgcggtggttgccgtcggcgatgcggccgagtgcggccatcggttcgccctgggaaccggtgcacatgaagacgagcttgtcgtcctgaatgtcgttggcctgcttcaggtccacgacggtgccttcggggatgtgcaggtagccgaggtcggcggcgatggacatgttgcgcaccatcgaacggccgacgaacacgaccttgcggccgtacttgtgggcggcgtccaccacctgctgcacacggtgcacgtgggaggagaagctggcgacgatgatcttgcgggtggcctgggcgaacgcttggtcaagggccgggccgatggaggtctcgggcttgacgaagccgggcacctcggcgttggtggagtccatcatcagcaggtccacgcccttttcgccgatcttgccgaattcgacgaggtcggtgatgcggtggtcgagcggcagctggtcgagcttgatatcgcccgtgtcgatcagggagccggccggggtcttgacgtagacggccagggcgtccgggatggagtgggtgacgttgacgaattcgaggtcgaaggggcccaccttgagcttctcacggccggcaacctcaaccttggtggggttctggtggtgttccttgcacttggcgtccacgaaggcgagggtcagcttggagccgatcagcgggatgtccggacgcagcttgagcaggtagggcacgccgccgatgtggtcctcgtggccgtgggtgagcaccagggcgtcgaccttgtcgagacggttcttgatgtagctgaaatcgggcaggatgagatccacgcccggctgctcctcctcggggaagagcacgccgcagtcgatgagcagcaggtgaccgttgtattcgatcacgttcatgttgcggccgatttcgcccaagccgccgagcggcgtgatgcgcatggagcccttgcggtacttcggcggggcgatcagcacggcatcctgctggggtgcggtggcctgccgggtggcgttgatcttacgggacggcgtacggctgttggatccgttggcgttgcggccgcgcgcggaaccgcgacggcgagaattcgtgttcttgcttgttttcttttgttcttgtgccataacctttttgggatttctgttgtggtgcctctgctctgtcatgcaggggcggcgggctggcaacccgtatgcagcgtttcgggcttacagcagtccggcagcgcgcatgccctcttcagccttgtcaagctgagtggcgtcgggaccgatgttcggcagacgcatggtggtggaggggataacgcccttgaccttgagcgcagccttggccatgacggcctgatagccgtcgccattcaacgcgtggacaaggggggcgagctggttggcgaggcgacgggcggtggtgatatcgccgcgatcgaatgcctggacaagctgctgcatggggttggaggcgacgtgggcaatcaccgaaatgatgccgacggcgccgatggagaggaacggcaggaacaggccgtcatcgccggaataccaggcgaggccggtgcgctgctgcttctccactgcggctgcaagatcgccggtggcgtccttgacagccttgacgtgttcaagtccggccagtcggtcgtaggtttcgaccttgaccttcaagccggtacggccgggaacatcgtagacgatgatcggcttttcggcggattcgtcgacggccttgtagtggccgacgataccgtcctgcgaggggcgggaatagtaaggcatgacgacgagcaccgcgtcggcgcccgcttcctgagtctgttcgaccatacgcacggtgtgtgcggtgtcgttggagccggcgccggaaatcaccggaacgtcgacgacctccttgacggccctgaccagctcgaccttctcatccatatgggtgacgggcgattcaccggtggtgccattgaccaccagaccatccgcgccatcggcgacgaggtatttggcgagcttctgcgcggcggcgaaatcgacgctgccgtcggatttcatcggggtgaccatagccggcagaatgcggccgaaaggcgctggctcaagaaggtgcatgtcatgctcgctcatagtgttcaccgtacttcccattgtggactcttatactacgtaccttgattgttgctgaatgcgtggcattatggccggagccggtggcaatgccgtgatgcgcgtcccggcgcgcttccctgcctgaaatgcgggggcgactactggtcgactgcgggtcgattacaggtcgaggaagtggtcgaggccgatggtcaggccagccggagcgtcgccggcgagcttgcgcacggcaagcaggacgccgggcatgaagctggtgcggtcgaagctgtcggcccgaatggtcagctgctcgccggcgttgccgaagagcacttcctcgtgggcgttgaggccgcgcagacgcacggcgtgcacgtggatgccgtcgaccacctggccgcgtgagccgccatcggtttcggtggcgtccggcacgggggcgagtcctgcggccttgcgcgcttcggcgatgccgtgggcggtgtgaatggcggtgccggagggggcgtccaccttggtggggtggtgcagttcgatgacttcggcggattcgaagtatttcgcggccttggttgcaaagtagtcggccagtacggcggagatcgcgaaattaggtgcgatgaagaccttctgggtttcgggcttcgggccgttggcgatggcggatttgacctgggcgagtttctcgtcggtccaaccggtggtgccgaccaccacgtccacgccttggccgatcagggtcagcacgttgttcaggctgacggacggcacggtgaattcgacgaccacatcggtgttgtcggtggtgacctgggtcaggtcgtcaccggcatccaatgcgagcgccagctgcgtatcctcggcgttgttcaccgcttcgaccacgtgcgagcccatgcggccctttgctccgaccaccgaaaccttgatcatgtcttcttccctgtctacccgtacctgcccggcaatgtacccggaacgttttccaatcggcaatcagcctatcaccgccaagccctcacgccaatatcccgtccacagaatcgagctccctctgacaagccgaaccgtgaagtcgagctccctctgatgagccgaaccgtgaagaaaacgccggaggcgtttttaggtgagggcgaacgacagtgagcaataattcagttggctgaaagccatcatctaattgcgttcgagctggccgcgaagcggactgagggagagacccccggcgaagccgccaaccatccatcaggcgtagcccgattccgtttcacccacgccgcttggccaaggcccatccggccaacgccaatggcacggacgccagcgtgaagatgaatggcagcatcatgcccacatgagggttggaggcgtcaagcacaatgccggccacggacgagccgatcgatgtgccgaccgtgcctgcggtggttacccagctcagtccttcggtcagggattccgccggcaccagatccttgacgatgaggttgccggtggcgaacgtcggcgagacggtcaggccggcgaggatttcgaagacgcccagcaggatgagattgtccattgacagccggaagaacacgtagccgacggtcagcagcgataggaacatcaccatatgcgcccaatgggagcctttgagtcggcaagagccgaacaccagcgcgccgatgcacgagccgaccgcgaacatcgccaattgcagaccgaggaagggctcaagtcccatggatttcatggtggcggtaatggacacgtcgaaggacgtgaagctcatattgaacacgatgaacacagcgagcaacggcagtacgccggcatagagcaatacgctcttgggcttggcgccgctgcgtttgagctggcgcagggtcagctggtcggcatcttcgcttgcagcagggctgccgtcatcgtgcgcggccacggtgacctgttccacgataaccggtggctgggtggatttcagcgagaagaatatggtgccgccgataccgcatgccacggtgggcacgaacagttgggataccggatgcacggaggtggccagccaagccgccagaatcggccccagaataaagacgatctcgtcaatggcggcttccatggcgtaggccgtgttgagcagctgttcaccatcttccacaccgcgcaacgcataggaccagcgtgttcggaccaatgcgccgaatgagaactgcgtcagacccatgatgatggccaggacgaacagcagcggaatcggcacgcgcaccaacgccgcgaaggcgaaggcgagcatggccacgatctgcacggcgagcgcaagccggcccacgcgggcttggccgaaacggtcgaaggcgcgggcgtagaacggggtgacgcagctcatggccagcacataggcggcgctcatggtgccggcgatggtccaattgtcgtagagatggttgagcgccagaacgatgccgagactcatcatggagatcggcaatcgtgccaccgcgccggacaggcagaacgccttggctccgggcagcatgaacaggcgctggtagggcgagtgggcagcggacgacttcgaaaccgcgcgagtcgtggacacaataactccttactggtgcgttgtccggcacgtgcgcccgcccacacgtgccatccgagggtagcggttcccgagcaacgtcacgcggtgcgtttcaaccgcggaccggtacgtggccagtcgtcttcatcgtcggagatgccttgcgatgcataaggtctctccaccggtgaaggccgtccgatgctgtacaggtcatgagcctttaggctcagtcgttgtcagattgttcgggaatgccggagctcaactcggtaaggatttcctgtttggttttcgcgcgggcgtgaagctcgcgcaagccctcgtcgggctcactgacatagtagagagtggcgtcgatactgtccaattccacaccttcgaccgctgccagcagcagtcggtacatgtcgagctgggcaagtttgcgggtgatgtcgtctggcttggtgggccgacgaccggttttccagtcgaccacggtaaagcgtgcggtggtgctggacgggtcaagtccaccgatgaataccgcatcgagtttgccattgaccaggcccacgcccggcacgtccacgacgatggcacgctccgtccacgccgggatgcgcttggcccacgatgattcggccagtctgcgctgccacgccaccagcttggactcggtggcattgtcgctacttatggaagtggcggatgcggcggatgcggattgttgagccgtggactgtgggacagcgggctgccgtgtggagggcttgcgacattgccgctcccgttcggccaaatcggccaacatggcttcccgggaaacgaatcccgcatcctgacctgtatgcggcatacttgattcggcttcatatgccagtaccgcttcatccggtttaccggcattgatgaattgctcggcccacgcatggaactgcgtgccggcttcggccgccggagacgatattcgtggaatcggacggataatgctacgccagtagaggcgctcctcccgttcgctcatgccacctacgcgggcttgcaggcttgtcacgttctggcgtccggcggccagaatgcgttgcgccttggctttgactgcctcatcaagcgactggccgctggcggcatcggccatcaaatcggcgtcgtccaccagcaattgtgcccgttgcaggagtgggccggcgtcttggtgctgctcaagtgacgaggaatctgcggcgatgacatcgatgccgcgtgacagctgttcatgcaccgcgtcgctgagggtagccggccacggcaattcgacagcggcatccgtctgcgtaatcggcgtttgccatgactcccccaccacggcgtcaccgtatgccgcggcatgctctccgataaagaacccttcgggaggggcgatcgcttcgccttgcgccgagatcagcatgggcttcccggcattggcggcttgcagccgttccacacagtcctgagccgatatcgcatgttcatgggcttggagcgcgtcatgcacttcaagccagaaattggatggctgagcggcgcgagagcctttgggcaccactgacgggtcccgcccggattcgcccgtataggcgcaataggtcatcagggcatcttctcgtgcacgggtaagcgccacatacatcaatcgacgttcgtcggcatgcagccggcgcccatattcctccgcctgcgtcaaataccagccggatgcatccacttcttccacgccatcgccgaattcgcgcatggagccgaacacttcatcatcgataagctccacatcatccaaagccgccaacgatgcgatggggttggcttccacatcggcatcatgggggaatcgcggcaaaatgccggcatcggcgcgcataggcacgggtacggcggtggggttggtgagccaggagtcggcggtctcgtgatattcgggtgcggtccagtgaccttgctcggtgcctcccgtatggtgttcgtccagcacgatcttgagatggtcgccctgattgctggggaatccgccggcggtaagccccactaccgcaacggcatcccattccaaccctttggactggtgtacggtcatcagttccacatccaccggagcgtcggggagactggcggcctcatcctccaccgaagccagatgatccacccatgtgatgaacccatgcaacgagggagtttgctcagcggcaatctcttgcgtgtacgtatccaccaaatccacaatcgcatccataggcatatgcgccaaagcgggattggcgcggtgctgcggattatgcagcacaccggccaatacggtgtcgatgtcaagatccaacgcttctatgccggcgcgaatcacgtcgcccagtggccgcccgacggcatcatgcacctgactgagcatcaccgcggcccgggttatggcgttgcgcccgtgcgcgctcaaccgttcaagcagttttaccaggtcgccgcgtagcaatacgtctggcaggaataccgcattggccacctgatcgcggtactcacgcaccacagccgcccattcattcgctggtgtatccggttgggcaaggccggcctgcaccaatgcttggaagcgttgttccatgttctgttcttcagcaaaacgggccaacatggtcaaatccgctgcggacatggtgaatcgtggcgtggccagcaagcgcatcagcgatcccgtatcggtgtggtcggcggccacgtgcagcaacgccatcagatcgcggatttccggacgttccagcagcgcggaatagccgaccacgaatgtggtcaatccggcctgttccaatgccgcctgatattcgggcatatgtgatttggaccgaaacagcacggcgaccggcgctttctgttcgcccggcatctgttcctgttgttcggctgcggaacggtgccgtgtgatggccgtcttgcagaaacgcactacggcgtcgatctcctgcccggccgtggcgaagcccagtactcccaatgttccttcgggggcatcaggcatggggtcgagcgatgagacatcgacctcacgcatcaatgcgcttgagggacgcgacggattggagcgcaacggcagcgtgagattattggcggcttcgagtactatacggctgtttcgcctggtgacggacagcgggaatggcttgtatccggcagacaggtggaaatcttgctggaacatacggaatgcaccagggctggcaccacgccatgcgtaaatcgactggaacggatcacccaccgcgttgacggcggacctccgtgacgcatccacatggaacagtgctgccagcagagcggcctgcgtggtggaggtgtcctgatattcgtcgagcagcacatggctgtacctgcggcgcgtgcgctctccgatggaggggaagcgctcgataagctgatacgcggcaatggtgaagtcggagaattcggccatattgcgttcccgcttggcttgggcataggcctccaccagctggagcagaatatcgcgtttgcgtgtggtctccagcagcgcaccgcaatgataggcgcagcgggcgtgcaaatgttcggcacggtcatcgagcttggcttgccagctggcgtcggtatctttcttcagtcgtttgatcttggggattttcggctcgtcctcgggcatgggttcgtctgcgacggcttgctgcaatcgattgatgaatgccgaatcccattgccgtacttgattgatcgcatcatcgaagctggtgcagccggcaccgatcatggcactgccaatggcatccgacaacgccagaacacggttcgccaaactggagaaggcgccaaaatcctcactgaacgccagatccatgtgactgtcgatgacttcggtggccagttgaagcgctccggctgcgctcaatggttgcgtgttctgatcgaatccgacaagcagtccatattggcgcacgatggtctggaagaaggcgtcatacgtgaaaatggccggcttgaggaatgcccgatcagacactgtggcggtcgtagagtccgccatatcaccggccactgcggcggagacgcgttccagcagttcgcctgcggccttgcgtgtgaaggtcaggccaaggatgcgttcaggtgccacacctcgattgataagcgcgatgatgcgttgggtcatcgtaaaggttttgccggaaccggcaccggcaaccaccagtacgtcagcatcgactggcgcatcgatgatggcggcctgttccgcactgggagtgaacgtgctcatgcttgcctcgtttcgaaaatcgtgtcgatctggcccgcacaggcagggcagacgttcttcatacggcagaatccgatatgggtgtcttgcggatgggcctcgatgatggccgacctgctggccgccgcggcatagaatacgcgggcgatcatggtcagcgaccataacgtctgcgtaccggcgagcgcggcgaattgcgcccacgcttcggcactcacaccttcgggaggagtagccggatctatggcgggtatgtcgaagaaacggttggggtctttataccagtatcgtggcgtgaacggttcggcattcaacgaaccatcagtgaacagcggcggctggaaggcactttccggggcgtagcttctggctggtgccgcattctgcccgacatggaacagcgcgctttggctgatatgcggcattgcggcaagtgccttggcaccgcgcggcccgtcttcggggaacacgaggccaagctgatagcacacgagctgcagatcattgaaaatctgtttgaccgtgggcgttctgcctgttttgtagtcaatgaggcgaatgcattcgccgccgtctgcgagtacgcgggtttccatacggtcgatgcgcccggacagtctcacggtcagatgctcgtccatgccttccggccaccctccgaccagtgctcccatcagacgtaccagcatgttccgatcgatcgggtgcatgccgggcacggcattgtatgcgtcgagtatgtcacgcacatcgaatcgtgcggcaaactcccgttcgcattcggcaccggccaatgcgccaatgctgaagttgctggagttcttgccaagatacgtttccggatcggcgtcgctgcgcacaaagtaatcggcgatgttgcgcagggcatctgccgcggactcgtccttacgggtggcctcatagcggttccgggtgtcggctatggcattcggatcggggcgtttgctctgatagatggcattaagccgtgccgtgacagcctcgatgcggcgttccgtgccggccgtggagtccaagcccagtgtggccaacgtctgggcattgtgggaaagatggtccagcccttcctcgctgccttgctgtgcaaccgcatggatgagggttccgaagctggtggccacggagctggggcgaggaccggcgaaccggttctccagcatccagcacaccggacatgcccataggctgtcgaccgccgatggagacagggtgaccatgggtgcggcctgcgcatccgtcttgcctttccccgtttggataccgtcagactgtacaccgccagatgacgcgctgtcggatgaggcactgtcggatgaggcaccgccagatgaggcaccgccagatgaggcaccgccagatgacgcgctatccgattgggccggcgattccacgaacgcccagctctgcggatttgcggcgcgcacaccatgctccgacaggagtgtcaacgcaaccgcggcgtcctttgcggcagcctgctgcggttgagcagtggccagaaccgcgcgggcggcgctgaccaacccacgtgggtcggcgtccaatccggccagatcatattcggcggatcctgtatgcgcccccactgtggtgaaaggcgcctgttgccggttgcgcggatagtattccggcagatacccgaaaagaaagtccgaggggctcatgctgtcgttccataccgcgctgatcatgattcgccgtgcacgggtcagcgcgaccaggaaacccttcttctcgcccgacagcacagccgcgaactgcggatcatgcccggttttgtcactttcttcaagcgctcccctcagcacgagctcggcaaggtcttcaccaccgaacatggtgttgcgcccggcgaggttcggccacacgtcttgctggaccaccggtatccacgcatatccccagtggcgtccggccgcgcctgccggcgtggtcaatgtcacagcgtcttccaccggccctatgtgggccaaggaatcggcctgcacttccatgccccgaacctgtgccatgaatgacgtgatgtctcggctggcggtggaatcatcggcgaactggaacaggcgcattgccgcgtccagccggtcattggccgtgcgcccctctgccgtgttgaataatgccgcacgctgccagaccggtgccagaccggtggcgttccaggcaacagacagtgcataacgcggctgtacgcgctggcttgccggcagccgctccaagccggaagcaacgctgcccaccagatgccacaggttcgcaaaagcgcgggcctgagggtcgttgccaagcaccgcatggatggatgcgagcgcagcctgcgccggcgcggcggcatcatcaacggcaagcatcacgtacagcgcgtcaacgccaaaggccaagtcatcgtcggacggttcaccgagtatttcgacagacactggcgacggaaccactgatgaggatgtttcacgacctgtttcacgccgtgtttcatggtatgtttcacgcaatgtctcccatgccgtcgtcagagaggtcagcatggcatcatccgtggcgagatgcgccagcgactccaacgaccccatggccgattcgatcggcgcgagccttgcaggacgcccttgaccgggtctgcccccggcactcaccaacgggccgttcatcaacgtggccactctagtccttatatatgccgcgcaggaagccaacgtcatctggcattccgccattccctcggcacgcaatcgggcaagctccacaagcgcgaacaatccctgcacgaaagtctcgtccttcaaaggacgggtgaccgacgaataccgcaccggcacgccatctcggcgcagtcgttcgccgaacagccgcacggcggcattgtcgtgggtgatgaccgccatgtcgttccaccgaatatgccggtcgagatgcgcccgcttgatgcgccagaccacatcatccagctcctcacgtgaggatcggtacaggccggcggtcaccgtgccgtccgactgataattcgctgcatcgactccgcccagcatggcggtcagcttgccgggacgctcggccggaggcagcggctcgtcttccggcgagggaatcgacagcgaaatacgagacgcgatcacatcagccatcgtcatgtgcgactgatcagcgccggtactgccgccaaccagctgttcttccttggctttcagccacccttccacggcacggcgcatcagatattccggatacgatccacggaaggtctgcaccgattcatccgggttgccgaccagcaccaacttgacgccggcattccccaactcctccaagaagcgcatgccggccagcgtggtgtcttgaacatcatccacaaccagcagccggggcaagcccaacgcctccatacgcataggccggtcggaatcatccgcgtgatcggcggcgaatgcctcatgcaccacacgagctcctgccaccagcaaatacgaggcatccaaacggtattgccccggatatgccgcgctttgggctgcaatatattcacggcgcaacgcgaaagccaaacgccattgcaccgacaatcgcgcgtcctccgtcacggcgtccaagagacgtggctcttcgtgaacgcctacaccgagctcgtccaatcgggccagcatatcgcgcaactggctgataaacgcatctgaaataccgcgagtgaacctatccgcgctggtcgagccgcctgccgacgtcggagacagcgaatccgacccttgttgcgagaggcttgattgtgcggaagcggccgagccgggcatctcgccggcaccggcatcgcgtatgagtttcgcccagtcatcctgggcaaagtagacgcgtagcaaatcacaggtgccgcaatcatctcccgctacggcatggcgcagatgcacggccatgacttgacgcagcaaagcatcctgttccgcaccgttcaacaatcgaggcgacggcaatccagttccctcgcgcgaagctgatatggcccggaatgccacggcacccagcgtggtgaccggcctggcctgcacggaaaacccgagctcacgaatcacccgattgcccaatgcgtcggcggccacacggccggatacggccatcaccgcctgcgtgccaccgtagcggcgcagccccgccatcaacaccgataaggcgaattcggttttgccgcttccaggcgtgccgacaatcagcctcgccgctccatcacggtcgatgccgtccagcactgttccaggttcaagtctcgtcatcatggctccagcctaaacccgaccgtcacagagggaaaaattttaccgaacccgacgaagaatcgtacccttgacggtatcctgtagaacgaatgcagggagagcgcattttccaaggagggagggaacagatggccaatattccgatgaggccgccgaagctgcccggatatgatttcgtccagatgttgggaagcggtgccaccgccacggtgtacctatataaccagcgtatgcccgcacgcccggtggcggtaaaggtcagcgccaaaacccttgacccacgggccgctgccctgttcaaccgcgaggccaacttcatggccaagctgtcatcccacccgtacattctgccggtatatggtgccggcgtcacctccgatggccatggctacattgtcatcgaatatgcgccgggcggcacctacaacagcatcatgaaggcccggtccatgacctgcgagcaggtactcgacctcggcatcaagctgtcaagcgcgctgttcaccgcgcatcgcagcaatatcatccatcacgacatcaagcccagcaacattctcatcacctcgcagggtttgcctgttctgggtgatttcggtatctccaccgatgtgtatgaccgtaccgaaaccggattctcgccgccgtgggcaccgcctgaagtgcttcagcatctgaccaatggttcggaagccgccgacatctattcactggcggccaccctgtacgccatgttcgtcggctgctcgccattccagcacgaatatcatccacgttcgcaatcggaactgatttcgctgatcgtcaatcagccattgcctcgcctcaaccgccccgacgtaccggccgatgtggaagcggtgctgcgccgggccctgaacaaggaccccgaccagcggtactactccgcgttggagttcgcacgcgccatgcagcgtgtgcaattcgcatatttcgggcatgccactcccgttaccgtggaagggatgccggcctaccccaaagacatcgagcgtcggcgccgggccacggaccagcgagatcagaccacccgttcgtcacggcgatgggtcaaaccggtgggtattaccgtcggtatacttgcggcgatcaccgcagcggcactgatattcgccttcgtggtcgttccccgcatggacagcgccaccggatcagataccaaacaggtggcgacgcccggcaccaaggatgatgacaacaaccgcaataatcaggatgacgtgattaccgataccgcgaacgcccagattccttccccggagaatctgaacggcacctatgcggcggatgggtcatccgtgacgttcacctggacgaatccagacccgcaaagcggtgatacctatgcgtgggccatagtgcagggcagcaataccgaccagagcgtgcaaaccgtcacaacgtcagatcccacggtgaccgtcaacgcgcaggaaggctcgcagacctgcattcaggtgtccattgtgcgcaagaaccgccagatgtccgtcagccccgccatcgcctgtgcggccaagccgcaagagtgatccgctcgccactgccgggcataccaccttggcattgcgtatcgcatcaggcatgcgaccggcagtggcgaattcaccaaatggacaacaggaacggcaggtattggaaccgtaaagcgttgtcattacactagcaaccagagaaaccagggttcagggagttcagatggccacatcgtcccagtcatacgatcgtcgccgacgcatcagcgcggctttgcgccgccttatgccctccggagggcatacgtggacggttcccgtaatcacgctcctgctgcttctgggacttgttgccggcgcggtgatcatgagcaccgtcacgcgccgccatgtgcaactggacgatggcaccgtgtgggtcacttcgctgaagaaccagaaggccgcacgattcaacgtaaagaacaaggaggccgacgccggcgtctcctcctccgccccacgattcgacatcgcgcagcataatggcgacaccatcctgaccgaaacgaccaaagcctccaccatcaaggcatccacggtcagcaccggtgtcaagactgacatcaaagccaacaccaccactgtggtcggcggggataccgtagccctgatcaacgagaagaccggcaatgtgtggaccggcttgtcggaaaaccttgattccgtggcccccaccacttccgatccgaaaatgaagctgggcgagggcgggcgcatcgtagtaacccacgatggcaaggtctacggataccgtccatccgacggtatggtgctgcgtcttgacaatcccagcagcgccaaggccaaaaccctcgaatcgctgaccgacggcaagcagcagaccgttgaaagctttaccgtcatcgggagcacgccggtaatcgcaaccggcaaaaccgtcatattcaagggcggccgcgtcgatgtcgacacgaccggcaccctcacccttcaggagcctcccaccgatgacgtacagtccgattgggtggccgcggcatcaccgagaggccttgcgcttatcccgttgaagtccaatgccaaggcgaatttcatagccaacgggggcaaggcgaatccggcacgaccggtatcgtccaagggctgcgtgtactcggcttggagccagaaggccagcaactacattcgcgcctgctcccccgcggataccagcgtcaagccgcaaaccctcgaatccgtcaatactacttccgaattggtgttccgcaccaaccatcgccttgtggtgctcaacgacacggttaacggcaatgtgtggaaccctgaggattccaccaaagtcatcaaaatacagtggaacaaaatacaggccgagcagaccgagaaagaacagcagaacaacgactcggccaacaaccaccacgacttctccaagacctgttccgcacaatccggccaaatcaaagccgaggatgatgaaatcggcgcacgagccggttcggaacagattctcgacgtgctgcgcaatgacgagcagaccgattgttccgtgctgaaaatcaccaaggttggcgcaccaaacaacaaagacgtcaccatttcgccgatttacgacggccggtatctgcaactcgatgcctccgccacatcagcaggcaccgttacctttacttacgatatttccgatggccgcggccagacctcttccgccacggtgaccgtaaccctgaatgatggaggcaaccacgctcccgtacagttcgacactcctcccgagatcgatgtggagcagggagccagttataccgccaatgcgctgagcagcttcaacgatccggatggagacccgctcactctggtctccgctgtggcccagaacaccgacccggtgcaggtgtccacccgagccgacggccagcttacgttcaacaccggtgcgctggcgtcgggacgcgtgggcgtcgaggtcaccgtctccgacggcacggcgaccggcaccggcatggtgtatttctcggtcaagcccgcgaacaccttggccgcggtcatcgacccggtagcgaaaaccaccgttcccaacacggataccgtcgtcaagctgtcctcttacgtgcatggcacttccttgcagccggcacagctgactcaggtggatacgcccaacggcgcttcgacgaccaccaatgcgacggatatgtcgttgacgttcaaggccaccaatcccggcacctattatgtgccctacaccattactcaaggctcgattccggccaccggattggctcgcgtcgaggtacagcccgccaccggcgaggccgccaaaccggttgccgccaacgatgtcgccctgcttggcgcggataataccgccattgtggagccgctcaccaatgacgtcgatccgatgggcggcgtgctgtccgtcaccacggtgagcgcaccggccgactccggcatcaaggttggtctcgtcagccataagcgcgtgtatatcactgcgcgtcaggtgcccacgaaacccgtcgcccttacctacaccgtggccaacgcctccggaaccgccaagggcaccatcgtgttgcagccaccggctctgaccacctcgaattcagtgcccaaggccagcaatatcaatgcccaggtgcgcaccggcggcatcgtgtccgtggatgtgcttgaccatgtggcctactcggatggcaccacggtcaagctcaagaacaacctgcaatacgacaaggagacgttcaagggtctggccttcgtctctggagacacggtccgctaccaagcatccagcgagaccggcaacttccccatcacctatacggttgaagacaatctgggtaatgtggcttccgccaatatcaccattaccgtgcataagagcgacgcagcgagcaaggccgcgccaaccccgcatgacgccgaagcgcaggttgccgccggacagaaggtccgcatccccatcacactgaccggcatagacacggatggcgacgacgatcagctgttgggtctgggcaacaaggcacccacgctgggccgcatatccgaagtcggttccgactacttggtctatgaatcgtatccggattcgtccggcaccgacaccttctcctatgccgtggaggattggaccggtcagcgcgcacaggcgcagatccgcgtgggcgtattccaaggatcgtccgactccggcgtatacgccagggatgacgaaatcacgttgaggcccaatacggccgcaaccgtgccggtcgcgcagaacgacatctccggcgacaacaccaatctgaccgtcgacaagcatgtcgaggtccaaggtctcgacggggtgagcgtgaaagacaacatgatctccttcaccacgcccggcagcgccaccaccgcctatatcgcctacacggtcaaagacaaggccggcttgtccgatacggccaccctcacggtaaacgtggatccgaatgccgccatcgagccgcctaccgcctacgactatcgtgtgccgtccgccgccaccatcgataagaagtccgtggatgtggatgtttcccagtggatcgccaatccttccggcacagccaatgagctcaaggtcggcgtgcatccctccgccagcgctcacgctcacgtcaagggcggtgagcattcgaccaccatcaccgtcgacctgacgtcacaggcgcgagccgtgccttacacggtgaccaatacgaaatacaacatcacctccaccgcgttcatccaggtaccggcctatggtgtctttccgcccacgttgcgtcccaaggcaccggaattgaaggtcaattcgcgtgagaccattgaaatcaacatcaatgactatgttcgcgtcggtgccggcaaggaaccgtatatcgaaagcgctgattccgtcagcgccaccaaggcttccaactccgatttctacgtgaacgacaagaccctgaagttcactgcggcaaaagactacgcaggccccgcctccattacctttaccgctgtggatggcaagcagggatcggataagaccaagatcatcaattccgcagtgatcactctccagatcacggtgataggccgcgatgtgccgccgcccacgttctcgtcctccactattgatgtcgaggcgggcgcgaaccccaagaccgttgatctgacggcgctcacccatgcaccgtccggcgtgtatgacgacgagaagcaatacacgtattccggcggaagctcatcgtccgggcgaatcaccgctaacctgtcccgttccggcagcttgcaggtttccgccaccaaggatgccgctcctggcaccaccgcgtccattcccgtgcaaatcgcatacggcgcgggcaccgtgaatgccggtgtgaccgtgcgcgtagtgtcttccacccgtccgctggcacgcgtcggcgacaagacgctgaagatcaaggccggtgccagcgatgccgtgaacgtgcttaccggcgcgtacaatccgttccccgattcctcgctgaccgtcatcagctgcaaggcggatgacgccgccaaactcactatcgccggatgcgatgcctccggaaacgtcaccatcgccgtcgcatccgatccgggtgcttccacgaacaccgtgctcgtcaccgtgcaagacggcagcaagtccaaggatcgtgaagtcaccgcatcgattaccgtgtccgtgatcgacaagcccgagccgccactgctctcccccgtagccggggaaccgcaggacagcgcggtcagcctcacatggacgcccggtgccgccaatggcagcccgatcaccaactacaaggtcagttggaccggcgccgccactggagagaaggattgcggtgccgtcacctcatgccaggtcacgggtctgaagaacggcaaaacctattccttcaccgtcgccgcgcgaaatgacgtcggttggtccaaaccgtccaccaccgtcgaagccacaccggacaaggtgccgtccgctcccaccgatgtcacggtcacaggtggcaataaaaccgccaaagtgacgtggaaagcgccgagcggtgatttcagcgccgtcgacaactattcggtgaccgtcaccggtgcaggtgctccgcagaccaaggaaaccggcaacacggccaccgagctgtcgtttacgttcaacaacaacgacatttccgatggcaccgccattacggcgaccgtcaaagcccataacaaaatcaattggagtgccgagtccgcctcatcacagccaaaggacatctggggagacccggatgcgccgaccattgcgctgtcgaacgacgacaccacaggaacggcgaaagtcactctcggcaacaaccgcaatgccggctgccggcgaatttccttgggaggagacgtcaaggacaccatcgattgcagtgacggtggcgctacgttcgatatcaatgagaacgatttgaacacccgggaaatcaccgtaacggccaccgtggtgccgcagcgcgatgcttccgccggcacaggcaagagcaggtttgtcccgcagtacaaggtccagccgcccactgacgtctacaccaccggatccggcagtacatgcaccgtgcattggaccaagcaggggcatgcgcagtcctacaacgtgactgccgatggcatcgattccggtacagctactaaccggaactcactcgacttccgaatgagtccttgggccaaatgcaataccgcatcggtgcaacaggtgttcaacggcgctaccagcgatgcctccaccggaggcccgtacaatggcgctccttacacctatgagaagaaggctgtaatcaacaaaccgcaggagctgcgctggtcagacaacgctcacgtcattaacgtcaccggcggttcggttgaggtctatggcaagcaggccaccgtacaaatcatcatcaatggccaaccgttcacgtggaaccccggccagccattggacgtcaccgacttggccgtggccgccgatggcaactacacgtggagcgtcaaagtcaccggcgggccgggatactccggtctcgacaatacggcggacggcagcagcgtcgcgggcacacgcccctctgattcctcggaggggaccgagtcgctcaaatccggtaccgatgtcaccactttggccaagaacccttggattcttggtttcggtaataccccaatatcgtcaaccaccattcacaagcagtaggagaacatccatgagcgagaacatcgacgacgcgacgcagctgtctgacacgacccgtctgtctgacagcacgcagctatccgacgccacgcacttgtccgatgccacacatctggcatcggaaccgcacactggcaccaccccgaacaccgagacggcacagcaacccgttgcgttgcctaacctgccgcagcggccgtcacaagcgtcgtcagaaaagccgtctcctactactgatgccgcctccattcctgcgggcgatgacagcaccgtgctcaagccgcgcaaggacgcggcgccagccatcccgcagcaggtcggcatgccggcaaagatcagcacgcccaaagtcgcgcttccgcacttcggacgtaaatccggcaagcaggccgctactgcgaatgctgcccccgccacccagacctcccgtcaatggacgaccacaaccgccggcaagaccgcagcatccaacgccgaaaccgtggctggtcgcgggccggtagccaatcagcaggccgccgcgcaatcccagccgcaatcccagccgcagcgtcagtcgagcaaagccgcgcaagcagccgcatcggcactgcccgccagcatcaattccggactactgccccagcccacggctcaggtccgggatttccagcagtccttcaatgcgctggtcgagaatgtctccaaggtggttatcggcaagaccattcccatcaagcaatgcgtcaccgcactgatggtcggtggccatattctgcttgaagacaaccccggcaccggtaagacccagttggcccgaggcttggccaactccatttccaccggtttcaagcgtattcagttcacgcccgatctgctgccttcggatgtggtgggtgtgactttctacgatcagaagcgcggagaattcgagttccgcgagggcccgattttcgcctccatcgtgctggccgatgaaatcaaccgtgcatcgccgaagacgcagtccgcacttctggaggttatggaagagcagaaagtcaccgttgacggcgtcacccatgatgtaccgcagccgttcatcgtgatcgcaactcagaaccccatcgagcagctcggtacctataagctgcctgaggcgcagatggaccgcttccttatcaagacgtcgattggctacccgggccatgatgtgtccgtcgatatcctcaagcaggtcgatatcaccgaccgtgcgcagaccgtttccccggtgctgagcggtgacgatgtcatgcggctgcgtcaggtggccaccgaaatctatgtggatgatgcgattcgtgaatacatcgtcaggctcgtcgaggcgacccgccacaacgagaagatcacagtcggctcctccatgcgtggcgctttggcgctgacccgatgcgcccgtatctgggccgcggccgatggccgtgcctacgtggtgccggatgacgtcaaggaccttgcagtggccgtgctcgcacaccgtatcacgctgactccggaa

SEQ ID NO: 3980 - DNA, 20121 bp, Unknown
  R22_24m  MAG No. k141_36775
ccgccgaatcctcgtgatagcgcggcacgttatccggcatgcgcgcgtaggccagctgggacagggcgagactgtccgcctcggtgaacggcagtgcggcgaaggtgtcgaaatgttgccggatatcgtcggtgatgttccccatggcggccttccttgttcgaatgtaacgaacctacggtaattctacgccgagcgggttttcatcacaggcgagtcggtcccagagtttaaaaccctatctcgccttcaaggggctgatttggccttctggagacatctatctccgtttcaaggggctgttcatccgtcatatcccgagtatgagcggcatcaccccaacgtcattccgccattttcatgctgcttctacttgggcatcagcccctcgaaacggaagtagatctctggaaaccacgacatcagcccctcgaaacggagatagcatcaatttaggcccagattgcccgttacagcatcgggtaatacttaccgtgatcgattttggcggcgatatcacgtaattcggcagcatctcggcggtcttcttcattaccttgcgacaatttgttcgctttgctgtccagatgatgctcgatgccgaagtaactgcatatccccacgagcgcaaacagccctataccaactaaccagttcatagcacgctccttgccaaagcttctgccttaatatggtactgctgttcatggatcgtaataaaaaaagcgggctcgcaagcccgcttttggttttaggttgaagacgatcaggcgccgtattcctcaaggtaggcggcggcgcgctgctggatatcgtggctgagcaacggggtgccgtcggagttcttcatcttggcggcggcgtcgaagatctcgcgcacgttggcgatggagagcaccgggaagccgaattcggcttccacggccttcacggcggacaggtcggagtccttggtcttctccatgcggtccacggagagcacgagacccacgacctcgacgttcgcctcggccttgagcttggggatgacttcgcgcacggcggtgccggcggtcatcacgtcgtccacgagcagcaccttcatgccgtcggtcagcggggtgccgaccatccagccgccgtcgccgtggtccttcttctccttgcggtcgaaggtgtatccaacggtcatgttgtggccggcgttcagcgcgatcgcggtggacacggccagcggaatgcccttgtaggcggggccgaacacggtgtcgatgttgcggggaatcgtgttgtgcacgatggcctggctaatcttttcggcgtagaacgtgccgagcgcggcgatcttcttgccgtcgtcgaaggcgccggcgttgatgaagtacgggctcttgcggccggacttcagcgtgaagtcgccgaacttcagcgcgttggattccaacaggaattcagtgaagcgatgtgcgagtgtttctgccatgatgttccttacctccaagtctgtcctgcggccagtttagcagcgagttcgggacggctgtccagcaggtcgtcaagttcgcgggcgacgcgcagcggggccaccgggtcgaagagcgcggccgcacccacttcgacggcgttcgcgccggcgtacaggtattcgagcgccttctcaccactgtcgatgccgccgagtccgatgatcggaatctccggcagtgcggtgcgcacccgatagacggctgccaggccgaccggcagcacggccgggccggatacgccgccggtgacgttggcgatgatcggctggccggtgcgaatgttgatgcgcatgcctttgagcgtgttgatcatgctcaacgcgtcggcgccgtgttccacggccgcgcgcgccggcacggtgatgtcggtgacgttcggcgtgagtttgacgatcatcggcttgtcggtcatcgggcgcagccggtccataagattggcgagggccaccgggtcggtgcccacgctcatgccgccggcggaaacgttcgggcagctgacgttgatttccagcatgtccgcgtcggagtcggcgagcttttccacgaccgccgcgtaatcgtcatcgcaatgtccggcgacattggagatgacgaacgcgcccgcggccttgagcttgggcaggtcttcggccaagtaatggtcgatgccggggttctgcaggcccacagcgttgatgttcgcggccggcgattcggcggtgcgcggcgaggggttgccctcccacggcacgggcgaggcgcccttggtgcatacggcgccgagctggctgacgtcgtagaaccagcggacggcggcgtactggaaggtgccggaggcggtgccgaccgggttcttccattccagaccggccaccttggtgtggtgcttccacacgtggggctcgtacaggttgatgtggttgtcgctgccctgcgcggactggttgtttgcgctcatcgtcactccccccatccgagctgttcgcgagtgaacacgggtccgtcggagcagaccttgagccggccgtccacggtgtcgatggtgcacagcacgcaggtgccgtagccgcagcccatgcgctgttccatgctcagctgcgcggggatgccgcgttcggcggcccaagcggccacggccttcatcataggcagcggtccgcaggacaagatgatcggcttgcgatcgtaggccttcaggtcgtcgccttgttcgagtttgttgagcaggtcgaccacgttgccttcggcgtcgtcgatgctccacgaccagtccgcgtaccgggagacgtattcctcagcgaagtggtcgttgcggtagccgaatacggcggtggcaaaggaggcgtcgtgttcggcgagcttttgcgcggcgtagattagcgggggcacgccgagtccgccgccgacgagaatgtagttggcgtcttccttgaggttgaagccgcggccgagcgggccgagcacgtcgacggtgtcgccgtcttgcagtcctgccaactgttcggtgccgtggcccacgacggcgaagatcacgctgacttcgtcgccgtcgacttcgctgacgccgaacggacgcggcatgagcatgaagtcgtcgtgcgtgaacaggttgacgaactgggcgggcttggcgtgggaggcgatgaacgggtcgtggaacgtcagtcgcatcacgcggtcggtcagttccgtaacctgcgtgatttcgacgttgtggcgcggcgggaagaatccggccgcagtcgcctccgcaaccacatcatgggtgggggtgaaagttgtcatttcattcctattcagcacatcaagctcccccctatcaggggagctgtcaaccgcaggttgactgaggggtagtcaaacacactcggctccggtttccagcccacactcacgtatagcccacagccggacaatctacctacctatatacggcaacccgcagattatcgcgcatgtcgagcgccgcctggcgcgcgctgctcgccacaaggtccagcgcctcgtcggcggtcatggattcggagtacttgccgctcttcttccatgcgccgatgatgccgcgcgacgagttgacgatggcgccgctgccctgcttgtcgaacatgcctgccacgtccgcggccgtgccgccctgcgcaccgtagcccggcacgaggaagaacgtgtgcggcatacgttcacgcaacgccttgccttcctcggagtgggtggcaccgaccaccgcgcccacgcgggagtagccgtggctgccgatggtctcggcgccccagccttccacgagatcggccacatgctcgtagaccttcgtgccgtcggccaggtcgagcatctgcagttcgctggaggacgggttggaggtgcgcacgagcacgaagatgtccttgtcggcttcggcggcggcctcgacgaacggggtgatgccgtcggtgccgagatacgggttgacggtcaccgcatcctcatgccacgggtcgaagtcgcccacgccgttcaagtggtgggcgtaggcggctgcagtggagccgatgtcgccgcgtttgatgtcgccgagcacgtagaggccctgctgggccgcgtattcgcaggtcatcgtgtagatgtccacgccggcggggccgagcgcctcgtacatggcgatctgcggtttgacggcgggcacgatgtcggcgatggcgtcgatgatcgtgcggttgtattcgaagtaggcgacggccagctgcgcggattcgatttcctccggggattcgaccgagtcacgcacctcgtcggcaaagctcgccacgacctgcggcggtaccaacgcctcggtggggtcgaggcccacgacgctggggttctgagtgttgtcaatcgcttcgatcaggcgatccatgctgctccttatgttatctacagacggctgaacatcagctgggagccgatgatcgtggcgagggggcgtccggtgacctgccagccgccgaacggggtgttacgagccctggagtggaactgttcagggtccacggtccattcctcagcggtgttgagcaccacgaggtcgacattgtcggcgtcatccacgcggctcaggtcgagcagtcggttgacgccttcacgctgcggctgagcgtcgctctcccccgcaatcacgccatccggatcatccccagtgggcgcgggttcggcgtagtcctcgaccagcgcggccacgtcggttggcacatgccccatgagttcggcgggtcccacggacatgagctcgatcagacgctcatcggaaatgaagccgccgtcgacgagcaccttgtggcacacgccgtacgcgcattccagtccgatgatgccgttgggcgcctcaaggaagccgagttccttctctgccaacgtgtgcggcgcatggtcggtggccagcagatccacggtgccgtcggcgatggccgcgatggtggctttgcggtccgcttcggagcgcagcggcggattcatcttggcgagcgtgccgtacttgagcagcgcctcgtcgctcaacgccagatagtgcggcgcggtctcgcaggtgattggcaatccttcgaccttggccttgcgaatcgcctcgaacgagatggcagtgctcacatgttggaagtgtacgtggacaccagtgcggcgggccgcttctatatcgcgggccacgatcttgagctcggtgtcttccggaatgccgggcacgccaagttcgcgcgagaccgggccttcgttcacggcacctgtatcgtgatgctcgcaatgctcgattaggtacaggtcggaggccttgacgttctccagcacctggtccaggatctccggcgtcacagcggaaccgtcgtcgctaattgcggtgatggggtgcgtgagcatggccggcgtcttggcgtcgtcctcgaatccgggcacgtacctgagccagtcggcaacgtcgcttgcctcatgaccggcgcgatccttggacgcgcacacgcacagatcgtaacgaaccggcaattgaacatcgtgcgcagtatcgtactgctgcaggaagtcgatgacgttgtcgaagccggcatccagaacctctttcgcaccggccgcttccaggtcagacacggtctgcccatccagtgccggcaacgtgttcggcatgatgagcacgttcgtgtatccgccggatgcggacgcgcggcagccggagaccatagattccttgtaggtctggccgggatcgcggaagtggacgtgcgggtcttcgaaaccgggggccacggtcagtccggtggcgtcgatatcggcaccgtcagccacggcggaggtgtcggcgaagtaggcggcagcggtcccgggcaccacgaggtcgatgacttcgccggtgttccagaccttgatgttgcgtagggtgatgctcacagtttggcttcctcgtcgcagtagtcgcagcggtattcgagccgttcggagtgcacgaggtggaacatctgcttgatgccgggctcggtggtggtcacgcagcgcgggttcacgcaggagatcacgccgacgatgtgctcgggcaggttcggctgcttcttttcgacgatcttgccgccgcgcaccacgtctacggtggcctggcgggccacgaagccgagcacatcgaggtcgatgtccttgtcatcctcgattttgatgatgtccttggagccgtaacgcttggagttggcgttcatgatgagcgcaagcttggttttggccgggtcgattttcaggtattcgagaaccttcagcgaggttccggccggcacatggtcgatgatgatgccgttctgaatgctggtgacttccatcaggcctgaacctccttggggttgagcggttcgtatccgggtagttcgtcgcccaccacggtgctttcgagggccatgcgcacgagcatgccgttcttgacttgttcgaagtaggcggcacgcgggtcgtcgtccacgtccacggagatttcgttgacgcgcggcagcgggtgaagtacggccatggacggcttggcgagctgcagcttttcttcgtcgagaatgtaggtgtcgcgcaggcgcaggtagtcgtcttcgttgaagaagcgttccttctgcacgcgggtcatgtacagcacgtcgaggtcgccgatcacggaggccaggtcgcgcacttccacgtaggagcagttgtcggtggcgttgatgcggtcgatcacgtactgcggggtcttgagctcgtccgggctgataagcacgaagcgcacgttgccgaagcggcacagggtctcgatcagggagtgcacggtgcggccgaaggtcaaatcgccgcacagtcccacggtcaggtcggtgatgcggccgaagcgcgactgcagcgtggccaggtcggccagcgtctgcgtgggatgcatgtggccgccgtcgccggcgttgatcaccggcacggatgcggcgcgggaggccaccagcgcggcaccctccttcgggtgacggatggcgaccacgtccacgtagttggacacggtcttcaacgtgtcggcgatggattcgcccttggtcacggaggccagctgcgcgccggcgaatccgatgaccttgccgccgagacgcagcattgccgtctcaaagctcaggcgcgtacgggtggagggctcgtagaacagcgtggccagcactcgcccatcgcaggtatgggcaacctctttgcggtgggaatcgatgtattcggccttatgcagcaggtcgagaatctggtttgtagacaggccgtccagcgttacgacgcttttgccgaccattggcgtttcttcagacaaggctcaccttttcgctcgtggttttcaggtggccacccttgtgtgacctaatataacttacgccatttttcggacagccgcattcaccgagtgttcacctgaaaatccaacgaatatgctgtgtctgtatagctgatatctgctttggaacgccagagctcattcattaggtcgatttgacgttcattaggtcactgcaccctcgtatctgttgttggaatgccgccattccaacaaggtatgcggcggcggaccgacctaatgaacgatgaatcgacctaatgaacgtagtgaacgcaatacaagaaaggtctatcgctgcgcgcggcgtcggttccgctccagtcgcggtgcgatcacgtgcatacgcgggcgaagcgcggtttgcggctgctgcgttgcggcggaggccgtggcggtggttgccgcagtcgcctcgtcttcggcctgcccgtagaacaggcgctggcatacgtcacggcatttgcgcatcacggccagcaggtcgttctcgaaatgctggccgcggtgggcgccgtagccgaggtagacggcgatgccgcccagcgaatagatgtcatcaggcagaatatcggcctggttggcgcgcccgctccacagatagttgccgttgcgggccgcggtgcacaacgtccatgccttgcgcagctgaatcgcatcgatagcgctgatgagcttcttggcctccagcacgtccaatgcctccaatgtgccgttgacgcgcagatctttgatatcgccggcgtgctggagctgcatgagttgcacggtccattccacgtcagacagaccgcccttgccgagcttcagatgacgttctcgacgcacgccgcgcggcagacgctcggcctccatacgggccttgagcttgcggatgttctgcaattcggcctcggtcagctccgtggtcgggtagcgcaacgggtcggcgatgttgatcaggaagtcccgcgccagttcggcgtcgccggccgcgtaccgggcgcgcagcagcgcctggcgctcccaggtcgaggcccaggattcgtagtattcctcgcaggaggcgtaggagcgcacgagcgggccgttcttgccttccgggcgcaggtccaggtcgagttcgatcttgggttccagcgtcgtcggtccttgcaggatgttgcgcaggtcttccacgaccttcttggcgaaggcgttggcttggccgtcgtcggcatcgtcggccggacggtagatgagaatggcatccgcatcggagctgaagttcacttcgcgcccgccgtaacggcccatggcgatgacggtgatgccggccggcgcggtttcgacgccgaacgcggcgatctggtggcgcacggcccaggtcagggaggcatcgatgatcgcgtcatacacgtcggtcatggccttgagactgtcggagtcgctgatcacaccgctcatccaagacaggccgatgcgttcgatttcgtggcggcgcatggcgcgcatggaggtggcgaactcgttgatgttcgagccgaaacgttccagcgccgagccggtctgcacatccaatgcctcgcgcgtgcgggcctgcagattgccgtcatcaccgagccaactgatcgattcgaccgacttgttgagcgcgtcgcccaggaatcgcgagttggacaggatgtggcacagacgctgggcagcggaggtggagtcgcgcaggaagccgaggtagccggattcggtgccgaagttctcctccagcttgcgccagttgagcaggcccatgtccgggttctggccctcgcccagccactgcaagacggcgggcaggatgatgcggttgattttggccgcgcgccccacgccggcagtgagcgcctgcacgtggcggatggcggcgtccgggtcgccgaagccgatggattcgaatcgttcctgtgcggcctcgacgctcagcacgatctggtcgttctccatctgggcgttgaccggcagcatcgggcgatagtagatgtcgaggtgcaggtggcgtacttcgcgacgggtgtcgtcgtatttgtcgacgagttcttccgggtgcaggccgaatgcgcgggcgaggcgacgcagctcctggttctggttgagctcatccacgtcgatgtcgcgcttcttttcgaggcctccgaccgaggcccggccgaggtccgggaacaggtgcgtgcgcttcagggaccagatctgctggcgatgctccatcacgcgctcgaagcggtagtcctgggacatgcgcacggcctgtttgcgcgagacgtagccgccttcggacaggcgctgcagcgagtcgagcgtgttgctggtgcgcagcgattcatcggtacggccgtgcacaagctgaagcatctgcacggtgaattccacatcgcgcagaccaccgcggccgagcttgatttcgcgatccttcagaggtgcgggaatcagatcttccacgcgcttgcgcattttctggcagtcgtagacgaagttcttacgcttggacgcgctccacacgaacggccgagtcatatccatgtaggcccggccgaggtcggggtcgccagccaccgggcgggccttgagcaacgcctggaactcccagttctcggcccactgctcgtagtagttcttgtgcgaggagagcacgcgcaccagcgcgccgtccttgccttccgggcgcaggccgccgtcgatctgccacagcggctgctcggccacgcccatgatggcggactggcagacacgctgcagcatggtgcccatcttggtgcccacgcggatcagcgtctgatggtccacgtccttgtcggccggttcgaccacgtagatgaggtccacgtcggagacgtagttcagttcctgtgcgccgagtttgcccatgccgatgatggtgaagcgcacgtgctcgctgccctcggtttcgtggcgggcgatggccagcgcgccttcgagcgccgcgtccgcgaggtcggacagttcgcggctgatggtcggttggatggaggccgggtcgtccgccacggcatcctgggcgatgatggcggccagttggttccggtagctggaacgcaaggccgtggccgcttcggccagatccttggaggcgacgggcatggccggttcgtccgggtccgcgccgaccgccttgagcagacgtgcacggcgttgcgcgtgattgaacagatggctgttgcagttgtcgactgctgcggcctccacaagctgcggcttgaagcgcatgaacttgcccatcgcgtcggagacgccgagcaccgtgaccagacgcttcagggcgtcgttgtcggggatgacgtgtttcagatcgcgctggctggattgcatcgcgttgacgatatccacgaaattgctcaatgccatatcggggtcgcaggcgtgggccagcatgctcagcagttcggcgcatcgctcatcgggaatgtcgtccgtcttgagctggtcgaacaaggtgcgggccttgtcgaggtcttgcagacctgccctgatgagatccatggagctgggtttgaacatcgacgattccataagattccactatatacgctcatgccctccgaatggggcatgagccgggaaggagtcatcgggcgacgctgatgagctccgaggaatccatatcgtaatcggccatggcgtaggaacggatggcggggtcatcataggtgttcatgtaataggtgttggtcttggacgaatatccgctggtgaacagcgtgcgttcgaactggccgtcgcccatcttcgccatgccgtccaccatctgcacggagccgagggtgtggaacaggcgagacacattggcggcttcatcgttctgctgcgggtaatgcgcgttggtgtaggccacacgaacgaagcgcgacggggaactcacgtcgcccgggatgccatgcatgcccacacccgcaccccaggcggtcaaggaggccttgccccatgaagtcggttcggccatctcgttgctgacgcacatgtagttgcgcagattttccatatggaagtcgaacgtcggctgattggtcaacacatcaacgtcatcatgatgcacgtgcatgccatcggccatctgctcgacgacgatgctgcgcttgccgtcgccgatgaaccagtgcagcagagactcctgctgtcccggcacgatctgggagacgagcgtcacgttcctgagcgccttctcgacctcgtcgacggagtcgaaattacgcgccacccacagcggaaattcgaacgtggcgacgttttccgtgccttcgaccggttcgtggacgaacgaggcgtagccggggaaattcaagccggcggtggccagaccatgctcattggcgcagtcgaaatacatcggcctatcggccatgaccacgcccacgccgatcaccgcgttcggcttcgccttgccgcccgcaccgaacaccgtgtcatagtggtagccgcgcggagtgaccaggatggtctccccatatgagaaactccagtcgagattacggccgaaataggtgttgccctcatcatcggagaaacggacaccagtgcacataacggacttccttccatcgctttggttggcttgtacgttcatgatacccatcggccgctgggggaactctgggtttcgccagcagattaacgtgcggcgcgacgcattgagatgcgccgcgccgcgatatgcgtcaaccttgcgtaccgaggaacaacggttccgcattgcgccagatacggcgcgtggtggcggggtggttcatcgaatacaggtggacgccgtccacgccgtgggccacgaggtcggcgatctgctcggaagcgtagaggatgccggcggcacgcagggactggatgtcgtcctcccacttgttcagcagggtgttgagcttgtccgggatacgcgaggcgttgcgttcggccatgcgacgcacggacttggcaccacgcaccggcatgatgcccgcctcgatcggcacggtgatgccggcggcgcgcgccttgtcgaggaagcgatagaagtcctcgttgtcgtagaacagttgggagatcaggtgagtgacgccggcatcgaccttgattttgaggttttcgatgtcctggtccagcgagtcagcctggtagtggccttccgggtagcaggcgccgaacactttgaggcccggcttcacggagcggatgtatgacacgaggtcgctggcgtggttgaactcgcctaccagctgctcgccgtcgatgtagtcgccgcgcaatgcgagtacggcgctcacgccggcctgctcgaacatgtcgagggcctcgtcgattttcgccttgtcggaatacaacgcggtcagatgcgcgactgcgggaatgccgtactccttgctgatcgtatgagcaatgcgcgcggtggcggtgcggtcggaatgggtgccgtgaccgtaggtcacggagatgaagtcggggttcagcccctccaggccgtcgagggtgtcatagatggtgtccacgggagcgttgcgcttcgggggaaagacctcaagggtgaacatcggggaatgcatgctgatttccttacataaacccgagctccctcatacagagggagctcggtgatttccgctacttgtcgagcttggcgcgcacggccttggcggcggcgaccaggttctccaggctcggccaggtctcggcgttaccacgggtcttcagaccgcagtcggggttgatccacaccttcttgacgtccatcttgtcaaggatctcgtagatacgatcctcgatctccttctcggaaggaatacgcggggagtggatgtcgtagacgcccgggccggcctcggtctcgaagtgcgcgtcatgaatggcgtcgagcaccaccagatcgccacgggaggcttcgaaggagatcacgtcagcatccatcgcgtcgatgtcgcggatgatgtcgttgaactcggagtagcacatgtgggtgtggatctgggtggtcggcttgacggcggagtgcaccagacggaaggccggaacggcccagtcgaggtacttgacgtgccagtcggacttgcgcagcggcagcttctcacgcagggcggcctcatcgatctggatgaccttgatgccgacggcctcgagatcgagcacttcgtcgcggatggcgagggcgagctgcttggtctgctcctcgtgggtgatgtcctcgcgcggccaggaccagttgaggatggtcaccgggccggtgagcatgcccttcatcacgtggtcggtcttggactgggcgtacgcagaccattccacggtgatcgggttggcgcgggacacgtcaccccagacgatcggaggcttgacgcaacgggtgccgtaggactgaacccaagcgttcttggtgaacaggaagccgttgaggttctggccgaagtattcgaccatgtcgttacgctcgaactcgccgtggaccagcacgtcgaggccgatctcctcctgcttcttgatgacggcgtcgatctgggccttgatgaactcgtcgtaggcttccttggtgacctcgcccttgcgcagcttggcgcgctcggcgcgaatctccttggtctgggggaaggagccgatggtggtggtcggcagcagcggcaggccgagggcctcgcgctgcagggcctgacgctcctcgcgggcgggctggcgcacgtagtcggcgtcggacagcttgccgatgcgctcggcgacggccgggtcggcggccacgcgggtgccgtcgaacagggcctggttggcggcgagggcggcggatgccttcttctcgtcctcggtggcgtcggccagagcggcgacttccttgagctcggtcagcttttccacggcgaacgcgaagtgcttgaggtcttcggacgagatgccggtctcgccttcagtgctgaacggcacgtgcagcagggaggatgcggtggagacggccacgttggcggtgacctgcttcagggcgtcgaccaggccgagggaggtggcgtagttgttgcgccagatgttgcggccgttgatcacgccggcgaagatggcggtgttggaggccacgccatacttggcgacggcttcgaggttctcttcacggccttcgttgaggtccagtccgatgccgtcgaagccgagcaggttgacggtctcgtacacgtcggcgatgtggccgaagtaggtgttgagcagcaccttgacgttgcccttggcggacaggatcttggtgtacagggtcttgaagagctccacatcgcccggctccttgtcgagcacgaggtacggctcatcgagctggacccatgcggcgccgagttcgttgaacttgtcgagcacttcggcgtagacggcggccacggcgttgaccaggcccttgtcgagctcgagttcggtggcttccggggtgcgggcgagcttcaggaacgtgtacgggccgatgaacacgggcttggtgtcgatgcccagcgccttggcctcgttgaactcgtcgaacggcttggtggagttgagcttgatctccgcggccgactcgacttcgggcaccagatagtggtagttggtggtgaaccacttcttcatcggcagggcggtcacgtcgcccttgtcgccctggtagccgcgggccatggcgaagagcgtgtcctcctggttatcgaaggcgagacgctcgtaacgcttcggaatcacgttgaggaggatggcggtgtccagcatctgatcgtagtagctgaagtcgttgctggggatgaggccgatgccggcggcctgctgcagcttccagtgcttggcgcgcagttcggcggcggtggccttaacggcggcgaggtcgttggcacccttccagtagccttcgatgatcttcttcagttcgcggttctgcccgatgcgggggaagccggagacggaagtcagagtggacatgaatcctccaatgtatgcgttcgtaacccgacttagggtagcaaaacatccggattccaccccttataaatggccgcagagtgtcgttatagatggaatttatatccgctttagtcgaagtctttcacattgatgaccgcgagcagttcgccgctgtgcacctgccattcgtcgaacggtttgttcgatcccatgatcacgatggatgcgggcgaaagtcccaagttgagcaggtcgagtcgttcgccgtcggagtcggcggaggcgagccattgggcgctgatcgacacagtcggctcgtggcccactatcatgaacacgcggttcttggccttgacgtggacgagctcgtcgaacaccgcctgcactcccccgtcatacaggctgatgcggtagtcgacgatcggcttgtcgccaaaggtcttgagcatgcggtccagtgtctggcgcgtgcgggtggcggacgagcaggagatctggtcgggcaccagtcccagcgactcgatgcccttgcccacggccttcgcctgtttcagacctttgtcggtgagctcgcgctccgagtcacccttgtcgccgaacggctcggccttggcatgcctcatgatgatgaggatatggtcgtattttttcgctgctttggcgactttgctcagcttgatgcccatccgtggctcccttcacgaaccgtctgcccggtgtggcggtgtggtgttgcttccagtatagaggtgtgtgagcgttcacaaactcatcgtcgggcggttattcatgcgtgttgccgagttctcccacctgacggtcgaggtcgcgcaacaccttacgtagtttgtggtcggagatgtcgcgcagttccagttcctcgatctgcgcctcacgctgttcgtcggtgagcgagtcgatgtcggtctgcgtgtccttggtcacgcgatcgcgctttctgagcgcctcgaatccggaggccatggcgcgcgagataacaaggaaaccggtatggccgatcatctggtggtcggggcgtacggcgaggccttgggccttccatgtgcgttcgaacgattcctggatctgcggctcggtccagcaaccggccgcgcgcagggcttcggccagtcgactcatctgcgtggtggtagttacgtaactgaccaacacgccgccgggggcaatcacgcggtatgcctgctcgagtctgttccacgggtcgagcatgtcgagcatgatacggtcgaaccagtgttcgggcagttcggcggccacggagtcgaagtcgccggttttgagatcccaccagctaggggcttcaccgtaatacagcgtggcgttggcctgagccactttggcgaattcggggcgcagctcgatcgtggtcagatggccgcgctcgcccacggcgtccagcagattcacgctcatcgcgcccgagccggcaccggactcaagcacgcgcatgccggagcggatgtcgccgagctggacaacctgggcgatgtccttcggatacatgatctgcgcgccgcgcggcatcgaaagcacataatcggccagtcgcgggcgcatcaccgcatactcccagccgccgatggcgcgcgacgatttccacggcttgttcttgtctttctcggggtagacctgattgacctgtgcctcgcgcttggcatgcacggtgaggatcacggtgccttcggtcttgccgatcacatcgtcatgcagaatcaggccatgctcggtctgcgtggagccgccggccacaagctgatcggtgatcttcttgcccttgcggtcggtgaactgcaccttctcgcctgcggtgagaggcccgcgcctcgactccataacttgctccttgtgtgctcggtgggtcaatcgctacaagtctaatgcatgtaagctcgttggtgaggtgatgacgatgcgaatgcagatgacaagccagatcgatgccggcggcaatgaccccattttcctgatgttccacggttacggcaacgacgaaagcgagatggtgcggattctcgacgccgtatatgcgccgacgcgagccgatgcggccccggccgcaattgccgccgtacccagctatatctcgttccgtgccacctacgcgaggccctatatgggcggcaattactggtatcccgacggctgcggcgtggacgagcgccaacgcgaatgcgcggcggtcggggatgcggtggcttcactgctggatgcctcggcattcgcccatcgcaggaagatattgatcggtttctcccaaggcggttatctgtcgtatcgtctggtcaaggcgcatccgacgttgttcgatgccgcgatcctgctcagtccttcgttcatgggcgaggaacaggcggcgcttgactcccctacccgattcttcctggcgtatggcgcgcaggaccgcacgattccgatgcccgaccagcaaacggcccatcaggtccttgaacgggccgggcatctgacctatcgcgagtattccggcatggcccatgccatctgtgatgaggaaatcgccgatatccgggatttcctacgtaccatatgatgccggaatagcttcaatatggaatatctccgttcaaagaggtaccggtccaagtagaagcggctcaacaatggcggaatggcgttggccacgcccattcatcgcgcgatggttctgcgatcagctcaattcccctgccggctgatgccgcccttatgaccggtggccttgaatggcgtggcgcgtgccgtcaccttcggccccggcagattcgtactggtattggatcgaccgcggagcccggcagccggctgggactcggagcgtcgaccagtacccgtgatgttggtatgccgtttgccgtcgtgcgcccgtttcccaccagcaccttcagcctcgtcaatatcaatgcctttggcgcgcaaagcacgcgcccaccgctcatccatcgaactcctcacacatcccattcgggtttccacgtgtactgcatgtcgtaggcgctgggcgaacggcggcaggtggttcagggtgatcggaccgaatgcggcggcgtcaaaagacatcgtttgcccccttcgatggtgttggccaacaggttccaagggtcaggcacagcgcctttctcaacccgttcgccgccacgatgaccggcagcttgcgttcacgggttcccctgcaatgcgcctcattatggcaacacgaaccgacaggtgccggctgcgcctaggatgggaaatcattgctgcacgccgaaaagggaaggcgactgtcatgaggtatttcacgaccgacacgcatttcgggcatccactggtcacggtgttgcgagggttcacgacgttcgatccgacgcactcgcgctatgaggaggtgcgacgcgcatgatcgcaagaccgccgaggattgggccaaggaggagacgttcggcgcgggtctgacgtttcgtcaggtcgccgatacggatgcgcatgacaaggcgattgtggatcatatcaacactttggtcggcccggatgatgagctgtggattctgggtgatatcggttccgcacatcgctgacccatctgaagaactgcctgtgagcgctcaattgcaagcatctgcatggtgtgatcggcaaccatgatgactggtggcgggaagaccgccccgcacttaacctgttcgaaagtttggagccgcacgatacggttgagattgagggactcggtacggtcaatctttcgcattacccgtatcgggaggatctggcatacagttggcccgatgatgtggcgaagttcagcggcaaggcgttgccgtttgacggtcgcaggctgctgtatggacatacacatcagctttcgccagatggtgcacgcccggaggcactgaatgttggcattgacacagcattgaccgccgttgagatgtatgcacgctgaacacgcgcctcaacggcattggtctcgtcatctctcgctcacaccaacggattgccggcaagacgggtcaattcggcgttcagctcggggaaatgctcgttgccgacgaacggaccgtattccgtgccggattggaatgggcaccatgcctgaatggtcatatgcttcagtcgtgaataaggcaggatgccaccggtgcgatcggctgcgggatcgctcgccatattgaattggatttcagcgtcgagcatctgtgtatgcattccgccgtgtcgaaatagtcgatgccagaatcatgggccacggccacggtacgtgccgcatcggcggcatccaacgcgtccatgcgcatcacgcccagcgccactcgtgacgcaatcatgccggattgtccgatttcctgagtcttcatagtgtctcatttctgttatcgtgaatcggcgaacgggcactgtccgcttcgttgccgggcagcaatctccattgccgctgcttatgtcaccttatcgcttgaagtgcacttgaaggcaactcgcaggcaggcagcgcgcgctgccgggcgcgtcttcgcgtcttcatgtcctcgctgtgaccgagacatcgttgtgccgtaatcatgcccatttcttgtatgatgacctctatagcaacagagctagggggattccatgaatactaccgattcagccaaagtcagtgatgccaacgccggcgcaaacaatgtcatccatatcccgcacaatcccacgcttgccggattggccacgctgacccgcaacgtggcgtacaagaccggggccgatgatctggtaatggatatcatcgccccgcaatccaccggcgatgacgataaccgccgctaccccaccgtggtattcgtgcaaggcagtgcctggaccacgccgcatcgcgactacgagatcccgcagctctcggctttggcccgcgaaggctttgtggtggccacggtgaatcatcgcgatgcctcgagcgacccccacgacatgttccccgcatatctcgaggacgtc

SEQ ID NO: 3981 - DNA, 9043 bp, Unknown
  R22_24m  MAG No. k141_37034
cagcgcccgggccagggccacgcgctgctgctggccgccggacatctgctgcgtgtacttcttggcctgatcggcaagccccacgagctccagctgttccatggcgatcttgcggcgttcggccttgcccatgccgcgcacttcgaggccgaattccacgttctccagggcggtcatgtgcgggaacagcgagtacgcctggaacaccatggccatctcgcgcttgttcaccggcacaccggtgacatcctgtccgccgaccatgatgcgtccgccttggatgtcttcgagaccggcaagcgatcgcagcgcggtggacttgccacaaccggatccaccgagcagcacgaccatttcgccgggcttgatgtccaggttgaagtcgtcgagcgcgtgaacggtggagccgggatagatcttgacgacgttctgcatctgaatggaaccaccgccgcgcttggcggtgtctttgagcagggccttggcggccttggtcacgtccttgccgcgcacgccctcgagggtagcggtgggatcgttcttgaaggcgtcctcggcagtggaggacacggctgccggaatggccggggacgccggggcggcgtccactgcggtaccggtttcctgacgggtgggagttgaatcgttgttcatcgggtcacttaccttcccttgacttacgcattgcgtcggagatcaggtcgagcgcaacgaggagcaccacgccgaagagcagagccagcagcgacatggcggtggaaatttgggcattggattggccgagctggtagagcgcgacctgcaggttcatacggccgagcagcgaggcgacggtgtattcaccgagtaccacggcgatggagatgaaggatgccgagaggatcgactgccacaggttcgggatgatcaccttgaagaacactttgggccaggaggcgccgagcgatcgggaggcttcgaccaacgtcttgacgtcgatggagttgaggcccacggcgatcgcgcggaaggcgaacggcatcacgagaatcacataggcgaagcacagccagatcgggttggtgctcaacacgtcggcggaaagccaacggtagatcggcccaagacccaccaccagcacgatggccggaatggtcagcggcagcgtggccacccattcgattgcacgatccaaggctttggagcgaatatgcacgatgaccatggtgggcaccagcaggatgagcatgatcacgacggtgacggcgctcaacgacagcgagatgccgacgccctgccatagcacgctcagatcggcgcccaacgattcgccgttgccggtgaaaatcgccgtccacggcgcggccgaccagcgaccggacaacgggtgacgcagggtgaagatgaacatggccagcagcggcacgaacaggaacgccagggtgacgaacaggatcacgaatttgatgatgctctgtttgcgcacgcgggcggcacgcagctgcggcggcttggttgtggaagtttcggtcattgccaacgtccggccctcttttccacggcgtggctcagcagcatgacgatggccacgacgatgatcattgcgaatgccagcacctgcgcgaagccctgctggttggggtccatctcattgcgcatggcaccttggatcatcaacggcaccagaatcgagcgctgcgagaacagggctgcggcggtcgcataggcggagaacgcggaggcgaacaacagcaggaacgccgagatgaagcggggtgcgaggatcgggcaggccacgcgcgtccagtattggacggtgttgccgccgagcgactcgcaggcttcgcgccactgtggacgaatggaatcgaccgcaggcaggaagatgatgatcatcagcggaatctggaagtagcagtagacggtcaccagccccggcagggagctgagccaattcgggttcacggtatagccagtcagggttttgatgagcatggtgccgatgccgttgatgccaagagtggcgatgaacgcgaacgcgagcatcacgccgccgaactgggcgagcaccgatgagatggcggcgaccatacggcgcagcggtccgttcggcttggcgccgatcaccagcgcgtaggaggcgagcgcgcccaccacggcaccgatcagggatgaggccacggacaccaggattgacgtgccgaacgcggcgatggtgttggcttcgaacatcttgtggaagttcgcaagcgtgaaaccgccgctgcgatcctggaacgcgccgatgatcacgatcacggtgggtgcgagcaggaagcaggcggtgtaggcgaagaacgggagcgtggtggtgagcgtgccaagctcctgacggtgcttcgccagtgcggacgaagcgggggtcgatgcggcggacggacccgcggccttggaggcggcgggtccgttcggtgcgatgggtgcgattgcggcggtcatcgtggactctcagttgccgatcgtcttgtcccagttgttttgaagccactcggtgatgcgggtggagtcatcgttgctgtaggtgaccggctggccttcgatggtgatggcgtccttcagggtggcctggtcgacggtgccgtcggccttcatggagtcgagcagcaccgggttggcgccgcccttgaaccacaggttctgggtttcggcggtgtacaggtattcctcccacaggcgtgcggcggcggggtgcggcgcgtccttgttgatggcctggttgtagtagctgacgacctgggctttggggaaggtcttgtacttccagttcacgcccttggacttgagttccttcttgtaggaggcctggttgtaggtccagtcgaagaccacgccggtctggccggagtcgatggtgccgttggtcacatcgatggtgttcaggttgccggcttccttgagcttcttgaagaagtcgagaccgggctgcaggttgttgatgtcgccgccggcgagctggttgaccatcagatagccgttgaaggccgcgccggcctcggtaggcttgccgttcagggacacggtgccggcgaacttcggatcgagcaggtcgttcagggaggcgacatcgccgtacttgtcggcgttccagcccacggacatgatgccggtgtagtcggcgtagtaggcgccgtcgacgttcttggcagcatcagggatcttgttccaggcctgcaccttgtacggggcgaaatagtcggtggaggtggcggcgatggcctggccgacgtcgaagacatcgggggcggcgtcggtacccttgttggtcttggcggcgtcgatctcctccttggaggaggcgttcgggttcagctcggtgatcttgatctccgggtacttcttcttgaagccctcgatgacctcgccgtagttggaccaatcatgcggcaaggcgatgacgttcagcgcgccctcttccttggcggccgattccgcaccacacttacctcagcacgccctcaatcaatcgcgtgatgagttcggtgtagctcactccggtggcatcccaagccttgggatacatagaaatcggcgtgaagccgggcatggtgttgatttcgttgaccatcaccgtgccatcaggcgtcacgaaggtgtccacacggctcaagccggcaccatccacggccttgaacgcacgccgggccacgtcacgcacgtcctcaagcacgctgaccggcagattggccggcacttccacatggctggcggaggcatccatgtacttggagtcgaaatcgtagaactggtcgtcgttctgatgatcgagcacgatttcgccgggccagctggcctcgggctcgtcaccggccttcgggcacagcacggcacattcgatttcgcgaccatcaatcccctgttcgacgagcaccttccaatcgtgctcgccggcggtggcgatggcggcggccagacgatcctgctgggtctcgcggtcatcggctttctcgaccttggtcacaccgaagctggagcctgcgcgcgaaggcttgatgaacagcggataggtaagaccggcgtcctcgatcttggcaagcacatcggcggcggtgaagttgcgcgcatcgaccgtcacaccgggcgcggtgggaatgccggcggcacccagcaccaccttggtgtaatgcttatccatgcaggcggcggaagcaaacactccgcaccccacgtacggcacacccatcatttccagcaggccttgaaccgtgccgtcctcgccataggggccgtgcagcaccggcagtaccgcgtccacatggccaagggaggtcagcgcatggtgcatttccgggtcggacatgctgacgaagctggtgccgaagccggaatcggcggaattgatgtggcgggtctcgccgatgaagaaaccgtcctgtccgcgagaggggtcaagcatcaccgggcgcgatcccggggtgatctttacggtcggcagctcgccgccgtccaagttccagccacgaggatcttcgccgttgatgatccacttgccgtccttggtgatgccgaccggaatcggctcgaaccgttcagtgtccatggcccccagcacaccggcagtggagatgcaggaaatcgaatgctcgtctgcacgcccaccatagagcaccacaacacgcttcttggccataaccatccttttattgaaactacaaccgttttcaagcctatgctttgcaccgccaaccggaccgaaccgcgctcggaccgccgcgcacaagagacgcacaccagtctactcgcgcacgtcaacgacgtatacgccacacgactttgcacgtacaacgtatacgccacgtatacgtcgcttctctcgttattcgccggtaacctcgtgcccgaacagtccggcaagcatctccgagcaggaaatgccttcgttcagcacgcggctcatctgatacgccaatggggtcggcacatcaagctgctcgccaagagccaccaccgcatccgtggtgggcacgccttcggccacaccgttgctgaccttggtggcctcctcgaccgtcaatcccttgccgagattcgcgccgaacgtatagttacgagacagcggagagccacaggtggcgatgagatcgcctacaccggccaagccgaagaaggtcttgggatcggcgccagcggctgcgcccagcgcggtcagttcggccagtccacgagtttcgatcatggctgcggtgttctcaccgtagccggcaccacgggccatgcccacggccagcgcggtcacgttcttcaggctgccgcacatttccaggccgatgacgtcggtggtcacgaacggcttgaaataggaggtggtacatgcctcggccaccttcgtggcattatcgaggttcgtacaagccaccacggtggcggcaggatgacgatcggcgatttccttggacaggttcggtccggaaatggcggcgaaccggtcggccggcaggtcaagggattcgcggacgacttcgtccatacgcttgttggtgccacgctcgatgcccttcatcaggctgacgacgatggcgtgatcgggaatcagtcccttgaattcgacgagtgccactcgcgcgaactgcgcggcgatggccacaaccacgatgtccgcgttcttgacggcttcggcgcgatccccggtggcggtcatgttgtccggcaacttttcgacggacggcaggcgcacggcgttgtggtggcgatcgcgaatgccctcgacaatccgctgctccttggcccacatggtcaccgtgttgccggcgtccgccagcacttggccgaaagcggtaccccatgctcctgcaccgagaaccgttatatttttacccatatcaaattcctaccttcgcttgtcgcgcaacttcatcggtacaatcttgtgccatgctactcgcctaggctccccgtacgggaaccggtgcggctacttctcagccgggaacgggccgccggcttcaggccaaggcttgcgactcatgctgcggtagtcccagtagccttcagcggggaactgttcgccacgaatttcctccagtactgtgttcatgcgtttgagcacgcgccacatcagctcgttcacggcctcggcaggcggttcttcaccccatgagtccatgtcggcaagcagatcggagtaatcgagcgcatggtcatagcacatcaccacgtttttgcgcggccatggccaccagtggttgatggaggcggcaccccacgtcaccgccgggtacagcggcacctgatgccccagtctgcgcgaggattcaagggcgatatatcccacgccctccttaatgctcatcacccactttttcgggtcgcgggtcacggtgccttccggccagaccgtcagcgggcggccggacgtcagaacatcaatcgaggtctcttcgatctgcttggccttgcccgaatgacgctgcaccggctgcatgccgaccaaccggaaccacttgccgatcaatggccacttcgccatctcggccttggccatgtaccgggggcggcggcccatgtggaacaggctcatcatcggcacgaacacatcaaacatggtgatatgactggcggcggtgatgaacggtccggtttccggcacctgttccaagccccaggccttggtcttgcagctggcgcggaacacaatggacacccctcccagcagtcgtttggtggccttgggattctgggcgtcgatttccggctgattgggcgtgcgagggccggtcgggtaatactgtgtcgagtccacaagcgtgtggcgggcggccagacgcttgacctgctcatcactcagcgggcttacggccgaacgcggcgacggttttcctttggatgccatggtctctattgtggcacggaccaccgcccaacgattccagcgcaacgttcccgggaacgtgtcgcggaaccacacctcgcaccccccgcccagcgaaacattccccggaatgcgtcgcacaatacgcggcggcccgtctgcacacaccatgcgcgcagacgggccgccggggaaacgttcgaatcactccaccgcgatggcgtcgatctccacgagcgcgcccttgggaatcatgttgttgccaaaggccacgcgggcgggcttgacggagccgatgaacgcctcagcgtaacgtgcgtccacttccttgaagtcctcgacgttcttcaggtagatggtggcgcggcacacatgctcaatgccggtaccggcagtgtcgagaatgtgcttaatattcttcagcgcctgtgcagcctgctctccagcggtctcgcccgccagttcgccggtggccggatcaatgcccagctggccggatacgaacacgaagccattggccttcaccgcctggctgtatgcgcccagcgcggccggcgcctcggaagtggctacggcttccatcttttcgctcatattgtgctccttctcatcttgggggcgcccacctgctgcggccggcgccggtacacatcaccaccggctacgaccaatcgcacgatcagcaacgattggcaatgccgattacgtagcagtctactgagcgaagtcgcgtttagcgcgcatgatgcccggcatacggccatcaacagactattccttgctattccagacgattccagacgattcgactaccgttctcgccaaaccgggcggtttttccacgacccaagcgagccggcatcaccgacaccagcaccagcaccagcaccagcaccagcaccagcaccagcaccagcaccagcaccagcaccagctttgcacgcgcttaatatcacgcgccgaatatgcaaaaggcttccggcggctagccgaaagccatgctggtgggcttgatggggatcgaacccacgaccttctgttccggagacagacgctctatccactgagctacaaacccgagcaacttctttactgtacaccacatcacgctgcatgaggcacatacgtcgccaaaataacgagaaaatcgccatcatcggccctacaatggggttatgtcggaacctacagatgacttcgaatacgaacgccgcttcttctgccgcgagctgccggcggaatacgacgacggcgacgccccgaccctcattattcagagctactacgtgcatgccgacaattacgccttgcgcgtgcggctggtctcgcacaaggtgcacgtcgacatgacgcccgacgtaaatccggtggccgtgctggacgaataccgcgaccggttctcggaagcgtatgtcaccgtcaaaggtccgtccgtgggtggcacgcgctacgaggtcgagcgcgagatcgacacgcgcatcgccgccgaactcatcaagcgcggcggctcggtaatcatcaagaaccggtattccgtgtggattgcggaagacggctggagcgtggacgtgttcggcgggccgaacgcgccgctgatcgtagccgaggccgaacgatccgggccggttaccaatctgacgattccgaaattctgcatcaccgaaatcaccgatcaggcgcgattcaataacgatggtctcgccaaccgtccgttctgcaagtgggcggatgatttcgaggaggaactggcgctggaggggccaaggttccagcaatatttcgggaagaatcggatggtttaggggaagcaatcaagtacgctcgcgcgctcctctcagtcatctacgcctgacagctcctctcaaagaggggagccaaaaccaatcagtacatgagggtggctaggcgacggcgggcgcgagccagacgcgggtcggtgggttcggggatggcgaagtattcgagcagacgcttgcgaaccggctcgatatcggccttatgcccggcggccaaaaagtccagcaaacggtcgaaagcgtcttgaatctggccaccgatcatgtcgatatcagccacagccaactgcgcttccacatcgtccggcgctgcggcggcagcggcacgcacgtcacgtacatcagcggacccggagcgggccagcaacagcgccttcgcacgttcgcgggcggccagtgcatcggacgggtcggattcgagcac

SEQ ID NO: 3982 - DNA, 24672 bp, Unknown
  R22_24m  MAG No. k141_39288
cagccttcgggtcgcacaggccgtggcccgcggccatggtgtcggcggcgtgcagcttcgggtcgtcgtcggagaagatggccgcggcgatgccgccctgcgcatgataggtgttcgattccaccagtccggccttggttaccaaggtcacgtcgtgtccggtgccggccacggccagtgccgcggacagtccggcgacgcctgcgcccacgacgacgatttcagtgttgctcattgtgttgctttcctctgtttttgcgtcatctgctccccctcagtcacctacggtgacagctcccctcagggaggggagctagaagcatgtcacgggtgaacgcgcagcatgcgctccagtgccaccttggcttcgcgggcggtgtcttcgtccacggtgatgcgattgaccacgttgccggcttcgaggttctccaaagcccaagccaggtaagccgggtggatgcggtacatcgtggagcaggggcagaccaccgggtccaggcagaacacggtcttgtccgggtactgagcggccagacggttcaccaggttgatttcggtgcccacggcgatggcggatccggcgggtgcgttggcgatctccttgacgatgtacgcggtggagccagtgccgtcggcggcgtcgaccacctgcatcgagcactcggggtgcacgatcaccttgacgcccgggtatgccttacgggcacgttcgacctgttcgacggtgaaacgctggtgcacggagcagaagcccttccacagaatcatcttggcgcgggcgtagtcggccggatcggcggcgccgccctgtgccttgaacgggtcccacagcggcatctcgctcagcggaatgcccatcgcgcgggcggtattgcggcccagatgctggtccgggaagaacagcacgcgcttgccgcgggcgaacgcccattccagcacggcgtgcgcattggacgaggtgcatacgatgccgccgttgcgtccgcagaacgccttcagcgcggcggatgagttcatgtaggtgaccgggatgatctgctgcaagccatcggagtccggctgggtgccgcagatctcgccgagctggtcccagcattcctggacctggtcgatgttggccatgtcggccatcgagcatcctgcggacaggttgggcagggtcacgctctgttcgggcgtggagaggatgtcggcggtttcggccatgaagtgcacgccgcagaacacgatgtggtcggcgtccgggcgttcggtggcgttcttggccagctggaaggagtcacccacgaaatcggcgtgcttgatgatctcgtcacgctggtagaagtggcccagaatcaacagtttggagccgagacgctgcttggcgtcggagatgcgctgctgcagttcctcgtcggaggccttgcggtactcgtccggcagcacctgctggcgcggcgcgttggcgggcagacggtcaagcatcgaggcaccgggaccgtagctgggtgtggtggtgtcgaagtgccatgggtcctgggtcagtcctgcatcgcaggtgctttgcgcgcccagcttggcgatgatctcgtcaacggacggcgcagtggatagtgcggtcatagtggttcctttccctatatacgtctgtgatgccggcccgaagcgggtcggcgggaaaatcagatgcgcgcggatgggatcagcgcgtcgagagcgtcttcacgctcgccttgtctggacagttccatgatgtcgtcgccatcggattcgtggggcgtgccgttctcgacaggtcgtttggggatgtagcggtagacggtggccggtcgttggcggccttcgcgcaccttctccccggtgtcttcaagatctcccgaggcaagcattttgcggcggaagttcgccaagtcgagggtttcgccgccaatcgcctcatagacgccgtgcagttggcgcagggtgaacgtggggccgagcagtcgggtggccacgtcggagtattcgattttggagcgcaggcggagcagcgcgtagtcgatgatctggcgatggtcgaacgccagctcgggcagttcgtcttcggggaaccatcgtacgttgtcaccatcctcgaagcccgcggcctcggtctggccgacgagcgcccaatacacgacggataccatgggcaatccgccatgagaccgggtcgggcctccaaaggtgtacagctgttcgaggtatcgcgggtgcaggtctgtggtcgattcgagggccgcgtaggcggactgttccaacgaccgatcggagcgcaggtcgccgccgggcaacgcccagcagcccaggaacggctgacggacgcgcttgaccaggggcagccagagacgggaatgggccgagttcgcggcgttgccggaatcggcggcactgttgccggtatcgcctttcgggccgagtgccagaatcaccactgacacgccgacctgtggcggtgcgctgcggcgctcggacacattgccgaatcccatgccatgcctctttccataccggttgttctccccgcattgagagcatagcactacttatagtcacaatgaccataaatcacatattggatggtctagcgcacgaatattggtcaggtagcgggccccaatcgctacgaaatcacgtccgtatcccccgatttcgactgtgtcatttcggcgacggacgggaggaacggcgctagggagggtagttcgtcgagactcttcaggcccatttggtcgaggaaggattcggaggtgaccaaaagggccgcgcgggattcggggtccacgccgtcttccttgataaggccgcgtaccgtgagcgagcgaatcacgccatcggagttgacaccgcggatcgcggccacttgggctcgggtgacgggctggcgataggccacgatggcaagcgcctccagtgcggcctgactgagtctcgcagtctggccgtcggtgacgaatgatgagacgaccggctcgaacgcggcgcgactggcgaactgccagccacgagcggtgcggcgtagttcgaagccgcgcgggcggatgccacgggattcatcgccctcatagtcatcgtgcagggcttgcaatgcctcttcgactgtgttgcggtccaatgccaaaatgcgggccagctcggtggcggtctgcggctggtcggcgaccatcagaatcgcttccagacatgcgggcagcccgccgggaaaatcgtctaccgtgaaatccacgtattcggggcgcgtctcctccactcccctcacctcggcctttgcggattcagccgtcgattcggcatccgccatgtgctcggttgcattcgttgcgtcaatccgttcagtcaccagtcgccgtccttacgcagaatcgccttcggaaatgttcacgtcgttcatcgtttcgtctacgccggatacccacctcaggtgcagttcggcaaacggaccatcttgctgatactgcagcacaccttgtttgaagaacacgagcacggccatgaaccgagccaccacctcaatacgagaagtgcagtcccgggtcaattcgctgaacgacatcgactggtcgcccttggattccagtgctgcaatcagccggtcgcgcaccaccagcgattgggcccgcagatcgaccagcggcacgtgcagctggtggatcgatacttcggaggcgggcgcgttggcgatgacctgggcggccagttgggcgagttcgagcggggtcagcgtccataccagctcaggcaacatggcggcaatgccctcgtccatggccgccggatgcgggaatcggccggcattggcggcgatacgcgcccggaagtcacctgcggcctgcttgtaggcgcggtattggaggagtcgggcgaacagcaaatcgcgttcgcgcagtgcttcaaggctttgctcgtcgtgctggctgtcttcgccgccgggcagaatcgccacgcttttggcctcgaccagaatagaggcgatgtcgagaaaggcgctggcctcatccatgtttttcgtgaagtcgagcccgcgcacgtatgtcaggaattcctcggtgatcgaggagagggaaacttcggtcagctcgagtttgttgttggcgatcatgccgagcaaggcatcgaacggaccggaatagacctcgaggttgacccggaagccggaagtggcggattcctccgtgctgatttcggcttccgcggagctcccctcagtctcgctacgcgagccagcttccctcagagaggggagccgagaaagggaagtctcattcatcgtttatcgaaacaatcgttacgccacgatgccgcgagcaatgagctcacgtgccacctcacggtattcctttgatgtcttgtgctcaggggcataaaccaccacgggcgcggcggcaaccgtggaatcgggcagtttgatggagcgggagatgaacgtgtggaacaccttttcgctgaacgcctcgtaaatgcgctggcagacctcttcgcagtgcagtgtcttggtgtacatggtgatgagcacgccatccacttccaatgcgggattgatgcgggactgcactttttcgatggactgcataagtagggccacgccacgcaaggcgaagaattcggcggccacgggaatgatcacgccatcagctgcggcaagcgcgttcacggtgagcaggccgagcgatggctggcagtcgacgatgatgagatcgtattccgacttgagcttgcgcagcacactgttcaggatctgctcccggcccacttctgtgaccagttggacctcggcggcggacaaatcgatgttcgccggaatcacatcgatgttctcgaatgcggtgtgctgcaccacatcatgtgggtccacggaaatatcgaacagcgcggtgtaaatcgtgttctccacggtattcgcgttgacgcccagtcccacagtggcggcgccctgcggatcgaaatcgacgataagcacgcggcggccatactgggccaacgcaccggcgatattgatggagctggtggtcttacctacgccgcccttctggttgcacatggcaatgacacgcgccggaccgtgctgttgcagcggttcgggtgcggggaaggtttcgtattcacgtccaagcaaatcggtaggcatactgtctaccttatcaacatccgggttcgctgggggtgcaacgacatacgttcccgccataggcagcgttccttgacggaatgcgctgtctttatcgcgggtgtctcgccagtcgtccatcgttgccctcgccccctttgccgggaatacctgctcgcctatcctaatgtactcgccgggctcgcctcggaacaccgttttgcagcgggcattccagtgttccgaggtttatggatctcgtctcgtactatgtcgatgcgcttactcggtgcgcagtgcggtggccgggtcttgcttggctgccttgcgcgagggaatcaggccgccgatcagcgtgagcaccacgcttaggatcaccagcaccacgccgccggtcaccggcagggcggcattgacgtccgcattgccgatgaagtgatgcaacacggcgttgaccggaatatcgagcagcacggtcaagcccacgcccaacaggccggagcataggccgatgatgccggtctccgcattgaacacctgggacacgttgtgcttcgaggcacccattgcgcgtaggatgccgatttccttggtgcgctccagcaccgaaatgtaggtgatgatgccgatcatgatcgaggaaacaatcaacgagacggacacgaacgcgataagcacgtaggaaatcacgttgacgatggtggtcaccgagctcatcatgagccccacataatccgtgtaggtgatcttgtctttcttcgagacggtgttgttgtagtcggtaatcgcgtcggcgatgtggtccttgtcttcgaagctgtcggcgtagacgttgatcgagctgggcgcatcacgactcaccacaccgaatgcggcgaggttgtcgtcgtaggtgccggtcgacacgtactggtcgtagatcgcgacaagcacgtcgttcgaagccgtggcgatatacgagtcgaaactgtcggcgagctgctgttcgctcatcgcggccatcgcgtcggcctgatcgccggcacccgccgcgccagcgccagcaccagcaccagcggcatccgatgcgcccgtaccggaccgctgcccggcactcatcatcgacttggccatgttcgccttctgcgtcacgcccagcgaaaccacgtaggtgcgcgcgtcggccgccttggtggcgtcgtccgagggcgagaacgtcatgccgttgagcacgttcgtgttcgggttggccttctgatcggtgacgatggcgctggaggccgcacggtcgatcagatcattggtcagagcgcgcgtgtatcccacgccagcggccaacggtgtggccgaagcatccttcttcgccttgacgacgcccaccaccttgagtttggtggccgtttcgaggcgctgttcgattacatccttgtcgttgccgatgaatcggtagtggccgtcatcgcccttgacgtactggtcggatgccggaatcatgtacagcgtctggtcgagcgccttagcatagtcgatcttgtcttgtggagtgctgaccttgtcgccggcgttgagcttggacatcatctcgtggtagtcggaggcgggcagcaggccgagctcgtacagcgtggtcagcggcacgctgttgttgtcgtcgagcaccagcaccacctcgtccttggacttcggccatgaaccgttgaccacttggtagttgtcggtgatgaccttgcctacgagcttgctgtcgtccgctccaggcatgatctcattgaacgagtcgggcgcggcgttctcatcggttttgccggtcagcatcgacatctgctgcgaggtgatcgacgaggtgccggacatgccggacgagcttgtggacgccatctgcgaggccattgaagtggagtcgctggcaccgatcgtcacgccgtccgcattgaccagcgtgccatcggggtcgtggtcgaacacggagaatttcacgtcatacgtgtactggataccggcggaacccacatactggtgaatctcgctcttggaattatccaggtatttcttgaagcgggtcaggttgttttcggtaatcgaactggtcaggctggatgcctgcttgacgctgcggtcgtccgggtagatgccgtcggttctgtgcgtcttgccgccgtatccgtcatcgccgcccatctggccgcccatcatgctgctcaggtcgaaggtctgggagtcgatggtgatcgggtaggcggtcatcgtgtcacgctggatgtcgctgatgtatgcgttcacgccagtcgacaccgatagaatcagcgcaatgccgatgatgccgattgagccggcgaacgaggtcagcagggtacgcgccttcttggttttcagattgttgaagctcaacgccagcgacgtgacgaacgacatcgacgcgcggcccatcgtcttgtgcacggccggctgttcggccgtctcatccacgacaaacgggtcggagtcggagcggatcacgccgtcgcgcaggttgacgatgcgcgtggcatattgttccgcaagttcggggttgtgggtgaccatgaccacgaggcggtccttggccacgtccttgagcaggttcatgatctgcacggacgtgtccgaatcgagcgcgccggtcggctcgtcggccaggacgatgtccgggtcgttgaccagtgcgcgggcgatcgccacgcgctgcatctggccgccggacagctggttcggctttttattgatgtgttcgccgagtccgaccttctccagcgccttgcgcgcacgttcgcgacggtcggccttgccgatgccggaaatcgtcagcgcgagttcgacgttcgacagaatcgtctgatgaggaatcagattgtagctctggaacacgaagccgatggtgtggttgcggtacgaatcccaatcgcgatccttgtattggcgcgtcgagatgccgttgatcaccaaatcgccgtcgtcataccggtcgaggccgccgatgatgttgagcaaggtggtcttgccggaacccgagggacccagaatcgcgacgaattcgctgtcgcgtaggttcaggctgactttgtcaagcgcctgttgaacgaaatcaccggttttatagcgcttcgagatcgatttgatctgcagcatgaatacctcttcctggctgacggttcgctgttatgtactgtattgtcacgccttgaatttccggccgactttggtgctcccccccccgccgcgattccgctatgggcgggcgcgtcgcaaaatggtgtgtctcaccgcgctctggggtgtgaggtcagatacgtttcgatcagggtttcggggcttacgtgcgtgtagatctgcgtggtggtcacgctggcgtgcccaagcagttcctgcacggtgcgcacgtccgcgccgccttgaatcaggtgcgtggcgaaggaatggcgcaaggtgtgcggatggagtggtttggtgatgccggcccgctccccggttgctttgacgatttcccataccgattgccgcgagatgcgcttgccgcgtttgttgagaaacaatgcgcgtctctcgggaatcttggcgctggagcgccgttccagctcgccacgccccgcattgaggtatgcggtgatggcccggcatgcgtagctgcccaatggcacaagccgctgcttggagcccttgcccatgagtcgcgcgatgtgctcgtccaggtcgatgtcgtccagattcacaccggtggcttccgagacgcggcagccggtggcgtacatgaattcgagcagggccttgtcccgcaataccaccggatcggttgagccgccggctgccgccgcgtcgagcagacgggttacctcgtccacggtgagtacgtcaggcagggtgctggcacctttgggtgccttgactgcggcagaaacgtcggcagtcaccgcgtgctggccgagcgcgaagcgatggaattcatggatcgaggccagtcttcgggctttggagcgggcggactcccccgcctggtcaagggcggcgatgtagtcttcgacgtcttgtttggttatggcgtccggttcgtggatgccgcgggtttcgagccaatcaatgtatttggcgatatcggattcgtaggcggtgacggtggccgtggcgagtcctcgctccacgccgatgtggacgaggaactgctcggtgagtttggtgaatccgttggtcatgcgtttgttctcttccccacccgctgcgcgggagcccccctcgtcagaggggggctaataataggaaaccccgctcggaagcggggtttcaagtgtgaagtcacgacttcaagcaatcaggcctcaaccggagcgttgacgtcctcaggcagggcggccttggcggcggccacgatggtcttgaaggtgtccgggtcggagacggcgatctcagccagagcgcgacgatccagctcgatgccggcgagacgcaggccctggatgaagcggttgtaggtgatgccctcagcgcggacggcagcgttgatgcgctggatccacagcttacggaaatcgcccttgcgagccttgcggtcgcggaagttgtagttaaaggagtgcagcagctgttccttggccttgcggtacaggcgggagcgctggccacggtagccggaagccctctcgagaacaacgcgacgcttcttgtgggcgttcactgcgcgcttgacacgtgccataatctattcctcagctttctaaagtcttattatttccgggtaagccctatgctcacttctgcagaagctggtgcagcttcttggcctggccgccgcgcagcacatcgtcggcggacagttcacgacgcttgcgagcggacttgtgctcgaggttgtgacgcatggcggaaccgacatgcttcaccttgccggtgccggtgatcttggcgcgcttggaagcggcggaattagttttcatcttcggcattgctgccctccttgctggtttgcttcttgtcggaagtcttctgagaaatcgcggactgcgcgtcggccgcggcctgagcctgagactcctgcttggccgcgagacgagccgcctggcgagcctgacgctcggcgcgggactcggcgccacgacgacgctgctcggactgggtgtggaccttcttgcccttcggcgcaagggtcatgatgatgttgcggccctcctgcttcggcttggactcgacggtgccgtattcctcgacatcgtcggccagacgctgcagcagttccacgccaccaatcgggcgggagatctcacgaccgcgcaacatgatggtgaccttgaccttgtcgcctccgttaaggaagcgggtcacatggcccttcttcacgtcgaaatcgtggtcgtcgatcttcaggcggaaacgaatctccttgatttccgcggtgctctggttgcggcgagcttcacgagccttgatcttctcgttgtacttgaacttgccgtaatcaatgagcttggcgaccggaggcttcgcgttcggggccacctcgacgagatcgaggtttgcctccttggccaggttcagcgcgacggaagtcgcgatgacgcccacctgctcgcccttcgggccgatcaggcgtacctgcgggacgcgaatctcgtcgttaatacgtggttcgtcgctgatgatgactccaatcctctacttcaattccgtggcggggcctttgctggagtcctgttcaatgctttgggttcatggcaagccaaaaccagcgccaatatgcgctcagcttctgcagacgcatatcagttctttgcgtcattcctgattgcgcgttgtatatcgcaatcgctaggctgtttgccttgaacccgaggccttgaaaggcttccaggtggggttgccccgctttcttgatttctcaagccaaataggaatcttaccacatgcccggacattcgcggaccgtgtgtcgatgggtggataccggctacagtgggcataatgattcaggtatgcgtgatttttggtgcgggcgaatactatgcgggcacgcccgtggttcccaccggtgcgtatgtgattgcggccgatggcggactcgaccatacgcgcgagttgggcatcgtgcccgatgtggtggtgggcgacttcgattcgctggagggccggccgccccgcaccgatgtgcgcaccatcgcgctgcccgcgttgaaggacgacccggacatgctttccgcgctgaaggtcggctggtcggcgggttgccgcgagtttcacgtgtacggcgggcttggcggccgtattgaccatacgatttccggcattcaactgatggcgctgctggcccgacacggggcaagcgggtatctgtatggcgacgggctcatcgtcacggccatcaccgatggtaggctttcgttccccgcgcatccggtgcccgaggacggccgcatggtgtcggcgttctcccactccgatgtttcgcttggcgtgaacgaaccggggctgaaatatgagctcaagaacgacacgctgaccaatacggtggtgcagggggtcagcaacgagttccgcgacggcgtggacgcggccatcagcgtgaaacgcggcacactgatcgtcaccttccccatcgaagtggcgttgccacaggtgagcagattccatgaattcggcggcgatatcggcgagctggacaccgaagtgtccaagctgctggttcgctgacttgcatgccgcgcgcttgctcgtgatgattcgagacattcctccaaaggagaggaaaatcacatgtcggttgcgggcaatccaaattgtgagcgctcacaaaaaatacggcatttttacccaaaacgcacgctgaaacgttgccatgtgtacagagtcggcattacagtagcaactgttggtaaacaatggcccggtgtgccaaagcgcgccaaggccaccctacaagggagaattacatgacagttaagattggtatcaacggcttcggtcgcattggtcgtctcgccttccgtcgcatcttcgagctgcaggctcgcggcggccaggctggtgacattgaagttgccgccatcaacgatctgaccaccccggctaccctggcttacctgctgaagtacgacagcacccacggcaccttccgtcatgacgatggcactccggttgacgtcaaggccaccgaagactccatcatcgtcgacggcaaggaatacaaggtctacgccgagaaggacgccaacaacattccgtgggtcaagaacgacggtgtcgagtacgtgctcgagtgcaccggcttctacacctccgccgagaagtcccaggctcacatcaacgctggcgccaagaaggtcctgatctccgccccggccaaggatgacaccaccccgaccgttgtgttcggcgtgaaccacgatatcctcaaggcttccgacgtgatcgtctccgccggttcctgcaccaccaactccatggccgccatggtcaagctgctggacgagaagttcggcatcaaggccggcttcatgaccaccatccacgcctacaccggcacccagatgctgctcgatggcccgcgtggcaccaagaccggccgcaacctgcgcgccgccgccatcaacaccatcgcccactccaccggcgctgccaaggccatcggcaaggtcgttccgtccgtgaacggcaagctgcagggccacgcccagcgcgtccaggttccggacggctccgtcaccgagctgaccaccgttctgaacaccgagaccaccgccgacgagatcaacgaagccttcaaggctgccttctccgacaccgattactacggctacaacgatgagggcatcgtctcctccgacatcctcggcgacacccacggtggcgtgttcgacccgacccagaccgacgtcaacaccattgacggcgtgaccctggctcgcaccgtgtccttctacgacaacgagtacggcttcacctccaacatgatccgtaccctgctgtacttcgctgagatctccgagtgaaccactgcggtctaggccgctacggttcgtttgagaactaagctgtgagacccccgccttgtgcgggggtctcttcgtagtagaacggtaatcatggcaaagaaaagcaagcatgataagggcgcgggttccaccccggcgacagtccaactggagaaggcgggcgtggaattccacgtatacgaatacgagcactccaacgaccatatggatgacggctacggcgtggaggcggccaccaagctcggcttcgacgagcatcaggtgttcaagacgttgatggcggacaccggttcggagcgtgtggtgggcgtggtaccggtcagcggacatatggatttgaaggccctggctgcggctgtaggtgccaagaaggcctctatggccgatcccaaggtggcaatgcgtgaatccggctatgtggtaggtggcatctcgccgttgggccagaagacacgtcataagactgtgttggatgaaagcgccctgcaattcgaccagattctggtctccggcggcaaacgcggactgtccgtaggcgtgaacccgcaggacctgctcaaggtcttgaacgccgttgccgcaccaatcggcacgtggtgaccgttcttggcttccctcggtgaggggagccaaggatgactacttcttcctgcgcaactccgacggcagcacgaagtgcatgttttccttgatggtttcgacggacttcataccggtgaagcccaagttttgcagagcgtcaatcacaccggacaccagttcgtccggcacggaggcacctgaggagatacctacggattccagaccctcgaaccatgccgggtcaagctcgctggcatcatccacgcgatacgctttgccgcgctctcccaagccctcctgcgccacctccatcagtcgcacggaattcgaggagttggccgatccgacaatcaccacgcaatcggactgctgggccaccagtttgaccgcagcctgacgattcgacgtggcatagcagatatccgaactcggcggctcttgaatccacgggaacttggccttcagcgcggcaatggtgccggcggtctcatccacgctcaacgtggtctgcgagagcagcaccagcttgttgtcgggcgcaaaatccaacgaatcgacatccgattcatgctcgatcaagtgcacatgttcggggttctcccccaccacgccgactgcttcatcgtggcccttgtgcccgatatagacgatttcatacccctcgcgcacgaaacgcagcacctcacggtgcaccttacccaccagagggcaggtggcatccaccacatgcatgccacgacgttcggcttccgccttcactaccggagatacgccatgggcggaaaacaccaccggaatacccgcttgggcagcagcatccggaatctccgccaattcctggacgaacaccgcgccttgcccggccaagtcctcgaccacatgcttgttgtgcacgatctgccggcgcacatataccgggggcagcccatcctcgcgcgtcagctttccggaagcctccgcggctttgagaatggtctgtacggtaagaatcgcacggtccacacccgcgcagaagcctcgcggatcagcgagcacaacgcttttggtcatcggaacctcctgaacgtcaatagtgttttccagtgtaaagcagggattacaggaatctgccgtcacaacttttccgcgtctcccacgaatcaccggtttccaaggaatccacgtgcttctcgcatgatggtgtgagactcgtcactccacgtattgctaccgtgtctgtacgaattgtttattatatgccggctatcgccaatccccgcctcgatagaggagacgcgctagactggggccagcgatagcaggagctaccggcccaccaacctcactacgggagtgattccatgacgagtaaaacaccacgcaccggaaatcagtattcgattcactatggcgattattccgccgtcatctgcgaactcggcgccaagattcgccgattcgattatcaaggcaaggaaattttctgcccgttcggagtcaacgacctgacccccacctgtaacggctatgtgctggccccgtggccaaaccgcatcgaaaacggcgaatacgatttcaatggcaagcattactgcgcgccggtcaacgaatatcatcccgcaccgcgcaacaacgcgaaccacggatacgcctaccactacatgtggaagcttgaatcgttgaccgatagcgccgtgacgctttcactgcgcttccccaacctggacggatacccgttcgatgtgaccgtgaccgtcacatacgaactcggcgacaacggcatgaccgtgaccgtcaatgcccgcaatgatggcgacgagccggcaccgtgggctctcggcctgcatccgtggctggccaacggcaagcagggcgcgacttccgccgagcgtgacgccgactccgccgcctgccacctgcagatcaaggccgccagtcatgtgacggtgaacgaggcgctgattcccaccggcaccgaaccggttaccggcatctacgacctgaacgatggcccgacgctcgaaggccgcgcctttgatgatgcctgggtcgacgtggagcgtgccgccgatggtacgaccaccaccacattcacccgcccggacggtattgaagtgaagctcattggcgatgagacgatcaatgcttggcagtgctacaccgccactggcgcgccgttcgccgagcatccgtatggtatcgccgtcgaaccgatgaccgccccggccaatgccttccgcactggtgaccacttggtgacgctcgcccccaatggcgactacaccactgtggtccgctacgaagtagtccagaagtagttctgttacgctggctcccctccagaggggagccaattttttatccttatgtgccgccgcgtcttgggacttgtgcgatacgattgtgagcggtaacaatctgtttcacaaaggagtgtgcactatggctttgaagcctcgcactggcaaccaatatgtcatctcgtccggcgaatggagtgccgtcgtcaccgaactgggtgccagcctgcgcgagctgaagtggcgcggcgaagacctcatcgtccccttcgacccgaacaaggtcatcccctgctgcaacggctgggtgctggcaccgtacccgaaccgcgtgaccaatggtcagtattctttcgatggcgaagactaccagatgccgatcgacgagttcgaccgccaatcctccctgcacggctacgcctaccgctacatgtgggagctcgttgatttgcaggaatcacatgtgacgctctcctggcgctcccccgacatcgccggctacccgtttgatatcaccatcaccgccacttatgcacttgacgagaacggtctcacggaaaccttcaccgtgcacaacaacgacagcgtgaaggccccatgggcatttggcatccacccgtggctggccaacggcaagcacgccaccggtcaggccattaccgccgacaacgagtcctgccgtcttgagctgcactgcgatacccacgtgaccgtagacgaacacctgctacccaccggcgaagagccggtttccggcatcttcgacctgcgcgataaccccacgctggagggacgtggcttcgacgatgcctggaccgatatcaccaaccgcggcgaagacggcagcacttccgccgtgttcacccgccccgacggcatcaaggtcacgctgaccggcgacaagaccatcaactcctggcaggtgtgcaccggcaacgaaatcggcgggaaggctcgtcaggccggcgtggccgtcgaaccgatgaccgcctacgccgacgccttccgcaccggcaaggatctggttgtgctcgagccgggcgatgactacaccaccgtggtcaccttccacgccgaacaaatctgaaaaaccgaataaccaagcctgacgatcatcgccacatggacacccgtgttgcatcacgtcgtacttatgtggcataattccgaaggcttatttttttactgcagcaaaggagtccatcatgggcatgcgcggacgtaagcgcaaggatcgtcgtaagaaggccgccaaccacggcaagcgtcctaacgcctgattcttcgcgtttcttatagaacgctcaaggcccgtctgatgatacatcagacgggccttgttgtatatgtcgttacttatcttcgccgcagcagtgatcaagcgtggccttgagccgggccatcagacattcgggcgccacatccgggcgcaagtaggcacgcaacgcggcaatcaacgcctgttcacgctcgtcgcagcaggtacgggggtcaaaacagtcgccctccgtaacgatatgcacgtctgtctggaccgacgcagcggccgagccggtatctactgaacgatgatgcaccgccgtgatatgcacttcggtctggcttaccgtgccatcggccgccgtacgggttatggagatatggcgagtacgctctaccggctgatcgttcatcagatctcctttcccgaaagcttgcttgactgttgtggcgtgtgggcgtgagtcgcatgactatgtctcactacggcttgcgtgtcgccattgctgccaacagtttgttcactactttcattatggccggaatcggcgattcgaccaacgttttcgctcaacttcgcggatggtgaaccagccgacgaaccagtcgcatacccgcgctctttcgcatacgaggcgagctcacgcttgagttgcgtgcgggcgcgattcaggcggctcatcaccgtgccgattttcacgccctgctcatcggccacctgttggtaggacttgccgtcgatggcggcgtcgatgaacacctgccggcgttccggcgagagtttggcgagcgcggccatgatttcctcgggcgcgaaggcgtccaaatattcctcttcagcggacttgagcccgtccgacgtatgttcggcggcatcgtaaatgtcccaatcgtcgtattcgccggtggagtcgttggcacgctgcgggcgccgcttggccttggcatactggttgaagtaggcattgcgctcgatggtggtcatccacgcctcgaagttggagcccggctggaatgagtcgaaggccttgaacccgcgttcgaaggtgtcctggaccagatcctgcgcgtcatcgggattgttggtcagcctcatcgcctgccggtacagtgcattgacggcgggcatggcgagctgctcgaatctggcgcgcttggctgccatggactcgcccgatccggctgactgcccggattgcgtagttgcttcgcttgtcgtcacggttcaccattctaatcaaatcatgtgcccatatcgtggtcgatgacgtgtgagccacaacacgctacaccccacctgtagaatggcgtatcggctagataatagggagtaacaattatggctttgactttggcttcggccgctgacctgctcaaggaacaccatctgctgcgtgaaatcatccaaggggatgtctggaccgacgacccggcccgtatcgcttcggcggatgaaccgttcgccggcatcacctacgacacccgcaaggtcacgccgggcaccctgctgtgctgcaagggccgattcaaggccgagtatctgaacggcatcgacgaagccggcctggccgcatacgtggccgaaaccgagtactcagccgcaaccgccacccccggcctgatcgtcaacgacgcacgcaaggcgatgagcctgctgtccaccgcgttctacggatatccgcagaacgagctcacggtcatcggcgtcaccggcaccaagggcaagacgaccacctcgtacttcacgcaggcgcttatcaacgccgtctccggcggcaaggccgcattgttctcctcggtcgataattgccttgacggccacacctacgtcgaatccgatctgaccacgcccgaatcgatggacgccttccgcatgatgcgcgaggcggccgataacggcatgaagtatctggtgatggaggtctcctcccaggcgtacaaggtggaccgcgtctacggactgactttcgatgtggccgcgttcctcaacatctcccccgaccacatcagcccgatcgaacaccccacgttcgaggattacctgtattgcaagcgccagatcatcgtcaacgcgaagtcgctggtactcggcgcggacagtctgcacgccgatctgttgcgggaggacgcggaggcagccggcatcggcgcaaccaccttcgccctgcatgacgcggataatgccggcaccagtgcggacgtcgtcgcctggcccgccgacccggagcacgcctccttccacatcgccgacggagatcaggcccttggcgactaccatctgtccatcgatggcgacttcaactacctcaatgcggcggcggccatcgccatcgcccatgcggctggcgtatcgctcgatgacgccgacgcactgcacgccatcgaatccgtacgtatcgccggccgtatggaacagttccgcgatccgcagtcgaacacgctcgccatcgtcgattatgcgcacaactacgcatccgtcaccgcgctgcttgacttcgtctacgagcgttggggcgaggaaaacccgcgtatcacgctggtgaccggatcggccggcaacaaggcctacgatcgtcgtaaggaaatcgtcgaggctgccgagaaccgtatcgcgaacttcattttcaccgccgaagatacggacaccgagccgttcatcgacatctgcatggaaatgcaaggctacatcacgaacaaggatgtggcctccacggtgatttccgaccgtccgacggccatcaccaacgccatttacgatgcccgtgcgcacgccgaccgattcaacatcctgctgattatcggcaagggcaacgagcgctggatcaaggaccatcacaagcatgtgccgttcgacggcgacgatcacgtcgtcgaacgcatgtttggcttgtgacgggattccggccaatcagatcctgatcggattccgattggcccacatcagatcacgcgcaatacgaccaaaccagaaacacgacatacggatacgaacgaaaaaggatagctgaatcgtaatgatcacgttggagaaagttgacggagccacactggaagccgaagccgagaaggccggcatcacgttgcctatcgaacagaccaaggtttggtctggttttcaggcggatatcgacggacgcacaccatggggcgattatctgatcaagcgtgatggtgaattggtcgccgtgatctcctttatcgattttgagacgcacggttatcattatctgcgctcgatgcatgggccggcgtgggtcgccaagcccaccgaggctgaggagcgcgaggtcgtcgacgccatcgtggacaacgtcaagaaggccgacaagaacatcgcgttcctgcgtatcgacacctggttcgccgatggtacggagaaggtgctgtccacagtgccgtacgaccagaccgtggtcatcgacgtcaccggtggcgatgatgagattctggctcggatgaagcgtcgtggacgccgtgacgtgcgcaagtctctacgtgagtgcccggccgaggttgccgatgagacggataaggcgctggccgatttctccgaatattacgatgtgatggtcgagaccggccagcgcgatggattcacgcctgctccgatgagcgactactccgatatgatcggcgcgttaggtgccgatcattgccgtgtgttcgccgcacgtattgaagaccgtgtggtggcatggtcgattgtcaccgtgaacggcacgcatgcggtgcgctactatgccggcatgcgcaacgaggttatgcgtctgcatgtgaccgacaagctgctgtattccgaatgctgcatcctaggctcgcagggtattactgaatacgatctcatgggcattggctccgatttcgcgccgtctctcaagggccttaacgagttcaagtgcaagttcaccgaggaaatcaccccggtggcccccgcccgcgacgtacccatcaagaaggtcttctacaagacgctgcagactgtacagggcgtgcgcaaggcattgcgctaataccgccccgcttccgctggcgggagctgtcgaacgaagcgagactgagggcgatctttcgatatggaccgccctctgtcacctgtggtaccagttcctgccagcgggaaccattcgtttatcgttcgagtttttgactcaccacggctgttacgccgtcggctctcatggttacgccgtaaagcgcgtcggcaatcgacatggtgcgttgctggtgcgtaatgatgatgagctgcgcatgggcgcgtagctcattgaacgcattaatcaaacgggtcaggttcacgtcgtccaacgcggcctcgacctcgtccatcacatagaacgggctggggcgggcggtgaaaatcgcgaacagcagcgccagcgcggtcagcgaacgttcgccgccggacaggaggctcagctgtttgacgcgcttgccggccgggctggcctcgaccagtacgccggtggtgagcatgtcttccgggttttccaggcgcagtcgtccggtgccgcctgggaacagcgtggcgaacatctgctcgaatgcctcggcggtatcgtcgaacgcggatttgaacacctggaccatcgtggaatcgagatccttgatgagctgcatcaaatcgtcacgtgatttgaccacatcgttgcgctgatcattgagatacttgttccgctcctcaagcgcttcgaattcctcggtggccaaagggttgatcttaccgagtgcggccagatcgcggcgagccttatcgagacgcttcttctgctcctgacggttatacggcacggtcttaaagagggcggaatcgccgttggtgccggtctctcccccggtttctccctcttcggtcccagcctcagcttccgtctcatccaacggcacagggttgccctcatcatccagcacgggcaccggctgttcggggccgtaaccactaaccaattcctccaaagtgagaccgagttcgtcggacactttctgcatgagctgcccggattcggcggccaaccgttcgcggtttacatccaaggcatgttcgcgcccggtcagatcggtgaccttgggctcgatctggttgcgctgcgcgcgcagggccttgagttcctcgtcatggctggaggcggcggcctgcagctcgtctcgtttggcggccacgtcatgcagcgtatgctccaccatggcggccactgctcgcgcgtcatcggccacaccttgcaggtgtgcggcctgctcgcatctgcgatcgttcaacgcctcgatgcgggcgcggcgttcggcggcttctctggcgttgtcccgcagcagcccggcctgtcggctcagtgactcccctttgcggcttgcttcggtccacgcgattttcgcggcgacctcatgctcgcgagtcaggttcagtccgcgctccagcgtgcgttcacgttcatcaagttcgtcgaaatcggcatgttccgctgtggattgccgggccgatgccaaagcgcgattgagatcgtcgagcttgagctgatgctcgttgcgattctcttgggtctcggtgattttcctatccagctgctcaagctgacgggtgaacgatgcgacgcggtctgtggcggatttcagagatttctccgcctgttgggctttgagccgggcttcggtgcgtttggcggattcctggtcgacgagtcgggccgcttcatcgcgtttggctttggcctcggccacttgctcagccattccgccgtcttgggcggccaactgtttgacctgtgccaatgctttgtctcgacgggcggccagagacaggtccgattgagagatggaagagccgccgaccgccgccacgccgtgtgtgaaggtctcgccgttcttggtgacggcccgcatggcttcgccggatgccacgatgtgctgtgcttcgtcggcggtgccggccatggctacatcagccagcaggagacgcacggtgtgcacgacagcttcggcctgtgccgggttctttgcatccgggttcgcggtgacgagtgctgccagcgcgttgcccgatcgcggggcggccgccgtgttctcggcgctactctcctccgactccgtgcccggctctgtggcgggatcgccggcaatgctcgcggtcagcaccacggctttgccgagcttatcttcccgagcgcgttcgagggcgtgcaacatgttgcctgcctcgggtaccacgatggcgctggcatactggtcgagcgcgtgggccacggcatcttcccagccttcggccacatggatgaagtcggtgagtcggccaagcgaggccacgtccgtgtcgcgttccaatgatccggaggcattgcggctgcctagcgtgtcggcaagcgcatcggccttggatttgagcgagatgatcttggactgtatctcgcgctgcttatcggcgagttcgttcagtcgttcgcggcattcggcgagcgttgcacgcgcggcgtccaatgcggcaccgtcatcgtcggcaatggagtccgcttcgctgcgcaatgcgtccagctgttgctgggcatcgtcgcgctgggaagtcagcaagtcgcgttgggaggcataatccttggcgcggctggtcgccagttgcacggcggattcctcgcgggcgatgagttcgcgcagtcgggcgatctgcgcatcgcgctcctgtgcggttttgcgcagttccgtcaaggtctggcggactgaggcaagcttcttctcgtcgtcggcacgttcctcggtggccttgtcgagtgcgatgcgtgcatcggccacggccttggtttgtgccgcggcctgagactccagttcctcggctcgtttgacgagcatgccgggatcctcaccgaagttggtgacgatctggccggtgagtgaccggctgcgctcttcggccaactgggcgagcgcgttcagtcgttcacgggtctgtgagaattcatgccagtattggttggccttggcgatggtcggactggattcagagctcaacgcctcgacctgttcgatgcgtactttgacgtgggcgagttcacgttgggcgacggccagctggttgcgcacatcgccaagctcttgacgtaccgtgtcgcggcggctcatcgagcgttgggcgtcttcggcatacaggcgtgcttgggcgtcgcgtacggatatctgaatcgcgtcggcgcgccgggagatgcgtgcctggcgtccgagggggccgagctggcggtgaatctcccccagcaaatcgtcaagtcgactcaggttcgtttcggtattggccaacttgcgcaacgcgcgttccttgcgcttgcggtgcttcaggatgccggcggcctcttcgatgaacgcacggtgaccggacgggtcggccttcagaatcgcatccaatcgtccctgacccacaatcacgtgcatctgctggccaagaccggtatcggagaggagttcctgaatgtcgagcagacggcattgcgagccgttgatcgcgtattcggag

SEQ ID NO: 3983 - DNA, 7475 bp, Unknown
  R22_24m  MAG No. k141_40389
ggggtgtttgcggcgctctgccgtgtggcgaatgggaatggatggtgctcttatgggatttgagcaggaagcagttagtgaactgtatgccagcgtgtggggcaatcgttcgacaatgcagagggaattcactcgtggagcccatggtgagcagttcgtgctccgggagctgtccgtgaaggggacgcaaacgccatcgcaattggcatcggcgctgcaggccagttccggccgcatctccactgtgctgtcgtctctggagaaaaaaggctgggtcacgcgtgacattgattccaaggatcggcgcattattcgcgtgaatctcactgattccgggcgcgagcagtctcatcggatgatagaggaaatgcgttccgcaatttgctggattttctcgcaaatgggggagcggcgcacgcgcgaattcgttgacctggtgtctgagttcaccacatatatgtcgatttgccatccggggcggcctcggccgacggctgaacaagtgcgtgaggcattcgtggagcgggacaagcgcgtggctgaacacatggcagctaagcgcgcggaggctgagcgagactagcttcctcccgctggcgggtctctccctccgtcactgctgcgcggtgacacctccctcgtcagagggaggtaaaggtaattgaggacgctcacagcgaacatacagaagtgcgtataatatctcacagtgtaagtaatcaaacaatggaaactattaagacatcgtgaaccgataatcaccgataacccagccaacttaagaaccaatcgccaataaccaataaccaacccaaccaacacaaggggaaaccaatgtttcgcatcatgaaatacctctccaaagcggagatcggtcagatgctcatcgccctggtgaccatcgtcgggcaggtctacttcgacctgaaactgcccgactatatgtcagacatcaccacgctggtcgagacgccgggcagcgacatgaaggacatctggatcgcgggcggcaagatgctgctcatctcgctcggatccgtggcgtgtgccatcatcaccggctacatcgctgcgcgcgtggccgcctcgttcacccagcgtctgcgctcgctcgaattccgcaaggtcgagtccttcggcccggccgagatgagcaagttctccaccgccagcctcatcacccgttccaccaacgacgtcacgcaggtgcagatgttcatcaccatgggcctgcagctcatcgtcaagtcgccgatcatggccgtatgggccgtgtgcaagatcgccggcgaaggcttcgaatggacgctcgccaccggcatcgccgtggcggttctgctggtgtccatcaccgtcatgatggccatggtcatgccgaagttcaaggtcatgcagaccctgaccgacaacatcaacctcgtggcccgcgagaacctcaccggcctgcgcgtggtgcgcgcctacaatgccgaggactaccaggaagccaaattcaccaaggccaacaaggacctcaccgagacccagctgttcaccaaccgcgtcatggcgttcatgatgccgttgatgaacaccgtcctgaacggcctgatgctcgccgtctactggatcggcgcttacctcatcgacgccgccgggctcaaggacaagctcaccgtgttctccaacatggtcgtgttctccaactactccgtgcaggtcatcatgagcttcctgctcatgagcatggtgttcgtgctctggccgcgcgccgacgtgtccgcgcagcgcatcatggaggtgctcgacactgagccaatcgtcgagaacggcaccaaaaccgccgccgacgtggccaaaaccggccagaggggcaccgtggaattccgcaacgtcagcttcacctacccggattcgcgcgaggcgatgctggaaggcatcaacttcaccgccgagcagggccagacggtggcgttcatcggctccaccggctccggcaagtcgtcccttatcaatctcgtgccgcgcttctatgacaccagccaaggccaggtgttggtcgacggcgtggacgtgcgcgactacgacctgaaggccctgcgcgacaagatcggctacgtgccgcagcagtccgtgctgttcaagggcaccgtggcctccaacgtgagctacggcgatcagccgggcgacccggcggaggtcgagatggccgatacctccaccccggccgggcgcaagcgcgaggccgcgttgatcgccgctggcgaggccgcggaaggtgccgatataccggccgagcagctgaatcgcgtcaaggccgccgccgacgtggcgcaggccagcgagttcgtggcgcgcatggacggcgggtattccgccgcgatcgcccaaggcggatcgaacgtgtccggcggccagaagcagcgcctgtcgattgcgcgcgcggtgtaccgtcacccggaaatcctgattttcgacgactcgttctccgcgctcgacttcaagaccgaccgcgaagtgcgcgacgcgctcgcccgcgaggccaaggattccaccaagctcatcgtggcccagcgcatcggcaccatcatgaacgccgaccgcatcgtcgtgctcgacgacggcaaggtcgtgggtcagggcacgcacaaggaactgctcgacaactgcgacgtataccgccagatcgccgaatcccagctcagccagtcggagcttacggcgtaggggggggcagcggtagctccccatgtcaggggctgagccgtaaagggaacagcccagtgggctgttcccaggcgaagacgagctgataagcgagcgaataaaacagcacagctgactgaggggtagtcgcgtacggcttctctccctccggcgcttcgcgccacctccctcatcagagggaggtcaatacggacttttaaggagtaaaacaaatgccaagaggaccaatgggcggcaggcgtgccgtcgaaaagccccatgatttcggcaaagtcatgggcaaactcgtgaactactgccgcaactatcttcccgtcatcatcatcgcgctcatcctgggcgcggccggcaccgtctgccagatcgtcggcccggacaagctcaaggacatgaccaacgagatcgtcaaaggtctgcccgccatcgttaacggcagaccggtgatgaactcggtagatttcggcacggtgggccacatcgcttggactttggtggccctgtacgtgggctacgccgtgctcggctacgtgcaaagctggatgatggccaacgtcacccagcgcaccgcccagcgactgcgcgagtccatctcggtcaaaatcaacaaactgccgctcaaatacttcgacaaggttagctacggcgacgtgctgtcgcgcatcaccaacgatgtggacgccatcggccagacgctgggccagtcgctcggctcgctgattacctcggtgacgctgttcgtgggcgcgctggtgatgatgttctacaacaacgtgatcatgaccctgtgcgccatcggtgccagcctcatcggcctgatcatcatgatggccatcatgaagtcctcccagaagtacttcgcccggcagcagatggcgctgggtgacgtcaacggccacgtggaggagatgtacgccggtcacctcatcgtcaaggcatacaacggcgaggccgattcgattcgtcgcttcgagaagtacaactcggacctctacgagtccggctggaagtcgcagttcctctccggcctgatgatgccgctcatgaatttcgtgggcaacttcggctacgtggtggtgtgcgtggtgggcgcggcgctcgcgctcgacgggcagatcgagttcggcgtgatcgtggcgttcatgatgtatgtccgtctgttcacccagccgttggcgcagttcgcccaggccttccagaacctgcagcgttgcgcggcggccgccgaacgcgtgttcggcttccttgaggagccggagatggaggacgaatccggcaagtccgctctgcttgggaccaacggccacgaagtgaagggcgacgtggaattcagccacgtacagttcggttacgaaccgggcaagccgatcatccacgacttctccgcctccgtcaaggccgggcagaaggtcgccatcgtcggcccgaccggtgccggcaagaccaccatggtcaacctgctcatgcgcttctatgagatttccggcggctcgattgcgattgacggcgtggacaccaagtccgtgccgcgctggaacgtgcacgaccagttctccatggtgctgcaggatacgtgggtgttccgcggcactgtgcgcgagaacatcgcctactccaagcccggcgtgaccaacaagcagatcgaggatgcgtgcaaggccgtgggcctcgaccacttcatccgctcgctgccggacggctatgacaccgtgctcgacgacaagtcgtcgctctcccagggccagaagcagctgctgaccatcgcccgtgcgatggtgcaggacgcgccgattctgattctcgacgaggccacctcctcggtcgatacccgcaccgaagagctgatccagaaggccatggacgcactgaccgtggggcgtacgagctttgtgatcgcgcaccgcctctccacgattcgcgacgccgacatgattctcgtcatgaaccacggcgacgtgatcgagcgcggcacgcacgacgagctgctggcggcgggcggtttttacgccgacctctacaacagccagttcgcactcgctgactgacggattgtttcctgcgttagcggattagcggattagctatactcggctcccctctccgaggggagctgtcagcgtagctgactgaggggagcaacccatcggtccacccgagggatgtgatactgatgatttcgtacattagtgtgtgaaaaagccgccgggaaaattgggggattgggcggcggtgcggttggcgttgagaatggcgcattcgaaggggaagtgagcgcgcagctgggtggccggggtggtgaacagggcggtggcgaggccgtcggccagtgtgacagggacgtgtgccgcaacggtgttcgacgaatcgtcggtatcgcggtttgccgttgtcgaggcattgctgccatgcgtcgatgtcttcgtggttatggcgctcgatggcggcgtgacggccacccatgtggcggctacatcgtcaaccggtagtccgtcgatggcgttgagcagatggtgaagttggtgacctgcggcgtcagaccagtggcggcggctgggggagctcgcgcagaatgcgccgtggctgatttcgaccgtacctacggcgttggccggatcggcaggatcttcaagggcgatggtgattggttcgtccgtgtgcactagcaaatcacccccggcgtcgatgacgtattgaatgggttgagggtgacccgcgccatcacccaacatccccgcaagcaaatccaccaaataccccttaccgcacgcgccgaaatcgagcgcgaccggtccgcgcgtcaccagtgttgtgccatgccgctcgacgtcggctgaccaaatggctcgtccgtggatcgcgcctgcatgttcagcggcatctggcgcaggcgtaaacgaatacgactcgtcatagccaagccgaatcaaatcctcgcccacgcatgggtcgatggtcccattggtcgacgcaaacagctggtcgtacaggccaaataaacccaatgcccaatcaggaaaatcgaacgtgccgccatgcgtggccgtgcgcatccggccgaccgtcgaatcatccttgaaccgggacaatgcggcttcataggtgctgatgaacatatcgatgcagttactgagcccgtcgtccagcgcgacatcggtatgcagcagcaacccggtgcccagcgcttcggggaaagcggcgacgtgcggtagtcgttcggccagaccagtcatggctctcatcgtagagcctgcggatggctgaggggaaggcggctcggggtgtggattgtggtgtgcggttttgccctgcagggaattgagtgtaaaaccccggtgtatactggtttttgacactgtgtcaatgttgattcggaggttatggggaatgggcaatacgactacagcaagtgtaacgggcgcgcaagttgcaccggcgaaatcagccatcaaagatctccccatcgccaaagtgtgggcgtttgcggtcggccagttcgggtgggcgctgctttccggcatcatctccaactggctcgtgtatttctaccaacctgaccaggagaccatctcccaaggtcagaccgtattcgtgccgcagggcctggtcgttctcggtatcgtgaccgtggtgggcggcatcaccgccttcgcccgattcttcgacgcgttcgtggacccggccgtggcgtccctctccgaccgttgcgacgccaaatccggccgccgtatgccgttcctgaaattcgccgccctgccgctcgcggtggtcaccgtactcgtgttctggagtccgatcaacggcaccggctgggtgaacgcggcgttcctgttcgtcaccgtgatcggctactacatcgtcctcacgttctactgcacgccgtacaacgcgctcatcgccgaactcggccacgactccaagcagcaactcaccatctccaccgccatctccttcacttgggtggccggcacggccatcgcgtacgtggcgccggtgatttggggcgcgttcgtgccgatgatgggccgtatcaccgccatccgcgtgaccttcaccatcatggccgccgtggcgttcgtgtgcatgctggtgccgccgctggccatccgcgagaaggactacgtcaactcccagcccacctccgaatcggccatcgaatccctgaagcagacgttcggcgacggcgaattccgcaagttcgtgtgttccgacgtggtctactgggtggccatcaccaccttccagaccggtctgccgttcttcgtgaccagcctgctcaagctgccggaaaccaccacgaccatctacttcgtgctcatgaccggcgtctccgtgctgttctatctgccggtcaatatcttggccaataaggtcggcaagaagcgcctgctgctggttgccttcgtgatcttcacctgtgcgttcgcatttgccggcgcccttggttcggccgcgctcggcttcattccggcgatggcccagggtttggcgctctcggtggtcggcgcgattccgatggccgcgttcggcattctgccgcaagccatcgtggcgaatatcgccgacgccagctccaagaccaccggccaggaccgtcagggcatgttctacgcggcccgcacctttgcgatgaagatggggcagtccgtggccatgctgctgttcaccggcgtctccaccatcggcatggcgtccggcgcgggctatcgcatcgccgccgtgtgcgcggccgtgctgtgcggcttgggcggcatcgtattcgcgttctacaacga

SEQ ID NO: 3984 - DNA, 2601 bp, Unknown
  R22_24m  MAG No. k141_40529
cgcgtcctgggccgctgggccgatctccgagaagatcgaggaacggaacatcgccaccactgcagtggtggcggcatcctgcctgctgtatgccatcggcgtggcggtggcatgggggctcggcgtctggtccaccggcaccgcccgtgaaaacggcatgctgctcttcgcgctgatctccggattcgccttcggcgtctacgatgcgttaggcctcgaactggtaatgaatgccctacccgacccgcgcaacgccggtcatgatctcggcatctatgcactgtccaattcggtcggactggcgctcgccgccatcatcggcgcgctactggtgaacgccttcgagcacagcttcggctattacctgctcttcccgtccgccatcgtcatggtgctgctggccggaatcgtcaccctcgccgccgagtccgcgcaatgacgggccggtccggctccccggccgccggcggcgttcctccccgcggcgggggcgttcgtctcggcgacgtggcgtccacaatgtgaacccttgctggattggcaagacagccaaacctatgtttacattccagttcaggtcgaacggcctgaggaaataccgaaaggaggccacgcgatgactggattcaatgcttctgcgtttgtatccgcacgaattattagcccgtcttcgctggcggactaattcggcattgatgcttgaagccccgtcaacgaaggcagggccaatcaagctgacacaatcggtaaggccctgcaagttgcggggctttttttgttgcgctcacaaggcttacggcagaatcccgcagacggaaacggtagcggacagtacacggcaacaacacagcaacagaacaacaacctccctgtgagacgaaataatcgcccgccaatgagagtgaacgagagcaaaacaggagtaacaatgactgcagcagtcgaagagactggcttagggcaggcggcaggtaaagccgctaccttggtacgcgattcggtcaagaccgtgatcgccgcatcgatggtcggtaccgccatcgaattctatgacttctacgcctacggcaccgccgcggcaaactacttcccgcacatcttcttctccgcgaaggacaaccccaccgtcgcactgctgatgagcttgctgaccttcgccatcgccttcatcgcccgcccgctgggctcgctgatcttcggccacttcggtgaccgcatgggccgcaagaccacgctggtcgtcagcctgatgaccatgggtgtcggcaccttcctgattggctgcctgcccacctacgatcaggtcggcgttggcgcagtcgccatcctctgcctgctgcgcttcatccagggcatcggcctgggcggcgaatggtccggcgcggcactggtcgccaccgagaacgcgcctgaagacaagcgcgcactgtacggctccttcccggagctcggtgccccgatcggcttcttcctgtccaacggcacctacttcgtgctcgaatccttcaacaatcaggacgcgatgctggcttggggctggcgtgtgccgttcctgctgtccgccatcctggtgatcgtcggcctcgtggttcgcgttcacatggaggagaccccgatcttccgtatggctcaggagcagaagaaggtcgtcaagtccccgctgaccgaggtcttccgcaagtcttggcgtcaggtgctgcaggccaccttccttgtggctgtgacctacacgctgttctacacgctcgccacctggtccctcgcttggggcaccaaggagcagggcgaaggcggcggcggccttggcttcaccaaccaggaatacctgctcatgctcatgatctccatctgcgtgttcgccctgttcatcgtgctgtcctgcctgtacgcggacaagatcggccgcaagcgcgtgctgaccttctcctcctgcgcactcgtcgtgttcgccgtgctcttcccgttcctgctggacggtggtctggtcggccagaagaacttcctcgccaacatggtgttcctgtgcgttggctttgccctgatgggcgtcgccttcggcccgatcggcgcgttcctgcctgaactgttcgaggcgaacgtgcgctactccggctccggcatcggctacaacctggccgccatcgtcggcgcggcgttcgtgccgaccatcgccacttggctgagctcccactggggcgtccactccgtgggcctctacctcgccgtgatggccgtgtgctgcctggtgtcggtcctgacctgccgtgagacgaaggacgctgactttaccaagtgaaatcctccataactaaatatcgccaagttcacaacgtgaaaaatctcaattccacgaagtgaacccctacgaggcttttccggtgcaacaggactaaacctgcatatcggaaaagcccacaaggaaagccacaactaaaaacagtttctgcagaaccagcagagcacaataacaattaaagatttcacccccataaacaaataaataaaaggagcgccaaaaatggcagcaactatctggtacgagaaggacgccgatctgtccgtgttcgatggcaagaaggtcgccatcttgggctacggctc

SEQ ID NO: 3985 - DNA, 36497 bp, Unknown
  R22_24m  MAG No. k141_40606
cgccgagctgtttggcggcctgcttctgctgcatgccgcccagcaccagctcgactgcccttcgcctggtctccagtgggatgatgggtttggccatatggccagcataccgggaatccatcgccagccaacgctccaggcactgcctggtcggataacccagatgctccaccacctgggccgtcgtcatcggcgtggtgaaatacaactccaccgcacgctctcgttcctcaagaccggacatacgaaaatctttccgttcggtctccaagaaaatgtccgcagccccttatcaaaagcagctggagtcgacaatcaccttcaatgtcaaaatgctattgacggcttatggttattcgcagtccagcttggccgaagcgatgggaattggccgttcggccatgtccctaaagatgtcggggaaaacaggctggtctgtatacgacctggttaatgcatcaagattcttgaaagtaagcacggaacaacttcttgatgattctctgatgaggagaatgggcgtttcggacgatgcggaggcggatatggaaaagtccgccgtttccggcggactttccgatgatggtaccccccgtcggagcgcgcctccgcggaggcactcgagaacatccacccgttcgccgacgacaacgggcgtaccggacgccagatcctcaacatgatgctcatgcaggcggggtacgagcccatcgccatcaggcatgatgccggcagcacctacgccggacggctcgagcagtggcaggcgtacggcaatccggttcccctggcgtgcatggtcgcggactgcgtggtccgggaacagtgccggatcgggaagatcgtgtccgatatccgccgcgggcatcccatcgccggacacgccagaggtatacgtgaatagtgtgtttacacactgttcgagaataataccctgacatgtcaactaacgcaacgtttactgggatgacggacaagaaggttggttcctatcagctcataatgacgttgccgactgcttgatggtggttgtggcgcttgtttgttcgattccgccggtgctgggtcgttttcgtctggctgaacggcggccaatctgggagttcgttctggtagacctcgtcgggccataatctcccagattctgcggggagtttacgctgacttcgggaattcgccgctgaactcccgtgccggacgcgggagtttacgagaatccggtactctcatgcataatctctcaacaaaaacgttggaattccgcgattctcaaaaatcgaccttgaaaccgttcccgggagaacttcgccggattcatgtttcgcgctaaactcccgcgcgcatccggaagttttcatagaatcggtcgcgcaaacggacatccggatttctcaatttctcccgggatcagcctcttccaccgagttttccagaccacaatctgaaaactcgtgatttgagcctgctgaatcgagattttgagttcttcccaaactgactgccgcaaactgaccgcactcatcgtcctgtcagcgcagccggtttgcggaatggaagacgtgtgcggagagcagcgcgcagcggtgcatagtccccatggttggtggccgtccgcggctactccagcggtgtgcgatcccactggtcggcgcgtggaatggtgcgcaggctgcgcgaactgacgattagcagcatactgacgagcatcaccgcccagaacaccagcatagtcccgctgaatccgaaagcgggcaacagacttccggccgtcgctgagcagaacgcggacagtgcctgggccggtacggtaagcgtcacggtgatacgcccctgcatcgtgtcgggcgtcttaccgaaaatgaacccgagctgcaacgcgttgatgatcgggaacggcaggcacatcacggcgttggcgataagcagcacccagtagttgtcggtcagcagcatcggcagcgaagcgatgcagatgaacacgaatccgcagcatgtcaccggcccgaccggtgcggtatcgctgatccgtccggcgatgaacgcacccgccagcatcgcgaggaatacgcccgtattcacgaatccgatgagcgtcgcgttcacgccggtgcgcatcagatgcagctgaatcgcatactggaagccattgaccccgaaattcgccagcgcggacgacaccatcgtcaacaccagcatcctgcggtgcagcgaccacgaccatccttcggcgaaatcacggaaaaatgacgcgccgcccgctttcccaccgtcatcgtcgctatcgccgttgccgctatcgctgccgttccgcggatttccgccgactcggatacgtgtcgcagccacgcctgccagcaggtacatgaccgcagccgacaggaacggcaaccacggggcgatgccgtacagcaggccgccgactgggctgccggccatgttgatggtcgcgtcacggccttcgttgagactgcgcgctttcggatatgagcgaatatcgacgatggatttgagcatcgcatccgaggcggggccgagaaacccgttgaccgcagactcgaacaccgcgatggcaagcagcacggggaagaccagcttgccggccatgagcagcgcagcgactgacccccaacagatgacgcccgctgtcgcgttcacgatgatcagtgtcttgcgatcgtgacggtcggcgaatgtcccgccgaacacggcggccgcctgctgtgcgatcgcggccagcgagcccaaccaacccgctgctgtggtcgatccggtgagcttgtatccgatcagagagaccgccagataccgcagggccacgccgatggccgtcgcgctgtccgccgtgaaccatggcacgtaacctgggatatcccacaacctgctttcgcgcacaggagcagaaacgagctttaacgaattactcatctaataatttatccttaccctaccagtactggaatcctacagaagattaggcggcactggttctttacaaacttgctcagtatgccaagcataatcatatatatcgaagtaacccttttctccataatgagcaggacagcaataacatcgataatcttcaacctgttccgctaccaacgatcccaatgttgaacataatcgatagctaagcttaccggactcatggtgcagcaatagcttgcctttgattgccaagtgtgaagaaatatagtcatatttattgttcggataatagaattcaggcaaacttaccgaattaccaaaatagcctggattaacaatgaacgctatatctttcttatcacatgagtagttaatcatccttgcgacttcggtggtgcttggaacgtctgccgcttgaattactaagttgattttctctcggtcaattaattcatcaagttcactatgacaagttatcattttatcaatgctatctatagaaagacatcttgacgccctggatttcagcacatcaacctttttcttcccaatgtctgttcgcacgtaatcctgacggtaaatgttgtctacagtgacaacatcatgatcgaccaaagtaatatgttccaaagcaagcattgaaatgtgccgataaatatgacttccaatagacccgcatccgagcagcaggcatctaatttgtcgcggctcagcgtgttcgacacgcaatacgtccaaactgacaagtttgtcaatagccgctggggccggtaacgttttgttggactcgtggcataatcaaaccatagaaacaaagaaatccaataaagcgacaccgtatccaagtgcccacctctatttgacggaatgcaccatattccggcaccgacgaacatcaggatcgagccccatcaccaatcggcaccaagccgcccatatcccatgattagctaaagatatctctgaatcacagcgttcagaaaggaggcgccatggaaaagccactgcttctgctggccttggtgccgctggccgtcggattggtcctgatatccgtcgtgatcggatccaaaaaccgggaagagaacgcaaaaggactcttttgcgttctcttctcagcgctcatggtcgttgccggcgcgttggccatcgcgagacaactcgtatgacgcttcacgctgcggcatgttgtcccggctattgcccacgcccattcccagctctccgcgccattcccgcaatcacgtctcttccccggtctcaagcacatgagacacttggagccatgactaccatcatcatgcgcacctcgcatgataatcctagccaactgtttttggctttgttccaaggttttcgatttttgggaaacctgccggttacgctcgttttccacgaggcacctacaggcacccaagaataatctcattcttctgtgcatatcagcggcttaccgacgacgaaagaagcatgcgagtgttcctgcgacctatctcagatggcgaagccgctcgatcagatcgacgagcgcctgttcctcctgttccacgcagtctaggaaaatggagcagaacgaatccggcttgccgtccacctgccatgcctccaggcctcgcgcgtatgaccgacccgcatcgtatttgatggccacgggacggtatccgttccgcagcagcacgaagttgagcagctggcggccggtccgcccgttgccgtccatgaatggatggatgttctcgaacatcgcgtggaaaccggcggccctgagcagcggatgcgctgcgcagccatccaacccgtcgatcaaggatcgcaggtcgtcgcggatctccagcgggtccgcggtcttgactcgggtggcggtgatccgcgccaaatagccataaggacggaacgtgccgcgggcgaacggctggagatccaatgcggtcacctcgtgtagacgacggatcagctcctcgttcagcttccgcccctccttggcatattcgcgcacgtaggccatgccgtcagcgacccctcgcgctgcgaacacgtatctggccggcgagtccgatgggacgaactcgccctccaacaccagcgacgtgtcctccagggtcagcgtggatccctcaatggcgttcgagttgtaggtgtagcgcaccagccagtcgcggtcgtaatccgccaacgccatgtcctcgacaccgtccaacggctccagcgagcgggcccggtccttcagcgcgtcgaccctctgcaggtgttcggaaatctcccgtcccccttcaagggcgttcagctcgtcgggaagggcctggatgtgccgtgacagctcgggattggccatcatgctcctcttttcgtgttccggttgcaaagtccattattccagtagtgactcgttgcgctagcggttcagatgacggctcaacgcatccggtccggttccgacgcttctggcatccccatcccgttgtccaaggttcttccgcaacgtctcgccgaatctgtccatcaaatccgttttattgcgaatcgggtcagaaacacgaaggacctcaccttcgctgattctgcggagcatcccgatacgctttaccaactgtacccggatggcgtcgaggcgttcgggcgcgaacatgcgcatgcgcgacaactcgtacgccacctcgtcgggccagtccgacagagcatccaggtcgaaccggctccaatcctccaccagtctgagctgccgcaaagccgagggcttgccggtcgcggtgtagaacggcttggcgaaccagtcgcggccgtccacatcgagctcgccgctccacaggctcgcgccagtgtcgtagatcggggccggacggaccgcaagggtctcgatgttccggatcagaccgaagttgctgtaatgcctatctgtattgcgcatgaggtagtcgaccacgagccaatcgtccgtggcgtcacgaaccgcccgttcgtctgcgccgaagccgacggcggcgcggatccactggtcatgcgagttgaggccgttgacggccttgacggattggagcacctgccaggcggagaccagctcctcatgattggagagcatgtccgcgcatgtggacaccagacggttgccgttgcgtgccagggaataccggacggccggaacgcccaatcgcatgcagagcctcgaggcgatgacctcgttcatcggctcctggccagtacggcccgacttgacgagcagtctcctgccggtggccctgtcgatcgtccagcgtttgggaagatcgccgccagtggacacgtcggggacgttgaggctgatgtcatgggacgacgagtacgaggtgagcaggatctcgcccagcgcctcgtcgaaggaattgtcgaagaagttgacgtccttccattcggccgggtcgtcctcgcgtctgacccagtactggtccgacaggctcagcccgtaggtcctgtcaagcagttcgtcggtcgatgccgcgccaagcgattcgagcacgcggcggatgccgtcgcgggtggaggggatggcgcgggacctccaccattcgtcgatcctcttggcatacagcgcgctcttgccgtgcgtggtgaactccaggggcagacgatcatggtcaaggacctcgccagaggagcacgcgcgaccggactcgggatcgtattcgaacgcaaggaccggatggtccccgcacatgatcagcttgcgtggcatgattccgctccctccaaacttggtctttaaagattctacaggcacgaattacgcgcgagacggcgtcccgtttcatgacgcgatacatggatatgggccacttccgcaaatcgcaagcctcggcgatgacgccgacaactgatacggtagtcatattggtttcccaaaggtaaagaggcatgaccatgggattgttcgacttcgctaagaactctttgggtgacgtgccgtccggcttcggcggtcggggcgatatcgccaaccatcttttcaacgaccgatgaaaaggctccggttgaaggctatggcatgatgacacgagcgtgggaatttatgaccgaaggatactcacataaagcggcacacatcgttgagcatatcattctcgcaatcgcgctgatctgggctggaggctgcactctcatatggatgcaaacggatatgtcgcatcgcatcgtgaacacgaaatccgctgacggcacctgcgaagtgaccatcagcgaactcggctcgcccatattcttcggtccaagcagcatcacggtcaaagtctcttgggacaccgatcccggtgttatcggttccgagaacgtcacggaaatcaaaacggatctgcacaacgacggcaaatcattaggctcgggcaacttcaccgtcacctggcacggcaacatcccgaccgtcaccacccatggcgaggaacagccggaccaaagctacacattcaactggaaataaccgctccgaacatcatgtctctcccgagagtagtcctcacaaccgggcaggtcccacaaggagcatagctcatgcacccaccgcccggtctcaagcacatgagacacttggagccatgactaccatcatcatgcgcacctccgagggcgacatcaccatcaacctgttcgacgacaaggcctcgaacaccgtggccaacttcctgggcctcgccaccggcgagaaggaatgggcggacccgtacaccggccagccttcccatggcaagttctacaacggcctgaccttccaccgtatcatcaagcagttcatgattcagggcggttgcccgctgggcaccggtaccggcggccctggctacgagttcgacgatgagatcgacccgagcctgaagttcgacaagccatacctgctggctatggccaacgccggtctgcgtcgcggcatggacggcaaggtccatggcaccaacggctcccagttcttcatcaccaccgtgccgaccccgtggctggacggtcaccacaccatcttcggcgaggtcgccgatgacgactccaagaaggtcgtcgataagctcgaagcactggacaccgatccgatggatcgcccgctcgagccggccgtaattctgtccgtgaacgtggccgagtaagaccgacacatatacagcaaaggtcctgattggtattccagtcaggaccttttcgtattcttggctccctctctgaggggagctggcgccgcagacgtctgaggggagttccgcaagcccgcgctgctcccctcagtcagcttcgctgacagcccctcccggaggggagccaagcaacggcctacttcatcttgcgcagtcgaggttcggcggattccttggcaccggtgatgcggtacacgtcgaacacgccatcaatcttgcgcacggctgccagcaacgagttgagatgctgcggatcggccatttcgaagctgaactggctggtggccacgcgatcggaaccggtggcgatcgtaccggaaatgatgttcacgccatggtcggaaagcacacgtgtcacgtccgaaagcaggtttcgtcgatccagcgcctcgacctgaatcttgaccatgaacaggcccttggtgctggtccattcgacttcgaccacacgctcaggctgcttgtttttcagatcgatcatgttctggcagtcggtgcggtgcacggatacgccctgattacgggtgatgaagccgatgatattgtcaccgggcaccggcatgcagcaacgggccagcttgatccacacatcgcccacgcccttgacggataccccggtggagctgctggaagtcttgcgctccacgggcttgagcggcagagcctcctgctcgacctcctcatcgacctcgtcggcacccgcatccttgaccagatgcgagatgacgttctgcgtggagatctgcccatcaccgatggcggcgaacacagcgtcggcgttcgggaaattgaggtcgtcggccacaccgatcaatgcctcggtggtcagcagcgcattgaccggcaagttacgtttgcgcatagcgcgggtcagttcgtcgcggccttcctcaatagcctcggtacgacgttccttcgagaaccactggcggatcttgtttcgtgccttcgggctcttgacgaagctcagccagtcgcgcgaaggaccggcggtatcggacttggaagtcaggatctccacggtgtcgccgttgtcgagcgtggtgtcgagcggcaccaaacgcccgttgacgcgcgcgcccatcgtacggtggcccacttcggtatgcacggcataggcgaaatcgaccggtgtggcatgggccggcaaagagacgatcttgcccttcggcgtgaagacatagacttcggacgagccgaggtcttccttcagggaaccgaggaattcgttggaatcgggggtttcgctggtccaatcggcaagctgctgaatccatttgagattgtcggcttcggaaagctcctggttcttctcgtcacgcctgcggtcggacttgtccggcgagctcagggcgcggccggcctggccgttttccttgtatttccagtgcgcggcgatgccgaactcggcgcggcggtgcatgtcccaggtgcgaatctggatttccaccggcttgccaccggggcccaccaccgtggtatgcagcgactggtacatgttgagcttcggcatggcgatgtaatccttgaaccggccgggaaccgggttccaccgcgcatgcacggcaccaagcgccgcatagcaatcctgaatggtgtcgacgatgatgcgcacaccgaccaaatcgtagatgttcgcgaaatcatggccgcgcacgatcatcttctgataaatcgagaagtagtccttcgggcgtccggtgacgtatgccttgatgttctgctcgtcgagatcctcgttgatctccgccagaatctgcttcaggtacacatcgcgctggccggctcggcgagccaccagcaccacgatctcgttgtagatcttcgggtagagcaccttgaagctcagttcctcgagctccgtcttgatggcgttcataccgagtcggttggccaaaggcgcgtacacgtcgagggtttcacgcgccttcttctgggcggacgtggtcttcacatagcgccaggtgcgggcgttgtgtacacggtcggcgagcttgaccaccaaggtgcgcacgtcgcggctcatggccaccacgagtttgcgaatggtttcggcttgggcggaatcacccacttcaagttgactcagcttggtaacgccatcgaccagaccggccacggtgtcgccgaattcggcgcggcattgatccaacgtatagtcggtgtcttccaccgtgtcatgcaacaggccggccgccaccacgatcgggcccatgcccaaatccgcgagaatctgggaaacggccagcgggtggatgatgtacggctcaccagacttgcggcgctgggcggagtgctgggtaacggcacgccggtaggcacggtcgagaatggacaaatcctcatcgggatgatgggacttgcataccttcttgattggatccagcggattgagcggatcggcactgatctcacaacccaacttacgggcggcgtactgctcgccatcaatctctgccatgccagtcacctccctcgtcatgaagttcattgtagccgcgaaccggagccttgtgcatgcacctgttcgccatcattggttccgcaaccgtcgttgccgtcatcaccttggtcattcaaccggcccaatccggtcaggacgccactcccgtcgaaccgaacccacgttcggcgcgatcggatccgggcagtgtctcggccgggatgaaccgggcctcaacataccgctgaatcaccaattgagcgatgcgatcgcccggatggaagacggcggtgcgttccggatcgaggttgatcagcggcaccttgatctcgccacggtagccggcatcaacggtgccaggcgcgttgagcacggtgacgccctgcttggcggccagcccggaacgcggatgcaccaacgccacgtagcccgcaggtagggcgatggccacgccggtgggcaccagtacccgttcaaaaggcttcagcgtcacatcgacggtggtgatgaggtcggcaccggcatcgcccgcgtgggcatagtgcagctgggccggatgttcggggtcgaggctcttgaccaggacctcggtggattcgggctcgttgtaggtctcgtcgaacgccatcaggcggcgcactcctcacacaccggctggccatcctcgtccgtgtaggcgagctggctgcgatgcttgaccaggaagcactgcgagcagatgaactcgtcaccctgcatggggatgacggtcaccgaggaatcctcgttgctcaaatcggcgcccggcagttcgtagtcttcggcgatggcgttctcatcgtcgtcgatgtcgctcgaggcgttctgcgaggacttccccagcgcctgcagcgattcctcgtcctcatccttattgcggggggaatcataatcctgagccatcatggtcctttcgtcgtctttggttcgtaagtcgatatatatagcacggtcagcgccgtactcgcccataggatacacgatttgaaatactcgtaaagttcgacacgtggggcatacttaaaagaagtaatgtctttgcgacggaaagtggtgcgaatatgccagatgatcggcttgaaaaagcccgtttcgtgcgcgtgagcaagacgggggacctcgtattctccattggcggcagggaaatggccgtgagcgtggacgacacgctcgaacgggcgattcttgaggccaagcaggtcagaagcgagacgcgacaggccccccagccgcatcagcagtccactttgccgatttcccagatacagtcgctgattcgcgccggcgccgatccggcccgtgtcgcggagaaatatcatctgagcgaaacgctggtacgtcgtttctccatggccgtggagaccgagaaacagtacgccatcgaacaattccttgccgtggcggcacccaaagacagcagggtgcgcaccatcagcgaactggtggaacgcacgctggcctctgctggaatcggcatggaatcagtgacctggaaatccacccggcgcggacttgagccttggcgcatcgtggcgatattcacttccgcgggccgtgagatccatgccgaatggacgtggaatatgcacgacaattccgtgatgagcctgaacaatgccgctcgaaaactgctcggcgaacagaatccggaatcagccacggattccaaactcaagccgacgattcctgaactgcccggcgactccgtacgttccgcgcgtatcgagcgcgctgtgtctgcttgggcggcgcctacgccttcgattccggccgcacggcctgccgcgatccggccctccgtcacttccacaggttccatgcccccggtggacctatccacgtccatctcaccggccacgaaccaggctcatgacgctacggctcccagcccggtctcttcgcagaccgccggatctgtttcgtcatctgccgcaggattgcagcaatcgcctgccacggcaccagagcagggttctgacaatatttcggacgagaccgtacggcgtggccccaatgcacagctggtagccaccgagcaggagcgggcggccgaatccgccgccaccaaacacgaggcaccagccaaaccggccaagcgtaaatcaggacgttcggccgtaccaagctgggacgagattctgttcggagactgaatttccgaatcaggccatatcgatcaggcagggaatatccatttccaatgccgtttgggagccatgcacgctcggcaggtgggtggctttgtctccttgcgtacgcgaatcgacgagggtcacggctcccgctgcctgcacgaccacatcgccgagcatcggccggactcgctcgcagaccggtccaaacaatccgtccgcgatggcctcatccctggtccgcaccaaggctcggtcttgcaggtaatcgcgccaccggcaagctatatcctcaggtcgttcatccgactcggcatacagcatcagcgagcgcggctctcccccgaccagtgacacgcctcgggtgagctgcggttcaacggcgatgtcaatccgctggcccatgtcggtttgcaccatgccgtggtcggccacgatgacgatcagcgtgcctttgggtgcgctgcgtttcaggagcgcgagctgggcgtcgatatgttcgaatgcggccacccagtgttcggaatcccacccgtaattgtggccgactttgtcggcgtcacggatgtacaggtaggtcaggccgggggtacgggaggcacgtgaggcggccagcacacgatcgcgtggggtgacgttgccttgatagtcggtgcctcgcaatgcggcttcggtcaatggcgatttggagaacttgggcaaccccgagcttgtgacgcgcacctcttgagccgcaagtttctcgaacaccgtctcctcgcgctgctggtcgagcggatcgaccatgggtggcacaggaatgtgcggattggctggtttgggtgccagcgcgtctttgaactggatgagttggatgagcttatggctggcgggttcgagctgcgtatagcccgccattgcggtcagtcccgggcaggttccggtaccgaatgcggccatggccgccacagtggtgcttggagcgcaggtggcgatgggacgctgattggcgcgttcgttcatcagcgaacgcagatagggcgcgtggccgaggcgcatggcgaggttccagaagcccaggccgtccacgagcaccacgatggccgattcggcgtcgggcagtcccaacgcgcgctggcaggccttgggatcggcgtggaccttggtgggagtcggatgcccaatcgcggcggacaaggcgggcagcacggcggacaggtgcagtgctcccccacgccgatcggccggggcgtcatccccatagcccacagtgggcaccagccgcagcaactcgtccatatccggcgtctcaacactcatagttgcccattcaagtagcacccctccccttggctcagtgcgcagagaacggttctcaataacaactgtgcgccccaacgcacataatcaaacaaacgcacatcgactgaaacactggaatcacgccattttatcggcaaacatgtgcgattggcgcaccgaaaccagcgcacagttgttatcgagaaccgttctctgcgcactgtttcgcgccctcccgctaatatgggggcgttcgaaagggagtttcatggcatcacaccgcaaaccgtccgcgcaaacctacgatccgcgcacggtcaaggagcatatcgtcgagacgccgctgaacgaggagatgagcaaatccttcctcgagtatgcgtattcggtgatttacgcacgcgcactgcccgatgcgcgcgatggcttgaagccggtgcagcgccgtatcgtctaccagatgggcgagatgaacctgactcccgaccgcccgtatatgaagtccgcccgcgtggtgggcgaggtgatgggcaagctccatccgcacggcgattccgcgatctacgaggccatggtgcgcttggcacagccgttcgcgatgcgtctgccgctggtagacggccacggcaacttcggctcgctggatgacggccctgcggcctcccgttacaccgaggccaggcttggcccggcggccctcggcatgaacgcggatatcgacgaggacaccgtcgacttcacgccgaactatgacaacaagctcaaggaaccgaccgtgctgccggccgccatcccgaatctgctggtcaacggcggctcgggcatcgccgtgggcatggccacgaacctggccacccacaatctgggcgaggtggtgaacgccgccaagttcctcatggcgcattcggacgccaccctggaacaactgatgcgttacgtgcccggccccgactggcccaccggcggcacgatcatcggccgcgacggcatccgtgaggcctatgccaacggccgtggtacgctcaccacgcgcgccgccacgcatatcgaacatgtcacggcccgcaagcaggccatcgtggtcaccgagctgccgtacatggtgggcccggagaaggtgatcgagcgtatttccgacggtgtgaagaaccgcaagctggaggggatttccggcgcgttcgatctgaccgatcgtcataacggcacgcgtatcgtcatcgagatcaagaccggtttcgacccgcatgcggtgctggtgcagctgttcaagcacacgccgttgcaggacaattttgccatgaacaacgtggcgctggtggagggccgcccgcacacgatgggcctgaaggagatgcttcaggtgtgggtggaccaccgccgtgtggtgatccgccgccgcagcgaatatcgcaagaagaaggcgctggaacgcctgcacctggtcgagggcctgctgctggccatgctggacatcgacgaggtgatccaggtaatccgcacctcagatgatgcggatgccgcgaaaagccgtttgatggttgtgttcgacctggacgaggtccaggcccagtacatcctcgacctgcgtctgcgccgtctgaccaagatgaaccgcatcgaacttgaggccgaacgcgatgacctgaagaagcgcatcgaggagctgacccgcattctggcctccgccgaagcgctcgaccaggtggtcaccgacgagatggacgaggcggtcgccaagtggggctcgccgcgtcgcaccgtgctgctggatgccgacccggatggcacgttgacgccggtcgtggcgcagggtgccggggcttcgggtgtgtccaagtccgcgctcgaagcggtgaaggccgccaccacgatttcctccgccgaagccgatgtggccgcagccgcagccgcagccaagaagaccggcgaacagtccgcgctgaccggagccttgaagatcgaggacgagccgtgcgtggtgatgatgagcgccaccggtttgattgcccgtaccacgccaagcgcgatggacgtgttcaatgtacggtccacatccgatgaacgtctgcgagacgatcaaatcaccacaatcttcgagacctccacgcgcgccacatacgggctggtcacgtcggccggccgcctggtgctcgcgcatgtggttgatttgcctgccttgcccgctgccgccacattgtcgctgaagggaggagttcaggccgacgaactgatcggcatgaccgaatccaccgatccgattcgtggcgagcgcgtgattacggcgatcgccatggagcagccgacgtccggcaaggccagtgccaaggatgagagcgaggatggcggggccgccgaggccaagccgttgccgtcgctggctatcggtacccgtaacggtgtcatcaagcgttggaaccgtgaggcacccaccaccatggattcctggcccgtcattgatctgaaagatggcgacgaagtggtattcgccgccgtggccgaggatgacgaccgtctggtgttcatctcctccgattcctcgctactgacctttgaggcgaagaacgtgcgcccgcagggtcgcaccgcgggcggtatggccggcatcaagctggccgagggcgcccgtgtggcggcattcaacgtggttcccgccggcaaggtggcatggacctatgaggagggcgagaacggtttgacttccggctccggcgcggtggtgctcaccgtggccggcgactccgatgcactacccggcaccgaaaacggcgccgccaaggtcaccccgctggaaatgtaccccaccaagggccgcgctaccggtggcgtacgctcccagcgcttcctcaagggccagaacacgctgattcttgcctgggttggtctctacccgttgcatgcctccacatccgcaggctccccggtcgagcttcccaagcccgatatgcgccgagacggctccggagtggacctcgcctcccccatcgccttcattgcgtaacctcaattaagctccctctgatgggccgagccgtaaagcaaacacccccagtggggtgtttgtaggcgaggagcgaacgatagtgagccaaacacatagagaagagaccctaaacccgacctacactaagcatcaaggaggtggcgatgagactactggttgccgtatccaatgaaccgttggcccgcgccattcgtggtgcgctgcttgcctgtcgtcatgaggtgtccttggcaagcaccggcagtatcgcgctcgccgcggtcaccaaggagctatttgacgcagtgattctcgatgaatccctgctcggcatctccaccgagcaactcatcgaatcccttcacaatgcccgtgcctccgtcaagattctgctgctgacttcgacgccactcagcaaaaccatcggcgaaggcagccgctggcgagcgctgcctgacgagtacgccccgatcgaagagacgccctacagctccttcagcgcggattcacacgcaaacaactcagatgccgaagccgaacagtgcacggacaatgctgccgctagcgcacgagctaatgtacgacacccggatgccgtactgagcaaaccattctccgatggcgaactgctctcatacgtcggctcgcttgccaccgactcccccaccatgatcattcgtggcaatctcacgttggataccacgaatcgcaaagcctactacgcatccacacacaccgcaatttcactgtcccgtctggaatacagtttgcttgaagcactggtcaaggctgatggccagtttgtcaacaccagcgaattggtcaagctcgtcggtggcccattcttcgagcaacaagggctcctcaggaacgccctctacacactggataagaagctcacccacgccggcctcatcatgacccaacgcggctccaactaccgcattcgatagctgggctcaatcagtacagccgcatgcctcggggaacgggggtgaagccggactggtggaggatgcgggcgaaggggtgacgcgcgttgaggggttcgccattgatgtcgctgaacgtcacggaaccggtgccattgcgtttgagagcgtaggccagttctgtggcggccttgcgcatttgttcgtcggaatcattggcggcgggttcatggccgaccgattgatcgaacgccgtcaagtgcttggctttggcagccgcgtatagtagcgcaccttgcgcattgagcacgaccgtggctccgatacggcgtgccggtttacccgcaccggcaggcgcgtccggccacgcgatggcggagccactgagatttgcggggtcgagcacactcaatgccaccacggactggccgcgatgctctgacggatgacgcaacgcatccacggtgtcgcgctcggcaaattgggccgcgccgaaaccacggacgaacatgcctcgtaccagtcgaccatgctcctccatgcgctgcaatatcggatacaacgctgagtagccacccgggatattttccttgtcgatcaccggctgcgcgatgacgccatacctgtccagcaacgtctcgaccagtgcgagcgcctgctcggtctgatcagtgtcttcggcttcagcttgcccgattacggcagaccacaaacctcctaacgtcatatccgtagtggctcggtgaatcggagcgacacgcccacgacgacgtgatgtagtggatttacgcgggcttgctgcgcctgcggttaatgcacgtaccggcgcgaagctggaattggtgaccttaccttgccagaccaagctccacaaggcatccttgaactgctgttcgctccactcttgcggaatgatttcaccggtgtttggattgatgtccggctccgcggtctcattccacacacgtttggcggcatccaccagttgacgggcatggaacgctccccctgagtccagtgcggtcagaatcgcttccggcatggtggcgtctgaagcgttcgatgtcgtaccatgttccacaccgctgagcaatattgaatccgccggatagaaagcaacctcaccggggtccatcgcactggttcccccggtttttgagccgacccagaccacatcgccgctggtcagcaactcatccagcaatgcaggttggtagtctcgtactcgtgcggggaataccgccgactcccagagtgcagtgggcagtgctatgccctccagctgctcgataacgcgcatgagcccgtcggcaccttcatatcgttcgccgccgaccggcccgataccttgtcggtcgataagaaacatctggaacgcctctggttctactggcttgactgctttacgcgccttggccaatgagcgagaccgaatgcggcggaatacgtccttatggagccactgttggccttgcttgtcatcatctacaaagtggccttgcagcaactcgcctttggcagccagtacatccaaagtatgcacggcatccgtagcatcgaggtgcagatcggccatgagctgatcggcggtgaaaggaccatgggttttggcgtaacgggtcacgcgaccagtcacatcatcgtcggcaagttcattccagaaagtgcgctcccccagttcctgttcgacttcgcgaatcacgtccgggttgagcacttgtgccatgtcggtggtgccgagcaagcgttcgagcatgtgcggatcgagagacaacagttgcgcgctgcgctcggcctgaggttggtcatactggtacatcaccacgccgacgaagccaaagagaatgttctcggcaaaaggcgatggcggctcggtctccacgtccttcacggtaatggtgccggcttgcaatccggtcatcacctcgttcagggcgggcatgtcgtatacgtcttgcaaacattcgcgcgcggtttccagcagcagcgggaagttcttgaccatacgtgcggcttgcaggagctgtgcggcgcgcagtcgctgctgccataggggcacgcgacggcccgggtcggatcgcggcatgaacagtgatcgggcggcgcattcgcggaatcgtgcggcgaatagcacggactcgcccacttgacgttctacatctgctttgaggtcttctgggtcgaaaaggaacaggtcttgagcaggaatatgtccgtcaccgtccggtagctgaatgacgataccgtcatcggcggcatatacctgcccatcgaaaccgtagcgttggcgcagtctgcggctgatggccatggaccacggttcgtgaacgcggcggccgaaggggcttaacagtacgatgcgccagccgccgtcttcatcgcgggtccgttccacgatgagggtttggtcgctgggaactgtgccggtgatggcttgttgctcggagagtaggcgggccaggttggtgatagcgttggggtctaggccgtctcggtggagacgggtgaggattgttgggatgaaggttgggacagctggaccttctgcggcagaactccccccagtccgcttcacgtctaatccggcggcgatttctcgggtgaagcgggctatggtacggctgaaaccgtagtcacggccagcgccttcaccgtgccagaacggcagacgggcggtgcggcccggagccggagtcacgaccacacgatcacgggtgatttcctgaatctgccatgtggaggtgccgagcgtaatgacatcgcccacgcgcgattcgtagaccatctcctcatccaactcgccgacgcgacgctggcctttgccggcgtccgcctcaggcaggaccacggtgtacagccctcgatcgggaatcgtaccgccagaggtaacggccactttctgcgaaccgggacgggcggaaatcaggccattatcccgattccataccagtcgcggccggaaggccgagaattcctctctgttgtattcgccggacatcatgccgattacggcatcgaacatgtcacgtggcagttcggcaaacggcgcagcacggagcaccgtggcataccagtcatcagcgttcaaatcgtgcatcgaggcagcggccacggtctgctgggcgagaatatcgagcggattgcgcggcacggccaatggttctatatcgccggcaatcatggcttccagacttgcggccccagtgacgatttgctgacgggtgagcgggtagaacaatgcgtgagagacgccaccgacctgatgatcggcacgacctacacgctgcaatccggaggagaccgacaacggtgtatcgacttgaatcatcaagtcgaccgagcccatatcaatgcctagctccaaactggaggtggccaccacgcagcgcaattcaccacgcttgagccgttcctcaatcattttgcgacggtctttggagaccgacccatgatgagccatggcgatgacatcatcgccctcatgcgagccgacaagcatggtggtggaaccgaccacagcatcgtaatgtgtggagaacccttcgcggccttccggagagcccggatcccgaacagtgtcgggattggtgccatgccgggtctgcgcatagagatcattgaggcgcgcggtgagcttttcggccacaccacgcgaattgacgaacaccaatgtggtgcggtgcgcgagaatctcatccaaaatactgcgttccaccacgggccagatggaaccggaggcacggtcgcccgccgctccaaccaacgcggaggaatcgaacgcatcactcgcatcagaatcgtccccagaagtggaagaaacatctctatcatccaccggcacaatgcccctgcgttcggcaagtcgctgcatggccggcgtgacaccgctgatatgcggagcggaccgttcggcctccacgccaccgacacgctgcttggcattcacggactgcaaatcacgcatgttttccaacggctcaatcatgcgcagatccattgcaggctgcccaccaggattcacgatggtaaccggttgtccgccgcccaggaatcgcgccgcctcttcaggcggattcaccgtagcggatagaccaatgcgctgcatatgaaggtcactgaggccagcatcgatggcggtatcactgccctcatcagcatccgcatcgattgcatctcgcttgcgcgattccgcgacaaggttctccagccgttccagacttaccgccagatgtgcgccgcgcttggtgcccgccactgcatgaatctcatcgacgatcaccgtatcgacagtgccgagaatccgccctgccttcgaagtgagcaacagatacaacgattctggcgtggtaacgaggatatccggtggatgggaggctatgcgccgccgctcctgtgcggtggtgtcgcctgaacgagtggcgaccgcgatcttcggcacgggcagcccttgcgcctcgcattgtgcggcaatgccctccaaaggctgttctaggttcttggccacatcggccgcgagcgcctttaacggcgagatatacagcacacgcacaccggcacgccgcgtgcgtggcacggtcatcagccggtcaatggccgagagaaacgcagccaatgttttgccggagccggtaggtgcgatgaccaagacattacgaccggaatggattgccggccatgcctgagcctgtgcctcggtcggctgaccgaaggcatgctcgaaccacaccttggtgggttcggaaaacagactcagggtttcgtacatatgtacgattataggtcagctgaagtaggcgatgacttcttcggcggtgccgtaggcgctttgggcaccaagcttggtggccgcataggcggagacataggagccgatttgcgcggattgcagcagcgtatggccagcggccaagccagccagcacagttcccatgaacgagtcgccgcaaccggtggtgtccaccgcattgacttgcgcggcggatacgcgatgccaacgtccgttctcgatcaccaccgaccccgacgcaccaagcgtcactatcgcccggtcgaatccgtaatcggtgaatcgttcggcgacctcataccagtcgagtgattccacatcgccgtccggcagacccagtaactgagccacttcatgctggttgaccagcagaatatccgtggcttccaccagttcgtgaggcagctcgtccataaatggcgagtcgttgagcagcacggtcacgccagcgtcatgcgcggtctgtgcggcggcgataacggtggagatcgggctctccaaacacagtcccaataccgcgcattcggcgatggtcgtgcgatgtgattgcacatagccggcacttgccttggcattggaacccggcgaatagacgatggtattctcgccctcagcgctcacggtgattaccgtggtgccactggggccttcaacgtgcaggatatcggcggtgtcgacgccggcctcatccagcttgcctaataggaagtccgcgttggagtcctcgcccaccgcgcccagcaactggacattgacaccgaggcgagcagcggcagacgcctgattcgcgcctttgccgcccggcaacactttcatggcaccaccattgacggtttcgcctggcttgggcagtcgtttggtggtcacggtgtaatcggcgttcatcgagccgaccacgattaccgagcccggcgcatccttcagcgcttccaatcgttcccgtacgggctcgggcatctgtttatgttcttcttcacttatcaccatgggctccaagcatagtaggcggcgggcccaaatgcgcgcatgatcagccgcgcaacttacgaagacgctcgtgcatggccaccatcagcaccaagagcaccagcaaataccacgggtagagactgattgtcacatattgcgcgatgatgccgaacagtggcggcatgagcagtgagcccacataggcacaggccatctgcacgccgacgacggcctgcgatttgtcttcgccgaagtaggccggcgtcgagtggatgacgcacggataaatcggcgcgcacccgaagccgatgaccaccagcccaacgaccacgccaaggtggtgaggcaatggcacgaacatggtgaggatgccggcgagcaccagcacttggccgaggcgaatcatgaccgggtccttgaatcgcatggtcagaaagccggaaagcgcacgccccacggtgatgcctacatagaataggctggcccagctggcggcggtgatcttgtcgatgccgctgtgcatcaccatgtagctggaggcccacagacccgccgtggattcgatggcgcagtagcagaagaacatcacgaggatttccttggcaccgcgaatggcgagcacgccggccacgccgagcggtttgcgttcagcaacagacgccccttcagcattaccacatccctcggcattgccgtcagatgatgcggcaccatcggtcgattcgccgcccccagtcgtgccacgtttcttccacagcggcaggctcagcaccaggatgacggtcagcatcacctgcaggatcgcgatgtaccgatagccccacggccagccttgcccttgagacagcgcatagcccatgatgtaggggccgaccgatgcgccgacgccccacatgcagtgcagccagctcatatgccggctttcgtagtgaatggctacgtagttattgagcgccgcatccacgccacccgcgccaaggccgtacggtatggcgatggccaacagcacccagtaattcggggcaacggagaaacctaccaaggccgccgcagtcaacgccaccgaaacggcggtgaccttgcctgccccgaatttcaatgtcattcggtccgaaagcagcgccgagacaatcgtgaacatggaaatcaccgcggagatgccgccagcccacgccaccggcacgttcagatcctggctcatggtgggccatgcggacccgagtagcgaatccggcaaccccagactgataaacgccacatagatgacggcaagcaacagactggccatgttccatctcccattcacagtacggcaccggttgtgataacgatgtcatcagtctatcgaatagcgcttcagcaacacgcataaaacatatgacaacgtgctcacctcaaacgccaattacggaaattctcggtaagcacgatgtcattatcagcgacgtcttcgatcaggtatcgatcttggagcggtcgaaatcgtcggcgttgtcgacgatgaactgcttgcgcggcggcacgtcgtcgcccatcagcaggctgaagatctcggatgcctgggcggcgtcctccatgcggatgcggcgcagcatacgcgtgcgcgggtccatggtggtgtccgccagctggtcggcatccatctcgcccagacccttgtatcgctggatgtcgtcgttgtaaccgatgtgcttcttgtcgaggtcggccagtttgccggccagctcgtcatcggaatacgtgtagatgtattcgcccttgtgcgagccggtcaacgcgatgcggtgcagcggcggtactgcggcatacacgtagccgtgttcgataagcggccgcatgtaccggtagaacagcgtcagcaacaggatacggatgtgcgcgccgtccacatcggcatcggtcatcatgatgatcttgtggtagcgcgactgttcgatgtcaaagctctggccggagccggcgcccaccacctggatgatggccgcgcattccttgttggagagcatctgcgtaatcgacgccttctgcacgttcagaatcttgcctcgaatcggcagcagcgcttggaaaccggcgttgcgggcggccttggcggtaccgagtgcggaatcaccctcgacgatgaacagttcggccacgtcgtcattgcccggctggcagtcggagagtttggccggcatcgaggcggattcgagcgcgttcttgcggcgcgtgacctccttggccttgcgcgactggatgcgtgcgtgcatttcgccgacgatcttctccagcacgcggccggattgttccttgtatccgcgtttggagccggtgatcatctcgccgaattgcttgtcggtgagccgggtgacgatcggcttgacctgcgcggtgccaagcacgtccttggtctggccttggaactgaggttcggccacgcgtgcggtgaccacggccacgagtccggcttggatgtcgtcgcgctccaccttcatggcggagtccttcatgttcaccttgagcttgcgggcgttgtcttccaccgccttgcgaatctgcttggtgatggcgttcatgaaaccgtccacgtgagtaccgccgccgggcgtctccacgatgttcacgaagctcatgattgtggtgtcgtagccgttgacccatcgcagggcgatgtccacgccgcaggtgcgttcgatttcctgggcgtgcagttcaccgccttcgcccacggcctgggtctcctccttataggtgccctcgccttggatgcgccagatgtcggagatcggctcgcctttggataggaagtcgacgaagtccttgacgccgccggtgtgcaggaattccacgacgcgcgggtgcgcgggctgctcgccgaacgcgccatcgacgacctggtcgccggccgtcagcgagaagtcctcctcggacaggctctcggtactgtcggcttgagcctcggtggagtcgtcgaagagttcggcatcgttggacgagacgtccaaagccggggcctggtcttgcgcaggttcgactgcgtcggcatcaatggcttcggcggtgtcagtcgccgtttccggtacgttttcgtcaacaatggtgattttgagtccgggcaccaggaagctggtctggcgcacgcggtcgatgagctgttcgtatgagaattcggcggttttgttgaaaatctccggatcataccagtagcgaatacgggtaccagtggttttgggagataccttgccgatgatttccagctcggtgggtcggttcttgcgagtgcgcttgaacggggaatcgggagacggattggccgggtcggcatccgtgtatacgccagggtgaccttggtggaaggtcatgtggtgcgtcttgccgtcacgatccacttcgacgtccagtcgggagctcagggcattgaccacggaggagcccacgccgtgcaggccaccgacggcgttataagacgagttgccgaacttggcaccggcatgcagtttggtcagtacgacctccacgccggacaggccggttttcggttccttatccaccggaatgcctcggccattgtccgcgacttccacggaaccgtcggtgtgcagggtgaccacgatatcgttgcagaagccggccaaggcctcatccacggagttatcgatgatctcccacaggcagtgcataagaccctgcgagtcggtggtgccgatgtacatgcccggacgcttgcgcaccgcatccaagccctcaagaacagctaggtccttggcgccgtattcttctttgggcatacagtcctatttttctcttcaaatgcttggctcccctcacagaggggagccagatgatcattgatccaggaagtcgcgcagggtctgcgaacgggacgggtggcgcagcttggacatggtcttggactcgatctgacggatgcgttcacgggtcacgccatacacacggccgatgtcgtccagcgtcttcggctggccgtcttcaaggccatagcgcatcttgatgacgccggcctcacgcggagacaaggtttccagcacctgcttgaactgttcctgcagcagggagaaggccacggcgtcggacggagcgatggcgtcggtatcctcaatgaggtcgccgaactcggaatcgccatcctcgccaagcggggtgtgcagggaaatcggttcgcggccgtacttctgcacttcctgcaccttctcaaccggcatgtccagctcgcgggccagctcgtccggcgtaggttcacgccccagatcctgcagcatctggcgctgtacacgggacagcttgttaatcacttcaaccatgtgcacaggcacgcgaatggtgcgggcctgatcagccatggcacgggtgatggcctgacgaatccaccacgtggcgtaggtggagaacttgaagcccttcttccaatcgaacttctcgacggcacgaatcagaccaaggttgccttcctggatcaaatcaaggaagagcatgccacgacccgtgtaacgcttggcgagcgagaccacaagtcgcaggttggcttccagcagatggtccttagccttcttgccgtcggcggcggcccacttgagttcacgcttgcgcttgaactccatgccttcactttcggtgtcgagcaggtgctgggcgtacaggccggcctcgatgcgctcggacaggtcaacttcctgttcggcgttcagcaggctcacacggccgatctgcttcaggtagtccttgaccgggtcggcggttgcgccggccgcgatcacacgacgcttcggattgcccgaagggatgatgttctcttcctcatcatccgtgtcggagaccacgtaggcacccttttccttgggctgctcgggtgccttggacttggcttcttcctcgtcctcgtcgtcttccacatcgtcgtcgtcggcatcgtcctcatcgaggtcttcgtcgtcggcatcgtcttcgtcaacgtcgtcaagatcctcgtcgagatcgtcaacgtccaaatcgtcgtcgttgacctcggcatcgtcatcaagcccgtcatcgacctgagtgtcctcgtctttgacgagctcatcgtccttggccttcttcgcggttttcttcgcggcggacttgcgcgtggtctttttcgagggctctgcggacttggacttcttggcagaagtcttgcgcgcggtggtcgtagagctggccttcttcttggtctcggtctcctcgctggactcggctgtctgcttggttgccgtcgtttccttcgtggccaaaactgctccttctgatctctcgccgtgaagtgcatataccacacgggcccacttctggcaagggcaaatcgtcaactatgtgagtaaaccaccctccacggacgattattcccacatcgttgcccgacgtgttgccgatcaccacacgctttccttccgcgcatcgcgcataaaacctcggaaatccgccgtttctgttcattcagcccgagcaccatgccggtgccacgcctcgatcggcggctgagaatatcatcgccgccagcgaacaatcctcatcgagcagcaggcatcgcaaggcgaacaccattgctcgcggatcgcccagccaccataaggtgtaagcgatcacggccaatggttgtatgcagtacggcaccggtgaggcttccgcgatatcgagcaacataccgatgccggcatggcaacgctccttatccggcatcatgccttcatcctcgaatgcgcaggtcagcagctcgcccattcgtgttctcgtacgtgccagatgcggtcgcgccgcgaattccatgagccatgacttggggcaacggctttcatcaataaccaacgagagaatcagcgcatcacgaatcgataaggtctcgcgcatgcccaccgcaaacgcggccatcgtctctcggcctaggtcggtgttcccggcatcgagacaagacagccattcatccaatggttcggccacccagtcggcattagcctgttgcgcgcctcgaagtcggcgatcattgcgaaattcctgtgatctcgtctccaactcatcaaagccaaagggctccgtctgctcggcggcgtgccgtttggcgtgtcggctcttacgcggcttgtgcggcgtgttgttgttcatcatgtcctccttgactaatggtgtgcaatctattggtgttgtggtgcgcgccgagccggatagctcatgcgccgagggggtgtgtgcccactatggctgaaaacgccgtatgacgcaggaaaaaacgaccattgtggttctagcttcaaaacccttgattcccaacgttcttgtgttcttcaaaccctgtggataagttattaggcatgtgcacaactgctaacaaccgcgaaatcatcgagccacgcatcattcagttggtgcgggaactgactgccgcccccgccaccgacgaggttgccgacgccctgaaaccggtgatggaacaggttgtgggccaagccgcctcctccagccaaggaggcaaacgactgcgtgcgctgctcgcattggacgccttcgatattcttgccggcgacgtgacgcctgatcggcgtgacgccatgatcgacctggcctgcgccattgaagtgtttcagacggccgcactggtgcatgacgacatcattgacgaatccgatctgcgccggggcaggccttccgcacaccgtgccttggaacaggccgtacacagcggtgccataggccgtggcttgggcctgatgcttggcgatattctggccaccgcctgcattgaaatcacacgccggtccgccagccgtcttcccaacaccgatgccttgaacgaggcgtttcttaccatgcagcgcgaggtggagatcggccagatactggacttggccgtcgagatgaccccgttgtctgatcccgaagctctggcgaacgcctcattgaacgtattccgctggaagacagccagttacaccaccatcgccccactgctgcttgcactgctggccgcaggagagagcccggatcaggccaggcattgcgcgttggccgtcggccggccgctcggactggcgttccaactggccgatgacctgttggatgtcgtcggatcaagccgcaataccgggaaaccagttggcggagacatccgagaaggcaaacgcacagtgctgttggctgatgctctgtctgcggcagatacggaggataaggccgatctgattgccatcttcgaagcggattgtcgcaacgacgaccaggtagcccgcaccattgaactgttcacgtcgaccggtgctcttgatcgatcccgcgagcgcatcgctgccctatggggtgagtcccgtaaggcgattgccggtcttgagctgaattccgaagcgcagcgccgtctgaccgaggcttgtgcgcgattcgtccccgaatccttgcgatagtccacaatgcgagccgccgggtcatgagaccatgaacaccggtgaaaacccgtgaaaactatgcgccgatgctccggccgcgtaaccggggccatgtacactgaacatgtttagtcgtgattaaaggaaccgtacgatacaacatgagtgagaacgagcccgcgcagatgattgagggacgctaccgcatcgtgcgcaatatcgccgagggtggtatggccaccgtgtatgaggccatcgatgagcgtctggggcgcaccgtggcgattaaggtcatgcacacacaactcgccaaaggcccgcatcgggagcagttcgtcgaacggttccgccgcgaggccaattcggccgcgtccatcgccaacccgcacatcgttcaggtgtatgacaccggcgagttcaatggacttgattttctggtcatggaatatgtgcatggcgtcaatctgcggcatgagatgaacgcccaaggcacattctccgtacgtgagacactgcgcgtggtcgcggagacgctggatggtctggcttccgcacatcgcgccggcgtggttcaccgtgacatcaagcccgagaacattttgatcaatgatcgcggccatgtgcagatcactgatttcggtctggccaaggccgccagccaggccacattgagctccaccggcatgctattgggcaccgccgcttatctggctcccgaaatgatcgagaacaatcaggccaccgcgcaaggcgacctgtattcggtgggcatcatggcatgggagatgctgaccggcaaggtgccgttcgattcggataatccggtgacgcttgtcttcaagcatgttcatgaggacgtgccgtccgtggccacggtctgtcagggcattgatccgtccgtggcggcgttcatcgcccatctgaccgcgcgtcaggtggatgcccgccccgccgatggcgcggcagcagctgaggaattgagccagttggccgccaaattgccgctggaggcgtggcaataccgtttgcatgccgaacccatcggaggtgatcataccgatgccaccgttgcagcgctggtaggcaatatcgccgagcaggccccgctgaccggcgtacctgccggtgcagcaacgttcaaaccgtccgtaccagcgtttttggccgatgatgtcgcaagcaataccgtcgataccggtggcgccgcagacgtcaatcctccggctcctccggtcgcccccaccacggcacttgattcgtcgacgccagccgatgcttcggctccccataagacgcaaatcatggcacagtccggcagcgagacacaagtgctgcctcaggccggcgatgccttcacccgagcgcttgccctttccgatgagccggacgtcgcttccaacggcaccgggccaaagaagcagcgcagcaaaaaaccgctcatcatcgtactggtgatcgtgctggtactggctgcaatcggcggaaccgccggctggtggtggtttaccggaccgggcagctattggagtgtgcccaagccggatgacgtgacctgcgatgcgaatgcaagcaccgaatgctcgttggccggcgcggattgggccacgtatgagagcacgttgaaggctctcggcatcccctacaagacgcacaaggaatacagcgacgacgtggcggaaggcaagatcatctcttcttccgtgaacaagaccaaggccgttgtgaacagccgcataagcaagcgagccaatcaggagcttacggtggtggtgtccaagggcgtgcggatgaccaccatcccgaaggatattctcgacgcgaattcggccaatggcaaggacccgttgaacgcgctcaagaaggccggcttcgataatgtcaagcatgacgagtcgaaggatgagtattcgatggacacgccgcagggtgcggcattgacgatctcccctgatcccggtaccacggccaagcacaacgatgaggtgacggttactttgagcaagggaccgatgccggtgaccatgcctaacatcgtcggtaagacccaggatgagatgcaagccgcgctcggcgagttgaagctcacggccaatgtcaccgaacagtacgatgacaaggtcgaggccggtcaagtcatttccgcgtctcaggaagccggagcccagctgaagtggggcgatagcgtggacgtggtgatttccaagggtccggagatggcgacgataccgtccggccttgtcggcaaacaggaaagcgccgtaaccaagacacttgaaggtctcgggttcgaggtgaaaaccgacaaggtgctcggtggcctgttcggcacggtacgtaccgtgaaaagtggcgatacggacctatccaacggcggcaagattcgcttgcgcgatgccaacggcaaccccaccgtcatcaccctcaccatcgtgtgagatttgaatgaggctccctctgtcttcagacgagggagcctcatttgttaattacttttcggcttcttcagcggcctgctgggccttgagctcggccttgaccttctgggcgtattcgttcacgaattcctgaccgctcattttctggattgcggtggaaacacgatcggtcagcgaacgcaaatcatcatgtgtaatttcatcagccggcttcttcgcaacctcaatcggcttgccatacaacaccttggtcttgcccttcttgggaatcgacgtgccaatcggctgcagcttgtccgagccgatgatggcggtcggaacaatcgggcaaccggtctcgagcgcaagtcgtgcggcaccggtgtgtcccttgtacagtcgaccgtccgggctgcgcgtgccttcaatgtggataccgaacaggtgcccatcctcgataatctcgcgtgcatgctcgagtgcgccaagcgacttgctgccaccggaacgatcaaccgggaacacgcccacggacgtgaaccaccacttcttgaacttgcccttcaatcccttgccctcgaagtattcggctttgcccatgaagtgcaccatgcgcgggcaggtaatcggaatcaaagcatcgtcaatcaccgccagatggttggctgcgataatcgcgccaccctctcgaggcacgttattcagtccgctgacagcagggctcaaacgatgatgagcaatagggccgagacctttgacgaagaaccagtagagcacttggcattcctcccgcagacgaactagccattggccggtcgcctgattagagtgacagttatgactgagaaccagaatagcaatgccgacggagagcggccaacccccacgccgggcaacggacaggattccgatacttcgtccaagtcgtcgactcccggtgccgccggaccggccacgaatggtgccgatacaccgcaatcgcatgacatgaacgatttggatgcggcgtgggccgcgttcgaagccgagcatcaggccgacttgcatgacgtggcttcctccaggcaggccaaaaagttcgagaagcaggccaagaaacgcgagaaggaagcactgctttccgtagatgacttggatatcggctcgttcaccgatgatgctcgcccgagccgtggcggcaaaaaaggcaagcagtcaggcccccgtgatttcaccggctccagctggctggataccgataatgtgatggacgcctatgatgatggcggcttcactcccccgaaccctgatcttggtccggtcaaagcatctacggtactgctgacggcgttgctcatcatcggtctcgcaggcgaaacggtgatgatattcgttcccggcttgaacgcgattcctctcttaggtgcgctgctcaatattctcttcgggctgggcgtcattttgggtctgggcggattggtggccaaaatcctcaaccgcaaagaccgccccggtgatcagggtggctattacgacgacggcgcgagggtgtagttcgcgtaggttgtgtagtccttggctcccctctctgaggccgagccgttaagcaaacagcccagtgggctgtttgtaggcgaggtgtgagcgatagcgaaccaatgtatcacaggcatggctcgtccgtaattgcggccgagccaagataggtcacgaattgaagtcgatggactcctgcaactcgaaatagttgataatgaaggaaaggtaaacatattcgagcaaacccattccatatcacgccttggacttggcggtttcgatccacttgttgaacagggcttcagccttgccggagtcgacagcatcctcggccagcttgtaggcctcggcgaagcgctcggccagtgtgccgttgccgaccagattgccgtcagccacgatggcggaggcagcgttgagcagcgcggtggtgcgggacgtaatgtccttgccggccaggaagtccttaaatgcgttggcgttgacgtccggcacgccgcccttgagctggtcgacggtaatcttggcgagacccagatccacggtcgggtcgaactcggtttcggtgaccttgccgtcgcgaatctcccagacggaaaccgggccggtgggggcgagctcatccatgccctcatgcgaagtgtagaccaagccggactgaccacggctggcgtagacggcagccatgatcgggctcaccttgcggttggcgcagccgatggccacgtgtgccgggttggcggggttggtcaacggtcccaggatgttgaagacgcacggaatgccgagcgcggcacgaatcgggcccacgaagcgcatggccgggtggaaggtgcgggcgaacgcgaaggtgatgcccacctcgtcgcccacttcgccgacggcctccggcttcaaatccagcggcaggccgaggtcttcgagcacatcggcggcaccgcacttcgaggatgcagcgcggttgccgtgcttgacgatcttcacgccggctgcagcggcggccacggagcccatggtggacaggttcacggtggcgaagccgtcaccaccggtgcccacgatgtcggtggtcccaccggaaacgttcagcggcacggcgtgggagaccatggccttggcggcaccacgcacctcgtcggcggtcagtcccagctgctgctgcatagcgagcgcggcacccacggcggccggattggcgttaccttgcatcaggtcgtccacgaaccactccgattcctcagcagtaaggtggtctcccccgaccagcttggtgagaatcgacttccatgtgatctcggccatgatgccctccttggcgtttcctacgccgtgtgatgtatgttcgccgctcattgtaatggttcgtcatttcaaggccctgaatcttccatattgcaaaatatggcgctattgctgttttcgtggatgtcggttcgtcgtcgagccgttggtttcgtaagcgtgaggggcgttcccgcgtattctgttttccgaccaaagaaatgaatcacgaagaacgcctgggcaaaagcccattcaccggattgccgaacgtcaaaggcac

SEQ ID NO: 3986 - DNA, 3884 bp, Unknown
  R22_24m  MAG No. k141_40807
gagccgggcccagcggcggggccgggttggccttgccagcctggatctggagcttgatcagcgccgagactttctttttgggagccatattatggttcttctttctataacgcggttcgaatggtcgccgtcctcaggttcggctgtctgctatcacgctcggtcttgactcgttatttatccgtgcatgctgtaggcaatcggcctgtggtcggtctcctcccgcaacttatattgctgtgctgtgctagcgggtcttccctccagacacaagctttcctattatgcaaatccacccggacaacacaaaaagcccgaccactatggtcgggctctgcaaagtttggggttaatccagcttctgaacctggtggaagccaagctccaccggcgtatcacggccgaagatggacacgagcacggtgagcttctgagtggtgggctccacgtcggaaacaacggcggccatggtggcgaaaggcccatcggtgacggtgacctgatcgccaacggcgtaggagacttcaaccttgcgcttcttggcggcggcaggcttgtcgccggcggccttgagtgcctcggaagcgatcatcggagccatcatcgccacgacttccttgcgggagagcggtgccggatccttggtcgggccaacgaagccggtcacgccttcggtttcgcgaacgatacggcgggcgttctcatccggccacatacgaatcagcacgtagcctggaacacgcacgcgggtgatgaccttcttgcccttttcggtgtgcttctcgacttcttccatcggcacctcgacctggaagatctggtcttccatgccgaaggaggcgacgcgggactcgatattggtcttcacgcgcttctcgtagccggagtaggtgtgcagcacataccacttgccatcaagggaacgcagggacttggagaattcgtcaacggcctgctgaccggcatcggtttcctcggcctgctcggattcgttgacttcttcctcgtcctcatccagagaaacggtctcggtctgagtggaagcaacgggagcggattcagtcgcggccggagcggcggactcaacatctgcattgtcgacggatgcgtcagattctgcggaaaggtcagcaaccggttcagccggggcagctgcctcatcggcagcaacttcggaagcctcgacaacaggctcctcagccggcacggcgtcgagattctcgagattcagttcatcactcatgcgttgttattcaccttaggttgtgcggatcagccgaacacccacagcacgagcttgcccagaccgaagtccatgcccgtgacgagggccatcagcagcagcacgaagataaacacagccagagaccagaagaacagttccttggcagtaggggttacgaccttgcgaagctcgtcgatgatctgcttgataaacagaccgatacgcatgaagacattcggcttgactaccttttcgctgttgttcgtcttagccattctgtacctcgcgtcagctgcttgattattgaaaacttggcagggaaggcgggactcgaacccacaacctacggttttggagaccgttgcgctaccaattgcgccacttccctaggtgaagatccacctcggcgtgcattccgtagagaacgcttcgccacggcgaaaccgccaagttgttatagtaacggctccggtggattatcgcaaatcgcgtgtcgcgcgcgtggcatgtgcgcggcacacgactcttctcagttagctcagttagcccattccttgaatcgacgcatgccttcggctaggtcttcgtcggccagtgcgtaggagaaacgcaggtaaccgggagcaccgaaggcctcaccagggacggcggccacgtgggcctcatccaacagtgcggcggcaaaatcagcggacgtatcggacacagtgccgttgggccccagcggcttgccaagcaaagcggtgatgtccgcaaaagcgtagaacgcaccggtcggagtcgggcagttaacgccctcaatatcgttcagagcagccacgatcgcgcggcgacgtgcatcgaacgccttgcgcatctcatgcacctcgtccagcgggccagccacggcggccagagccgcacgctgggagatgttggccacattggaggtcatatgcccctgcagcttggtggcggccttggccacctcaagcggcgcgaccatccagcccacgcgccagccaggcatcgcataggtcttggccacgccgttcagcaccagcagctgcccgcggcattccggcacggcggcaccaatgtaggtggtgcgcgcgtcgtcgtagttcaggtgctcgtagatctcgtcggagataacccagatgtggtgctcgacggcccaacgaccgatcgcttccacggtttccggcttccagacggctccggtcgggttgttcggggagttgacgatgattgccttcgtacgctcggtacgggccgcttccagcgcctcaagcgagggctcgaagttcacgtcggcaccggcgaatacttcgaccggcacgccacccgccaatttgacggcttcaggatagctggtccagtacggagcggggatgatgacctcatcgccatcgttgagcaagatctggaaggattcatacacggcctgcttgccaccgttggtcaccacaacctggtcggcggacacctcgtagccggaatcgcgcagcaccttagccgcaatcgcttcgcgcagctcgggcaggcccggcgtaggcgtgtacttgtaattctttgggtcaaggcaggcatctgccgcagccttgaccacgtttgcgggggtcgggaaattcggttcacctgcgccgaagccgataacgtcaagtccggcggccttcatggccttggccttggaatcgacggcgagcgtagcgctcggtgccacagtgttgatacggtcggaaagagtctgccattgcgccatagtcatggctcccatgctaaacctacagcacgaaaaatcgccagagccgcactatggtgatgaaacctgtcgtgtgacagattccatcagtcacacgagcacgagattgtcgcgatgaaccagtgggtgggcgtactgggggccgaggaaacgcttgagttgggcggtgttacgcccgagcatctgcggaatttcttcggaatcgaagccggcgaggcctcgggccaggtgttcgccgctttcggcatcgatccagaccggatcgccggcggaaaaatcgccatgcacttcgagcgcgccagtagccagcagcgaggcacgcccgccgcgaatcgcctggccggcacccacatcgaccacaatcgtgccgcgcgggtcggcggcaaaaccaatccacagacggcgtgatgagccgcgggccttaaccggtgcgaacacggtgcccaccggatcgcccatcatcgccgggcccgcgttcgaggcgcaggtgagtaccgtggggatgcccgagacggccgccacgcgcgcggcctcgagtttggtgaccatgccgccggtgccgaccttggagccggagccggagacttggatgtcgccaagtgcatcgataacgttcggcacatattccacacggcgggagccgggctgcgagggcggtgcagtgtacagcgcgtccacgtcggtcagtagcaccaaggcttcggcccgcaccagattggctaccaaggcggagagtcgatcgttatcgccgaaacgaatctcgttcgaggccaacgaatcgttttcgttgataatggggaccacaccaaggtccagcaatcggtccagcgtgcgttccacattgcggtactgggtggcacgaatcgtatcttcggcagtgatcagaatctggccgacgcgaataccgaaacggcc

SEQ ID NO: 3987 - DNA, 23047 bp, Unknown
  R22_24m  MAG No. k141_41672
agaactcgatgaacatggcgacttcaccgtctatatcgaagccgccgccaacccattcgtcgaaggccccaccccgttctcacccaccgaactcggcgaagaggccaccggcacctgtgacttcccatacacactgagtcgtatggacgtcaccatcttcaacgaagacgtgttcgcctactacatggatctggaaaccgtctcctcgctgattcgtgagctcaaggacgacgacccacgctactggcagctcgccaaagcactgcaacgctccctgaacatctacgatgaacgcgacttggaaaccgtgtcggcagcccgtgcggcgctcgccggcgtactcgccgaaccggccgcctccagcgcaatcaaacacatcgccatcggccacgcgcatatcgactccgcatggctgtggccggtgcgcgagacccgccgcaaggtggcccgtaccgtatccaacgtgctggctttgatggacgaagacccggacttcacgtatgcgatgagttccgcccaacagtacgcatggctggaagaggagcatcccgacctgttcgcacgaatgaagcggcgcatcgaagagggccgcttcatcccggtcggcggcatgtgggtggaatccgacaacatgattccttccggcgaatcattggtgcggcagatcacgttcggccgccgatatttcaaggagcatctcggcgtcgcgccgcgcggcgtctggctaccggacagtttcggctacaccggctcttggccgcagatcgcccgccgtgcaggattcgactggttccttacgcagaagatctcgtggaacgacaccaccaagttcccgcaccactcgttcatgtgggagggcatcgatggcacgcgtattctcacgcacttcccgccctcggatacctactgctcgtggatgagcatgcacgagctgatgtattcgcagcgcaacttcctggacaaggacctctcccgtaacgcgattctgctgtacggcttcggcgatggcggtggcggccccacccgtgagatgaccgcgcgcatccgccgcgaccatgatctcgccggcgcgccgaagatcgaattcggtactcccgaccaactgttcgaccgtgtgcgtaaggatatcgtcgacgatgcgcaaggggagaccccggtgttcaagggcgaactgtaccttgaactgcaccgcgctaccctcaccgcccagcaggacatgaagcgcggctgccgccaggaggagtcgatgctgcgcgtcaccgaatacctgtgcgccgcggcccgcatcaagaacccggactatgtctatccgcgcgaagagctggaccgtatttggaagacgctgctcctgaaccagttccacgacattctgcccggttcggccatcgcatgggtacaccgtcaggcgcggaccgaatacgcgcgtgacatcgctcggctgaacgagatcgcccttgaagccgggcgcgcgatcgcagccgtggaacccgatgacgcaaccataaccgacgccgtaatcgccccatattcccgccaagcctgtgagacgtgggtggtacgcccggcttcgagccgagccgaagcgggaaccgcatccatggctcgggtcgccgttacccatgacggcgatacgattgtgctcgacaacggccaactgcacgtgcgcattgaagccgacggcaccgtttcgtcaatcgtcgatcagcgaaccaatcgtgaactggtgcccgccggcacccgactgggccgctacgaaatgctcaaagacgaacccttccactgggacgcctgggatattcaacgcgatgcgttcctcaccgccaacgcgctcagcgaggcatcgattgcaagcgtggacgaaaccgccaacggtggggccgtcgtgcatgctgtcactcgcgcgaagggcgttgaaattcgtacgggcattgccttaaggccgggctccgccacactggacttcaccgccgatgtggactggcatgccgtcgaacagttcctcaaagtggatatgccggtcaccgtgcaagcggtgaacgcgcaatacgaatgccaatacggtctggtcgaacgccccatcaacaagaacacgcgcagcgatgatgccaaattcgaaagctgcacgcaccgcttcgtgcggatcgccgacgccgactatgccgccgctgtggtcaacgcctccacctacggctccgacgtcagccccatccacgccgatgcggcacatggcaccggccgcggcaccatggtgcggctctcgctgctgtccgcaccgctgtaccccgacccacgcaccgaccaaggcgcacactccttcgcgtggtctctggtcgctgacgccgatatgaatgcggtgctggacgaagcggcgcgacttaacagccccgtaataggggagttgcctgatatggcgccgctggtctcgctcgccgacgccaccggcgtcatcgtattggactggatcaagctcgccgatgacggttccagcgatctgatcgtgcgcctgtacgaggccgccggcggcaatgccacggccacactgcgccttgacgccgctctctccgatgccaaggccagcgtgcaggaggtgaatctcatggaggagccggagctggatgccgaactgccgcgcgcgctcgccggtgacgaaccaatgcctgccgacggtgcggtcgtttcgttggcgccattccagctcgccacgctgcgtattcgccgataagggatattgggcctaggctcgatattttgggtcgcgcccaaccgtaacggaaccggaacagaccggctctgccatacggttgggcgcggcccattattgtatgagaagagggagagcgatcccgttgggcaaatatcaatgcgacacgcgacgatgaattcgttgcgtgcatgtttcgattgtgttatgtttttactaaaccgatttagttaacaggttcgcgactggccggaagctaaaacggtttagtctcagcgatgagaactgaataaaggttgtgataccacgtcaatcaccgcgacgggtgactgtgctggagcacaacgattaggtttctccgtccacagcagggcgggatgaaaaaggaatcaaaaggaaaggaaaacatcatgttttctatgaagaagatcctcgccatcgccggtgccggtgcgatgctcgtatcggtggctgcctgtggtagcggaactgcgggggatgacggcggcaagaaggagatctccttccagacctggaacctcaagaacgacaagtacaccccgtatttcgaggcgctgatcaaggcctatgagaaggaccacccggacgtcaccgtcaagtggcttgacgccccgtccgatggttacgaagacaagctgtccagccaggctgcggccggcgaactgccggacatcgtcgacggcggcaactccatcctgtacggtcttgccaaggccggcgcgctgctcgatgtctccaagcaggctccggatgcggaaaaggactactacgaaggcgcatggaagtccgtgaccatgcagggcaatggcatcgagaagggtgcctacggcctgccgtggtatgtcaacgatggcccgacctactggaacaccgagctgatgcagaagtgcggccttgatccgaacaagattccgaccacatgggatgagtacttcgccgccggcgacaccatcgtgcagaactgcaaggatgtctacctgggcaccacgatgggttacaacaccgaagatctgatgaccgcaggcgtcaagtccttcatgaacgatgaccacagcaagtacaccttcaatgatgaggccggtgtcaagcagatcagccgcttcgttgagctgtacaagaagggcggcatcccgccggaggccctcgactcctcctggagccaggccgccgatctcttccagcgtggcaacctggtctccatggccggctccgcctactccgctgacggcttcaagcagaacgctccggacctttacaagaacctcgcagtcggcccgcgtatcagcaacgacggcaagtccgcttccgtggcctacgagatgctcggcatcagcgccaactcgaagcaccccgacgttgccattgacttcgcccgattcgtgaccaacgagaagaaccagatcgagttcgacaagaaggcctccgtgttcccgtccgccaaggggggtctggatgacgactactacaagagcatcgacgaaagcacccttgagggcaaggctctgaagatcacgctcgaccaggtcaaggacggctacggctctcgtccgtccgagttcaccgacaacaacggctccaagaacttccagcagcagatcgccctcgctatgcagggcaagcagaccgccaaggaagcccttgacaagtccgtcgagttcgcaaacgagaagctcgcacagtgagcaacgcggcactcgccgctgacaggtcggaggcccgcacggcctccgaccggcctgaaccgatgaacctcaaccacggcaagaagcagaatcgtagcttcggcaccatcattgccccctacctgtttgttctgccagcgttcgcgattgtgtttgtattcatcgtccttgcggcactcaacactttcaggcttgctttcaccaactccacactgctccgtccgggaaccttcgtcggactcgaaaacttcatcaaactgttccatgacgagtacttcctcacggcactgctgaactccacactctacgtgatctgcgtagtgccgttcatggtgatcctcccgttgatcctggcctatctggtcaagggcaactcccgcatcatgggcttcttccgcaccgccttctacatgccggtggttatgtccgccgttgtggtgggtatgatctggaccaacctgctggattccgccggtctggtcaactccgtgctcaaggcattgaagatcatctccaagccggttccattcctcaccgatcgatggggcgtgctcttcagctcgatgttcgtgacaatctggctgggcctcggctactacatggtcatctacctgaccgccctcgccaacatcgatgaatccctttacgaagccgcctccctcgacggcgctggccctgtccgccagttcatctacgtgacaatgcccggcgtgcgctccacgatgatgctcatcatgatgctgtccaccatcgccgcattccgagtcttcaacgaaatctacgtgttgaccaacggctccgcaggccccggcggcatggatatgacgatgtcgatgcttatcaagcgcgaaggcaccggtatccaggcccgcactggttacgcgagcgccatctccatcgtcgtgctcgtcatcgtcggcgtcatgctcatcgtgcagcagatcgtacaaaaacgaggtgaggactgatgaataccaacacgcataaggtcaccgtcggcaaagtcgtccagtatctgattctgattctgatgttcctgctgctcgtcggcccgttcgtctgggaactgtccctgtcgttcaagggcaagggcgacaacgtctacgccgtgcctccctacctgatgccgaagaccccgacgctggacaactacatttccgtgttcaagcaggtcccggtattccactacatgctcaacacgctggtggtctgcctgatctccatcttcggcaacgtggtcttctccacgatggccggctatgcactgggacgcctgaagtggcgtggccgcggactggtgttcaccatgttcatgggcaccatggtcatcccgatcgaaggcgtgatgatctcccagttcctgatcattcgctccatccacctgcagaacacactgctggcagtcgcactgcctggcctgtgcggcgccatcaacatcctgctcatgaccaacgccttcaaatccattccaatggaactcgaagaggcggccatggtggacggtgccaacctatggcagcggttcttccatatctgtgtaccgcaggtcaaaggcacgatgaccgttgtcggcatcttcgcattcgtcggtgcctggaacgacttcctgtggccgttgatcgcgatctccgatgaaagcaagtacaccttgaccctcggcatgaaccgactcaagggcatgttcatccaagatccgcgactgatcgccgccggtgcgctcgtctcgcttatcccgatcatcgtcttcttctgctgcttccagcgctacttcttccgtggcttggaacagggtggactcaagggctgagcggactggaaaaaggaggtactccaatgaaattcggagtcaactacacgccgtcgcatggctggttccacgcatggctcgacccggactgggacggcatcgacaatgatctcaagcagatcggcgaactgggtatggaccatgtgcgcatcttcccgatctggccgtatctgcaacctaatcgcacctggatcaacaagaagggcgtggcggatgtgcgccgcatggtgcacatcgccggcgagcacggtttggatgcctatgtggacgtgttccaagggcatctgtccagcttcgacttcctgccttcatggctggttacctggcatgcgggcaacatgttcaccgatgcggacgccgttgcggccgagcgtgaactggtcaagaccatgaccgatgagctgtccaaggaacccgcgttcaagggtctgaccttgggcaacgaggtcaatcagctgtctgacaggccgcatcccacgaagatgagcgccacggaccggcagatcgacgcatggctggacgcgctgcttccgaccgccgccggtgaagggcacaacgcgctgtacagcgtcaacgatggcacctggttcatcgatgggcacccgttcactccggtgcagtccgccaccaagggtgatatgacagtgattcactcctgggtgttcaacggcatcgcgcaaggatacggcgccaccagtgaggagtgctcgtcgtacgcactgtacctggccgagctggccaaggcgttcggcaaggattccgagcgcccggtgtggctccaggaagtcggtgcgccggagaatgtgctggaaaccgactacacgccggaattctgccgcaagaccgttgaacgtgccatggattgccggaacctgtggggtgtgacgtggtggtgctcgcacgatgtgcccgccagcatggaagacttcccgttcttcgagcactctctgggcttgttcgacgagcaaggccagctgaagccgatcggccgtacgttcggggaactcgccgcacagtaccgttccgcattgccggctcagccgaagaccgtcgccgtggtgattgatgtggatgaggccggaaacccggtgaaccgcagtgcgctcggcccgggaggctcggtgtgcgacctgtggatgaagctgcaggtggcgggccagcgcccgaccatcatcacctcgcaggtggcggccaatcaagaggcgctcgcgcagcgtggcattctggaattgcacgctgacgaacacccctatgccgcccgttactacactgcggtttcggacccatcgttcgaaacggctgattaaaccgatatccggttgtggaatcatctactccttgttccacaaccggatattttcaattgcagtgcgcacaattgcagtgcgcagggcaaaacataagatccggtactcgccgaagagcgagaagaacgagaagacaatatacgagaagggggagcgctcaatgagcatcaactgcgccgcagtggaccgactcattgattcgatgagcttcacgcagaaagttggccagttgaaccagcgtctgctcggttggaagtccgtggaacgcaatgctgcgggacggctggtggcctcggacgagctcaagcaggagattgaccgatggggtggactcggcaccctgtacggtctattgcgagccgacccatggtctggtcaacattggggtaacggcatacgccctgaggagcggactgaggcgattgccgtggtgcagcaaactgtgctggaacgtggcgcgcacggcatcggcgtattactcagcgaagaggcgcctcacgggcatcaggcgctgggcggcacggtgctgcccaccaatctgggtttgggcgctacgtttgacccgcagggggtgcaggaagcggaagccgcggttgccgcagaactggccgccagcggcattcatatcgcattggtatccggtttggacatcgcccgtgacccacgctggggccgttgcgaggaatgcttcggcgaggatccgctgatggctgcccgcatgtgcgaggccatcgttaccggcatgcagggtgagcatcgcagcaaggtcggccacgggggagtggccgtggtgctcaagcatctggcggcgcaaggcgaggccgtgggcggccgcaacggacagtccgccgtactgggcccgcacgatcttcatgaaattcatctgccgccggtggccgccggtgtgcgcgccggtgccttgggctttatggcagcctacaacgatatcgattctgtaccttgctgcgccaacccgtggctgctcaaggattatctgcgcgaccagctcggtttcgacggcatcgtgatggccgatggcctggccgtggatcggctcgaagacatggccggctccattcccgcggcagggcgtgccgcactgctcgccggcgtggacgtctccctgtgggatgaaggattcacccgcctcgaagaatatgcggatgacgaacaggtagtggccgctgtcgacacggccttgcgccgggtgctggaactcaaagccatgttcggtctcttgcccgaagacggtgccgataccgccgcaattgccatgccgagcgccgacgccatcgcgcaggccactgcggatgggcgtgagcaggccaagcgcatggcccgcgaggcgataacgctgatcaatgatggccagtctgccgccacgctcgacgatatccgcagcgtcatagctgatgctcaagccggccctgtgattgtcgccggcccgttcgccgacgatttcggctgcttcctgggcgattacaccgcccctctgcccgccgatgaacagtcaagcgtctaccggcaattggtggcacgtctcggggaggaccgggttctcttggccgccaagccgagcgatgcgccggccgatcaatgggcgcgtgcgtcgaccgtggtattcgtatgcggcagcaccagcgaacgcagctatgacagtgaattcgacgacaatggcgcggcgaaggccgtaaccgaatacggtgccacctgcggcgaaggcgtggacttgtctgacatccgtctgccttggcaccaggatgacatgctaggcgaagtcgcggcattgaccaccgctccaattgtttcggtggcggtgtgcggcagggcgcatgtgctgactcatgtaatgggtcaatccgctgtgacgatttgggccggatatgctggccagtatggtccgcaggccgtggctgatgtgctgattgacggtgccggtttgccgggctgccttcctgtaacgctgcctgcgcatcccgcagccattccggttcgatacaacgaccggcaaagtgccgcccatgtatacaaggatgcggcggaaccggtattgcgcgagtttggctacggagccggttctttggctggagtgacgtttagtgggatgcatgccgatgccgaatcccgcacgaatgaggtgttggtgcaggtgacagcatatgccggcgaccataagacggccggttcggtgaacctcttcgcacacgtcagtggcggtcgtcgtatcccacgtttggcagtgctggtcgattccgttgctctgacgcttgaggcgggcgaaagccacgcggtatcgttctcggtaccctttgaacggctgatggacgaagctgatgacaatgtgcgtgtgacgtttgccctgacagccgctttgaatagcgatgatacccgacatacagacgactgcgataccagcgtaagcatcgtgatacatcgctgacgatgtgcatgagacaagtcggagaggggtatgttccgtaagtctcatgacctactcattgcggccgatatggtcggcgggtgagagaaaaagagaatgtgggatatggcgttggtgagatatcgccgtatcccgtggctcaaaccgtcctaccggtttgagccaccgtctacgcaagccgcatagacggttgatttccggcgtgagtcggaggaaatcaaaggagattatagatgagattgtcatcaggcgatcccgctgggcgtgcttctgcttggactcaacacaggaaatggctgcggactggcttggccgcggtgctgtcgatggccacgctggcggcactggctgcaccggcaagcgctaccgacaccatgccgtggggaggccagtatgccgataccagtcatccggagcaggctgcgggagccaaccagccgtatcagcatggttacaccggtctagatattctgaactggaatccggcagtggataaggattcggagtacctgcgttcccgcgtgccgttgcagacccgcatcgccgccaacgccgcgacgcagaaggacccgaaccttccggccgatacggagatgttcaaccttgccggcgactatggcaacgcgttctttgagtcgttccatgacaacaatgtgttctcgcagtacctgttcaactactggcagtacacggattattacggcacctggcatggccagccgaccgcgaacgtgccgaagagcctctacgatgagaaggcccagtctgattggactcagaaatggtttgaattcggtacgctgaacttgccaaatgcagcgtacacgaacgccgcgcataagaatggcgcgaagtcgattgcgacgattttctactcgggcaacgaccgtggtgaacagacctataaggatttgcttcaaggcaagcgtgccgatggcacctatccggtggccgacaagttggtggaaattgccaagtactacggctttgatggttacttcgtcaatcaggaatccaatgtaaactccgatgatgttccagcctatcgggatttcatgaagcagatcgtcaatcagggcatttacatccagtggtatgactctgcaacatacccgggtggtaatatcggctaccagaacagatttaacgagaaaaactcaccgtgggtgcaagatggggccgagggcaaaatctccgattcgatcttcctgaactattggttcagcggaaacatgctgaaagattcggccgaccacgctaagagccttggcattgatccgaagtatgcggtgttcgcaggcatcgaggccggacagcagaaattcggcagtatcggtagcaacgcggattatatgaacgtcaaccttgatgctgacggtaaaccgtatgtgagccttgccgcgctcggcaccgacttcgtctcccatgagctgggtgacgacaagaaggtctatccgaagtatcaaaaccaggtgttcgaccgtgaacgtcgcttgtggactggttcatccaccggagagaagggcacgacggatatctctgatccgtatatcgatgatggtacgagcagcgacggctggaagggcttcgcctcacagatcgccgaacgctccgtcatcggtggcccggtcttctccacggcattcaacaccggtcacggtcttgaatggcgggacaatggcgaacagaccagcaaccagcagtggggcaacatcaacctgcaagacattctgccgacttggcagtggtggattgatgccgattccgacccgctgcaagccgacttcgactatggcaaggactatgagacggcaccgcgcttcaactacaccaaggtcggcggctacgaaggcggcgattcgctggtgctgagcggcaagctctccagcgacaacaccgtccgtctctacaagaccgacttgagcgtcactgccggctccaagatcgaattgacctacaacaagctcaacagtgacgattccaagctgcaactcggcctcatcttcgccgacgacaccaataccgtagtgccggtggacgtggcggatggcgcggcgagcaacggctggaagaccgcaaccgtagacctctcccagtacgcgggcaagaaaatcgctacgctgggcctgatcgtcaaggccggagcgaacccgatcgacaactaccaggtgaacatcggcaagattaccgtcaccgacggtgctgcctacacgccggccgccccgaccggcttcaaggtcgagcgcgcctacgcggattccgacgaattgaccgtcaagtgggatctcgccgactacgccaccaccaagaactacctgctgtacttggacaacaccttcctcggtggccgctacgacgacaccctgtacgtcaagcacctgcctgccaagaccggcacgctgaagttgtacgccgtgggcgcggacggttcgcgctcgatggctgccgaagcgccgctgaacgaagcggcggccgtgtccagcgtgaaggttgagcccggcaaggacggtaacgtcaaggtctcctggaccaacccgcaggtctccggcgagaaaaccgtaaccgttaagtccgacaccggttcgtggcgttacgccggtcagccatactcccagaccgtcaaggtcgctgccgacaagagcgacgtgacgattccgaatgcgccggttgacggttcccgttatgtggtgactgtcgacaacgcaggtggcgctaccaccacggcagcaggtgcattcgccgatgccaccatcgagccatacccggcttgctcagtgacgtggaatggcgacaatgtgtcgctgattcgtcccgagactcaggattggcgttacctctacatgaccgagaagtggaccgacgagaacggtaaaaagcaggagaagcagctgggtgccaagtacacctattcgcagaacactccgccgattaccggcattattcgtggccgcaccactccggagtcgtacaccaagtccattcccgacggccatgaactgtgggtgcaggtcgaggactacagcggcaacaagaccgatccggtcaagattccgaccgccgacgaactggccaagtgcacggtcgccgaccccacccagccggatgccaagaagtccacgctgaccgcggtcgacggttcggccgtggccgacggcaaggccatccgcacggtgcaggcaacggtcaaggattcgttcggcaatccgctggccaatgccgaggtggcgtttgaactgcccgaaggcgtctcggccattggcggaaacaccaccgtcaagaccgatgccgccggcgtggcttcgctgaacgtcgtgtccacgaaggtcggcaagtacacggtgaaggccgtgctgaacggcaatgccatcggcaagggcgtcaccgtcgaattcaccaaggtcgcggtgacgccgaacaagcccggcgaccagaacaagcctggcgataccaagccgaacaagcccagccagaacgacaacaagaacaatgacaagaatggcgcttcgttgagtgccacgggttcgtcggtcattgcgattgtggcggccatggtggtgctgcttggcgcgggtgcggtggtacttcgcgctcgtggcaagacggagtagttcgtcgcaatacgggtgttgatactcgtgccataagcgggatttaggggttgcccaatgggtgcccccctaaatcccgtttgttttgtcgcaagacatatgccgagaccagtgactaaaatgctttagttatttgactaaaattattgatatcataagagttagcgcacggttgatgcatatggcccaatgcgggggtgccgtcaaccgtatcgcaatagtcgcaatgcggtcgtaaaaaggagtgttcatgagatctgctcgcgaggcatcgtcatcgtctgacggcacgcagcgtgtgagcctgaaagacatcgcagatgaattaggcatctcgcagaccgcggtatccttcgccatcaatgatcggcccggcgtttccgcggaaaccaaacgtcgggtcaaagaggctgcagccaggctcggctggacgccggtctacgccgcacaagcactgggatcctcgaagaccatgaccataggctttgcccccgcacgatccacgcaggggctcacggatgaaagcttcatgctgcacttcatggcgggtgtgcacgcctcgctcagccccaaaggctatggtttgctgtaccgcccatgccgattcctgaacgaggagatgagcgtatacaaggattgggcgtcgcgcaagcgcgtggatggcgttatcctcgtcgatttgcgagccgatgatccacgcccggaattgttgaagaatctgggtgtgcgcgcagtgcttgccggaggacccgacccgaacaattatgtgccgtcactgtccatcgatgattcacgcacgatgggaaccgtgctcgaacatttgtcgtcattgggacaccgccgaatcgcctatctttccggcgatccgaacctggattattcacaggggcgtgtcgcggcgttccgcgcatttgccaaacggcgaaagctggaatccatcaacatcgaattcaccgattttgttgcggaacaggccgcgatgctcacgttggagatgctgcattcaccgaagccgcctaccgcgttcatctatgaaacggagatcctcgccgcggccagtcttcacgccatggccgaagattattccgctcggcagatggaggcgggggagggccatgcggaagtctatccgaatgggctgcccgccattgtcagttttgaagacagtttcatttgtgaggcggcgtatccgtcaattaccgccgcgcatcgtgatgccagcgaatacggtgccaaagtggccaaactgctgctcaaagtgcttgccggagagcaggtgagcggcaaccggcgaatcctcaccccgaaactggtgattcgggacagcaccgccaagcccatggataccatggcgtagaacggtcattgcatcggcttgcagacaatgacatgcgaccagtacgacgttggccccccgtattccacgggggccaacgccgttgagaaagaggaagaaaaaaggatatagaggcttagatgctgtcgattattcagcgttcttcacggccgtcgcaatggacacggccgggtccaagaacggaatcagcgtggactggaaggcgtggtacaggtcggacttgcccggccagaccgtgccgatcacgtggttgttcttgtcaagctgatggaaccaggaaccgccctcgtggtcgatgacatgctcatcgacatactgggcgaatgtggcgtaccagttggcgtacatctcctcgccggtggccgcatacagcgtggcggaagtgttcaacgattcggccagcgtccaatgcatgcgatcggtgaccacgggcttgccgttccagtcggtcgtgtaggcgagtcccacggtgccgtcggcgttccatgcgtcggccacggcacgcgcgaacagatgctcggcggcgtcgacgtacggctgtgcgccgtcaaggttggcgaaggagcttaacgcccactgcgtgatcaagcgggcccattcgatgccgtgacccggcgtggcgccgtacggcttgaactgatcatccttcttgtcgacgttgcattcgaggtccagcgaccaatcggacttgaaatgttcggggatgcgccactcgttgtgcttcgcccagccgatcacatgatcgatgatgcggccggcgcggacgcgataggtgttgttcccggtggcgtcggccacggccaagaatgcctcggtggtgtgcatgttggcgttgagaccacggtacgggtcgagctcggtgaattcggtattccaggtatcgacggccaaaccgatttcgtcatcccagaaatgcttgtcatacgtggcaagcgcctcgtcaagcagttccttggcacccggacgtccggccagcagggcggaggacgcggcgagtatcacgaaggcatgcgcatagcagaccttgcccggcgcatgggtgccgtccgcgaacacctgcggataccagccgccgtgctcgttgtcatgcagaatgccggtcaatcccttgagcgccgcatcggccagctccccggcgcccggatatccgagcatgtcgccaatcgaatacacatgggccatacggctggtgatccacgtttcgacgccgtgggatgggtcaagggtgccgtcggcgttcagccagccggaaccgccgttcggcgctgggaagcccttgccgaacttcagcagctcataggtttcggaagccatgaaaatgcggttggcttcggtgccgagcgtataccgtgggttattggtcataatgattgttcctttccttaacgagaacatgcggtgggtgcgcaatgagcattcagcgggcacgtcttagtgcttcacacgaatgtcgaaatagtccatgaccagttcacaaaacatcatattcgaccagctgaaccattcgcgcgtgtacttggtcggatcatccacgtcgatgccttcgtgcatgagatgtgtaccggcgtcggtggttacaagacggtcgaggatatgcgccttgaagtccttgctgtcgctggtcatcgcctcgatagacagggcgatgggccacacatagcgcggcggggtgtgcggtgagccgatgcccttgagatactcgccctcgtaatagtacgggttttcgtcgctgagcagcgtgcgtcgggtcgccagatacgtcggatcgtccggtgcgcagtaccccaagtaaggggccgccatcaaggagggcacattgctgtcgtccatgatattgacgtgacccaggccgtcggtctcgaacgcgtaaatcgtctcgccattgcggttcgtcgttttggcgtgggcttcgatgccctcggtgatggtgcggcgcagctcgccggcacgggcggcgatatcggcgtcatccagaatctcaccgccgaagatgcgttccagatagcccatcaccacggcggcgaacatgttcgagggcaccagatagtggtaggtgcaggcgtcgtcgctggggcggaagccggaccaggtcatgccggtgtacgccaccggcgaccccttgccgtcattgctcagcgattcggtggggatgtccgtgtcgcggatgaagaaatacggggagcgttcatgatgctgctcggtctcgaagacgtcaagaatcttcttgacgccggcaatgaattcggcatcgaagtgatcggcgttgccggtgttcgcatacagcatccaagccagttggatggggtagcacagcgaatccacctcgtacttgcgctcccaaagccaagggctggagaaatcggaccggtcgtccttgtcccaggaggcgccgttcggttcctcgttgaaggcattcgcatacgggtcgatgatgatgtagcggaactgttgccgtatcagaccggcgatcaggttcgcaatatcgctgtcttcggcggcaagggccagatacgggcgcaattgcgcggtcgaatcacgcagccacatggccgggatatcgccggtaagcaggaatgtggtgccgtcgtcatgccgtttgaccgtggtggtcagggtgtcggcaaagcaggcattgaagttctcggcccaggcggcgtgttcggtgccgcacaggtccgtgatgtgctgcatgaaatccgagaccgacttcggtatcgcggtggtcgtcataaattcaacttctttgtttgagggatatgcatatcaagggaacagcattattctaaaccgctttagttcatgacacgcgaaaggatgtgaagagcatgagtgtgagcgcaccatatgaaaaaccggtgagatttcctgttcggagaatctcaccggttgcgatcagtcgattcgtgaagtcgcacgaatggcggataaggggatgggtggattacttgccgatttcagccagatagtcgggcatctcggccgggtactcgggccaggcaccggcctgggtgcagacgtaggcggcggtgttgacggccttgcggtgggcttctgccagcgtgtcgcccagcaggatgcgggcggtgaaggtgccggagaaggagtcacccgcacccacggtgtcgttcacctcgacgtgcggagtgtccagcgtggagacctcgcccttgcgggagatgatggtggagtaggcggagccggcggtcagaatcacgtagtcaaggccgaattcctcgatgaaccagcgggaggcgtcttcgccggaggtgccgcggatgtcgaacatgtcgcgcagcagcaggagttcctcgtcgttgatcttgaagacggtggccgccttgaggagttcctcgatgaggtccttggagtagtggtcgccacgcaggttgatgtcgaagaacttcatcgcgcccggcttggtgtgcttgagcagctccgtgatggtggcgtgcgattcgggggagcgcagggccagggtgccgaagcagacggcgtcagccttggagaccacgtcgatgagctggcgggtgtagaggatgtggtcccaagccacgcccttgacgatggtgtactccgggatgccgttcttcagcgcgacctcgacggtggaggtcggccaggcgttgcgctggatgacggtgttgatgccggcctcgttggccttggcaatcagttcgtcgccgagctcatcctcgccgaccgcgctgatagcccagccttcggtgccgttcttcatcgcgtggtaggcgaagttgacgggggcgccgccggctcgcttgccgctcggcagcatatcccacagcagttcaccgaggctcagaacgatcggggtagtcatggttggtttcctttcctttgtttcttttaccgggtgtttcgtatggaacatcttgtgatgtcggcgcttggtttaggagacgtcgaagaacaccgaggggtgttcgaggaattgggtcaccgccactgctgcggcaccggagaccgccgcgtcggcggacagggtggataggctgatggaagtggaggcattgatttcggggatggcccgttcggccaccgtggcgcgcacctcatcgagcagtatcgggccggcttcggacacgatgtcgccgatgatgatgtgctcaggattgtatccattgaagatggtgacgcatccgtagccgacgtatcgggcgacttcgcggacaatggcgattgacgcttcgtcgccgtcgccggctttggcgaacagggcgcgggcggcttcggtgtgggtcatatcggccgcgccgggaaccacggtgccatcggcgataagcatgtcgtgaatggcgggggtggagcagtagcgttcaaggcagccgacgttgccgcaatcgcaggggcggccgttgacgtcgatggagatgtgtccgatttcggtggcggcaccgaggaagccgttgatgagacgaccgttgtcgatgacgccgaggcccacgccttcgccgaccagataataggcgaggttgccgtcggcgtgcaccgacgggtcgaagagataatgtgcgagggctccggcgcgggcgtcctgttcgatgaacacaggcacgcggaaagcggtggcgaattcgtcgatgaagttgattttgcgccagccctgcatgctggacaccacggcggtgcggcctacgttacgcaggtaggggccgggcaccgccatgccgatggccacaatggacgggtcgttgtcaagcagttgttcgacgcgctggtggatggtgacgatggtgccgttgatggtgttgtcgtacaccgtgggcaggttttcaaagctcagggtgttgccgcacaggtcgaacacgccgatctgcaccagcgagcgggcgaatttgatgccgatgatgcggaaccgcgtggtgtcgagtttgagaccgatggaacggcggttcttggaaccttccaaatcgccggtctcttcaatcatgccggcctcgataaggcgtgcggtgattttggtgatggccgcgggggtgagttccagtgccttggcgatttgcgcgcgggagctgatgccgttgtgatacaggtgcttgacgatgcgggagcggttggattcggagacactggcttgggaagtggcatgggtggtgtttgttgccatcggtcttaagtcctccttgtctgcaccgttgcgagttgttccgctcgtctttgaatctgaacttgattaagatattaacgctgttaattgattgacgcaatcaatatgtcattcggtgtgtcgtgcatgtgagtgtcgtcttgggggaatttgttaagatggttgtcaatagtcggatgcacactgatatcaagcgaaacgttcgatgaagaacaggggaggactgatgtctgagaacactatgaacaatctcaaaatcggtgttgacgtgggcggaacaaaaatcgaagctgtgctggtcgacgcaatgggcacggtattggattccgcccgtattcccgccaggcatggcaacgatgccgtgatcgaagacatcgtcgctgtggcacatcaggcagcgggtgagcgttttgacgaggtgagggccatcggtatcggtaccccgggcacggtggattcggccagcgggcatgtgggcaatatcgtgaatctcgacgtggtctcgctggatatggggccgttggtctcgcagcgttcgggcgtgccggcccatgtggaaaacgacgtcaatgccgccgccgtcggcgcggccaccgtattgggcggtgcggacggcatggccggtaccattgcgttcctgaacttcggcaccggactggctgcgggcatcgtcgaaaacggtgtgctgatgcatggctatagcggcgcggccggcgaaatcggccatatcccagtcgaacctcatcgcctcaagtgcccttgcgggcaatacggatgcttggaaacagtctgctcgggcgcatccgtggggcgtctgtggcccaacgccgacccgccgatgcccgacctgatccgtcgcgcgaaaaagcgggaggccaaggccgtcgatgtgctggacatggtagtgcgcgccatcggcgacaccatacaaatcctggctcagtccgttgatccgcgactcatcatcttgggcggcggtatggccaaaaccggcgaaccattggttgaagtgatcgcggctgagctgcgccggcgtgaatcgcaatgccgattcctcgaaacgctggacctgccggcccggctacgtctggcacctgtcggccaaccagtcggagccatcggtgccgccatggcggcgtagcctggcatagtgccggggcatgggagatgaggcctcagatttgtctccgaggccccatctcccgcgcagtcctatatcgctttatgtcgtgctgtgccgcgcttggtcttgcgcgtttcgttgccggggtgaccggcttttatttggccaagtgttggaagaccacggcgatggcctcgccctgtacggtgatgtcaggtccgcattcgcagcgccgaatcaccgtgtgtttgtggaaggacgaggatgtggcggcatccagatattgctgggccgcgccgatgaacgtcgcgttgatgatgttcggctggccatagacgcatacgtctgccatatccaaaaggcccacaggcatggccagggcttggccaagatagcggcccgcccgagcaaggataccctgatgctgctccacgtctgctgcgctgagttgcttcttcaatgcggttccggaaatcatcgtctccaagcaaccgtgcttgccgcaagggcacagcggcccgtcaagatcgatggaaatatggccgagctcgccagccgcgtgcagttcgccgattaccggcgtgtccgagagcagaatcgccgaaccgatgcctctttcgatgcgcacgaaaagcatattcggcccgccttggccaaagaaacgttcggtgagcatggctgcggtggcgtcgttgctgacgtttacttcaagtccgaaatgttcggcgattggcgtggacaggtcgagattgttccagccgcgcatcgtggaggagcggaccacgccgttgtctaccacgccgggggaggcgactccgatgccgatgacctcgccatcggacatgcccagcatcttctcaatgagctcgatgatcacatccacggaaacgaatgagccggtgttcagggtgacttcggcgtgacgcagcggctggccgagcagattggtgactgcgccgtgcagcaggtgctcctgcgtcaggtcgatgctgatgatgcgcagtcgatcgatatcgatgctcagcagtgtgcctcgtttgcctttgccgccgctgggtgcctgaccggtctcgcgcagcaatccttcctccagcatccgaccgaccacatcggaaacggccacgcggctcaatccggtgcgtcggccgagctcggcgcgcgaatactggttggtggggaacaacaacctgaagataagttggcggttcttgcggcgcacatcggcgggggaagccttggccgcatggtcgtcggtcgttgtgttgagaccgagatatgacatgtttcctcctacctgatggtgagcgagtggacggcgattgttgttccatacacagcttagacggtgaagcgcaatttcgtcgttgaaactgttatgaaacttcactaataaattccagtgtacctgtgtgaagcgtcaggaaacaccgtgagtgttcatgaggtccaaaattgttactatcattaacaaatagcgaatcaccaatcggcgctacgccgaacggtggttggaacgccgcgcgcacccggacgtgacaaggatgttgccattatccgcaagacgggcggcggtacagcgactcgcatcgggcgggccgcacggaactggaggaaaccgatgccggaaatcatcattgtcaagaacgaagccgaggccggcgagatctacggccgttgcgtggcggacctgatcaaagcaaagccggacgccgtgctgggcctggccactggctccagcccgctggccgcctatcaggcgctcgccaagatcgtgcatgacgagtcaatcgacgtctcccaagtgagtggctatgcgcttgacgaatacattggactgccgctgacccatcccgagtcctatcatgcgaccatccat

SEQ ID NO: 3988 - DNA, 8526 bp, Unknown
  R22_24m  MAG No. k141_42315
catgcagcacgtgctcgaaagctccggcttcgcccgttgcggcctgatccagctgctcgaccggccggtcgacaccaccagaatcgcctatcagcgccacgagtggtgagtgtggctgccggctgatgtgctcgtttctgcaccgtcatcggtttctgacggtagaatcagtgtgtgagaagaacacgttgggtcgggggcgtcgtggcggtgcttgcggctgtcatgctgtcgtcgtgcggcggcgtccagtcgaatcccggggtaacacaccgttgccaatccattcaccgcgcaggtgaatggagaagacatggcgatgcctgtcggccgatggagccccatcggccgacaggcatcgaggaagtcaccgtggccggcggaacgcgcggtcgccgattggggcgaatggcttgtgtggttcgctttggtaccagtaggcgaccgtggccacgtcgtcctgtcgttcgaagttgccggcttcctcggtgccgatctgctgccattcgacgcgcaggtctcgctcgaagtagatcgggtcggggatgtgccaacggtataggccgcgggtcacgggggtggcagtgtcccagtaggcgctttcgcgtccggcgaggttctgcgagtagaacgggaagccgaggtatgggccggtgaaggtgcgctcgtacatgcggccgtgttcgtcgaattcggcgaagctccaggcgccgccgaagtagtcctcggcgccggtgctgcaccaggtggggtatttgccgtcgccgtcgatgtagaacttgaattcgccttcgccccaccagcggctttcgagcgcggtgagcgccaggtaggtgccgacgtaggtgccgtgtccttcgacgccatcgagcaccacgtagtcgtgggcgagttcggtgacgcgttggcggcgccactgcgcgtggaagcgcatcgtgtcggccggcagccggtcgtattcggtgtagtcgatttggtagaagaacgcgggcacgtcctcgttgtggtcgttgcgcagcacgatgcgcgcgtgttcgaacggcatggcgaagtagcagttgaagccccggttcgggttgaccatgacgggaattgagttgatggtgcaggactgggcgtgtccgcagcagaagaagtcgccgatcgggcattgcaccgagggggagtcctcgccgtcccagtagaattccaggatcaggttgcgtagcacgtcggggccggtgggggaggtgcggtcggttaccgtcatccagatgtgacgaatcacgccggggccctcgacgtccatcaatgtcaccgattccccggacctcaccgtgctgatgcaggggcttcccttgcgggaggggcccaacgcgctggccgccatggccgcgcggcccttgccgccgtccgggttttcggcgttgatgcagcgggtgcggccgggggtcctcatggccacggcatccaaggcgccttgtccgagccccggcgcggggttcgctgtggtgaatgcgtcgagcatgatgcttacttcctttcctgtcgcaggcccgtcccgccacggcgttttgtctggggtgagccgggctgctggggggtatttcacggcaccggcggtgatgccctgggagagcttgcgctggggtagtgcccgatatcttgcgcactttggtcttcgcccgtccctgtggcgatgatcggttcgcttcccatacggtctcaccgagtcttgacatgtcgaggtagcggcgcgtcgaccactcgttcgacgtgacatagcgcacgcgtgcgcagacgagcatcaacgcgctgcgttcgtcggggaagctgccgaccatgcgcgtgcgccgtctgatttcgcggttgcgggggttgaccctggcgaggacgttgcgctcgaagcggaccatgcaccgctggtagcgggcatcgcgttcaaggcctcctcgacgctttttctgaccatacggtccagggtggtctccgacatggcctcatatcgcaaaaaccgtacgctgaaagtaactcagcgtacggttttcacgaaagcagccatcggctatcggtcagccgatagacctcagtcctcagtcgcagcgaccttggtgtcagccccggccttctgctcaaggccgagcttggagcgcttgcggctgtagccgaagtacacgatcaggcccagaccgaaccagatggcgaaacgcacccaggtctcccagttgagaccggcgatgagcacgaagcagaatacgatggccagaatcggggtgaccggcacgcccggcgcgcggaagccgcggggcgcattcggctgggtcttgcgcatccatagaataccggccgacacgatgatgaacgcggacagcgtaccgatgttcaccagctcgaacagcacgttgatgttgatgaagccgccggcgaacgcggtcagcagaccgaagaaccaggtgcccttgaacggggtgcggtacttctcgtgcacgtggccgaagaacttcgggaacaggccgtcacggctcatggcgtagcagatacgggactggccgtacagctgtacgagcatcaccgtggtcatgccgatgagggcgcctaggttcacgatcaccgcgagccagttcatgccggtctccagaatcacgccggccactggggcgtcgatgtacttggcgaactccttgtagggcaccacgccggtcatgatcatggtcatgacgatgtagagcacggtggaaacggccagggacagcaggatgccgcgcggcagtgtcttgttcgggttgatggtctcctcggcggaagaggacacggcgtcgaatccgatgaagctgaagaacacgatggatgcggccggcacaatgccgtacggctgggtggagccgggctggaaagtgtagatgccgtacggggagaacggctgccagttggacggcttgacataccacacggcgcacacgatgaacagcacgatgatggcgagcttgatgagcaccatcacgtcattggtgcgcttggtctggttgatgccgatcgagagcacccacgtgatgatcagcacgatgacgaaaccgggcaggttgaagtaggtggtgacgtccgggttggtgccgtaggcggcggtcagctcgaccggcaggtgcagtccgaagccttccaacaacttgttgaagtatccggaccagccggcggacacggtggccgcctgcagagcatactccagaatcagatcccagccgatcacgaaggcgatgagctcgccgaacgccagataggcataggagtaggccgagccggacaccggtgccatggcggcgaactcggcgtagcacaggccggcgaaaccgcagcagacggcggccagcaggaacgatacggacagggccgggccggcggtgagcgcgcccttgccggtgagcacgaagataccggtgccgatgatcgcgccgataccgagcatcgtcagatcgaaggtgcgcatcgtgcgcttcaggggagtggattcggcgacaagctgatccacgcttttcttacgaaacagatccatgttcttctctcatgaaacttaagatatggggctagaccggacggatttccgggatcccggcacgcctcaacgccgggaatcaaaggcggcttccgagaaaccgcatatcggtcattagtgtacgactgccgggcgaaaacaaacgattgtgaccacacgtcacattcctgcgcaacaataggtgcctatgagcatgaacgcagcacccgaaatcgcattctcgtccgagcagggcaaggccaactatgcggccacccgccgccaataccccgcacaggccatcgtgaacctcaaaaccatgcgcgacaacatggcccacctggtctccgtggtcggcggcccgaactccggcacggcggtgatgggcgtggtcaaggccgacgcatacggccacggactgctgcccgccgcactggccgcgctcgccggcggcgcgacatggctcggcaccgcgcaatcgcatgaagcactgctgctgcgcaaactcggcatcggccccgaccgttgccgcattctgacttgggtctacaacggcaccgaagcgccattcgatgagctgatcgctgccgatatcgacgtatcggtcggctccctgcccggcatcgatgccgtggccgccgccgcacgcaagctcggcaagcccgcccgcgtacacgtcaaggtcgattccggcttcggtcgcaacggtttcacgccggccggattcgacgccgcgctcgccaaactcgtgccgctcgccaaagagggcgtgttgcatattgtgggtcagtggagccatctcgccgtggccgattcgcccgatgtgcccgaattcgtgtcctccaccgaccgccagatcgaaacattcaaggacttcacgcgccgcatggaacaggccggcattccgccggagatccgtcacctggccaacacggcggccactttggaccgcccggagattcacttcgaacttacccgccccggcatcggcctgtacggctacgagcccgatcccgcgatgggcaccccgcgcgactggcatctgaccccggccatgcgcctgcaggcgcagctcggcacggtcaaggatgtggaggccggccatggcatctcttatggccgcacctacctgaccccgaacaacacctcgaccgctattgtgccgctgggctacgccgatggcatccaccgctccgcttccggtttcgatatggaaggtgccaagcacgtggagaagccgggcggcccggtgcgcatcatgaccactgaaggtccgaagctctaccgcgtgtgcggccgcgtgtgcatggaccagttcatcgtggacctgcacggatccgccgccgaactcggcgttcacgagggcgacacggtcgaactgttcggcccgggccgcggcgaggattacgttgagcctaccgccgacgattgggcccgcgccgccgacaccatcagctacgagatcttcacctgcctgcgcaaccgcatcccgcgcctttacgagcatgccgccgaagtactgcccgccgccgacctcgccaagctcgaccccgccacgctgctataaggtgcattaccgccatacggtggcaccccgtaatcccttcttcccgaatatgtaccgttgacatgtgctgagcgtcacatattcgggaaatcggccccaatctcccgaatatgtgccgttgagttgatgtcagtggcacatattcgggaagtcgggattactgcggccgatatgtgtgcctatgcttggcatatggaaacaacgttggatggggaacaggtgctgagcgatgagggctacagcgccttcgacgaggagcggtgggcacccgagccgcccaaatccaagtcgcgcacggctttcgaacgcgatcgcgcgcgactgattcattcgtccgctttgcggcgtttgggcgcgaaaagccagattctgattgccggtaccgacgatttcgcccgcactcggctgacgcatacgctggaagtcgcccagatcggtcgccaaatcggcgcattgctcggctgtgatccggacgtggtcgactgcgcctgtctggcccacgaccttggtcacccgccgttcgggcacaacggggagcgtgcgctcgccgacatcgccagcaatatcggcggcttcgagggcaacgcacagaccatgcgtatcctgacccggctcgaacccaagatctttcacccggacgggcgttcggccggtgtgaacctgacccgtgcggccttggatgcggccgtcaaatacccgtggaccttggccgaagccgaccaacaccccaagggggagcggtcgaagaagttctgcgtctacccggatgacgaaccggtgttccgctggctcaaaatcggcgcgccccaggccgccaaacccatggaatgccagatcatggacctttcggatgatgtcgcctactccgtgcatgatgtcgaggattccatcgccaccggcgcgttcgatccgattgtgctcgccgatccgaagatgctggaccacatcatcgagcagacgcgcgcatggtatggggcgaagtgggatgccgacaagctgctggccgcgttcatgcgattgcgccgagagcatttgttccctgcacatttcaatggttcgcgcgaatcgttggcacagctcaagaacatcacgtccgatttgatcggtcgcttctgctggtcggtggaaaccgccacgcgcgacacgtatgggcccgggccgttgacccggtattccgcgaacatcgtgattcccgaggacacgaattacgagatcgtggcgttgaagggcatcgccgtgtacttcgtcatggcgcctcgcgagcgcgagccattccatcaggaggagctcaagatcgtatcggatttggtcgatgtgcttatggccgattcgccgctcccatccgacgctttggaaagccagttcctggccgattggaatgaatccaccaatgacaacgagcgcctgcgcgtcgccatcgatcaggtcgcaagcctgaccgacaactccgctctggccctgcactccatcttgtgctgagggcgtgttggacgggtgcttccctcagtctcgctgcgcgagccagctcccctcgggtgaggggagctgtcgctgtaggcgactgaagggagtttcgcggaagaaatgataaccgacggtaaaaatttaccgtgtctcaggtgaggcggtactctagagacttatggtcggaatgattaagaaagaagatgtcgagaaggtgcgcgccgccgcggacctgtatgacatcgtatctgcgaccgtaacgcttaagccctccggcaccggcaccttcgtgggcctgtgcccgttccacgacgagaaaaccggcagcttcaacgtgcgcccctcactcggcgtgtggcactgcttcggctgcggcttgggtggcgacgtattcaaatacgtcgaacaatccgaaaacatcgacttccgcgaagccgtggaactgctcgccgacaagtaccatatcgagctgcactacgagagcagcggcaacggcccgaaccgcgagaacaccggctccaagcgcacccgactgctggaagcctgcgaggaagcccaacgcttcttcgtctcccagatcctgaccaaggaagcgctgcccgcccgcaagctgcttggcggccgcaacttctcccaagccgactgcgaacgtttcggttgcggctacgcgccccaaggttgggataatcttgtgcgccacttggcctccaaggggtttacgcagaaggaaatcctcgacgcgggcttggcccgccaaggccagcgcggcatctatgactatttccgcggccgcgtgacgtggcctatccgcgattcgaccggccgcacgctcggcttcggcgcgcgcaaactatacgaagacgatcagatcgccgccaaatacatcaacacgccggacacgcagctctaccgcaaaacccaggtgctttacggcatcgatttggcgaaatccgccatcgtcaagaagcgacaggtggtgatcgtcgaaggctatacggacgtgatggccatgcacttggccggcattgacaccgccatcgccacgtgcggtacggcgttcggcgccgagcacgccaagattgtgcgccgcctgatcgccgacgattcgctgggcgcggtccagctggtcgggccgttgaaggtcaaggaccagccgttgagctcgcgcatcgtgttcacgttcgatggtgacgccgccggccagaaagccgcgctgcatgccttcggccttgattcggccttcctctcccaaaccttcgtggccgtggccgacgacaatctcgacccgtgcgacctgcgcatcgagcgaggcaacgaggcggtgcgctcgctgatcgcccgcgccaaaccgttgtatgacttcgtgatcgacgccgccatcggccggttcgacctgacctacacgcccggccaagtgggtgcgatgaaagccgtggccccgctggtggcgcagattcgcgaccgctccctatgggacgcttacgcgcgcaagtccgcgggccgtatcggcgtggatcttgaggtgatgcgccgcgaggtgatgaacgcgcgccggcagatgcatgtacgcgatgaggacgcctacgcgcccaaacgtcgattcgagcgtgacgagccgcatgtggaacccggcaccaacccatacgccaatccggccacgcgcaaggcgttggagcgccgtgacgccgccgaacaggcatatttcaagatcgacgacgccgtattcatcgccgaacagcagttcatggccgtgctgattcaggtgccgcgcgccatcgaccgcaccatgttcgggcagctgaccatcgaccatttcatgacttcggtgttccgcaccctgttccaggcgatcgcggccgccggcggactgccatccgacgataccccgcaggggctgtggatgcacaacctcaccaaggccggcgggccgatgctgaatcaggtgatcaacgagctggccgtcatgccgttgccactgcctggcgacgac

SEQ ID NO: 3989 - DNA, 7453 bp, Unknown
  R22_24m  MAG No. k141_44240
gatgggtcgagcgcggcggccacggccagcgggtcgtgcagtccacatccgcgaatctccggctggttcttcaggtagaagtcgatgtagtagtcggtcatggtgacgaggaagtcgccggccggcgtccccagagacgcccattcatgggctttctcacgggtgagcgcggtctggtgggtcacgtcgaggccgatcatggtggtgcgtgcgccacacttgaacagatagtctgctgactctgggtcttgggagatgttcgcttcggcggccgggcttacattgccgggcagcgtcaacgcaccgcccatcaacgtcacgttcacgccggaatccttcagatccggggcattacggaacacggtggccatggtggtcatcgcgcccgtaggtacgatggtcaggtccgggccgtattcgcgcgcggcggcgatgatgaaatcgaccgccgagcctggtgcttccggagcgcgcggggagtcggggatgattgcgccgccgatgccgttgggatggtggaccgccaccgagccgggagttggtgcccacgaagcgtccgtttgccagccgtccgcgccgccgttctgccagcgcgcgtaggcctgggtccgctcgtctggtgtggtgccacgcattttcggcaatgttgccggggcgatgggatggtcgactccgggatagaccggaacgtcgtcacggccgaacaagtgcaccaccgccagcgcgttgcgcgcggccagcggcaccgtgacattgccgtaggtggccgtgataccgatcagatcgatctcgtcggcactgcctagggcatatgcgatggcgagcgcgtcatcgatgccggtatcgaggtcgaggatgagttttttgcgcatggcggttccttcaagacgaatcaatcctcccgaatttgtgacgttaagccaacgtcagcggcacaaattcgggaggatggggaatgggcaatcagccgagcttggcgagttcttcgggggtgagttcgagctggtcggccttgagggagtcaaggatggtctcggggtggtgggcgccgggaatcacgaacatgtggtcgcccttggcgagctcccatgccagcacgacctgctggtagctcacgccgtgggccgccgcgacctcgcggaacgggtcgaacttggtctcatcataggggtgacggtagccgccgagcgggctccagcacacgaaggccaagccaaccttggcgcagtagtcgagcgtgtcctgggtctccaggtgaatcggcgagtactggttctgcacggccacgagcttgtcgcccagaatgccgcgcgcaatgtcgatttgctcgatggaggcgttggagataccggcctcctgcgccacgccctcgtccaccagctgcttgatggcttcgacggactcgttgtacggcaccttcgggtccgggcggtggaagtacagcaggtcgatggtgtccacgccgagcgccagtgcgctctccttgccgcgccgaatcaggttctccgggcgaccgtccacatcccacgtggggcggccgtcggtgaagttgcggaagtggcccaccttggtggccaccagcacctcgtccttcggccccttccaggtctcaagggcctcgcgcaccagcttttcaccggtctgctcctcgccgccggagcagtagtaggcccaagcggtgtcgatgtggcggcagccggcgtccagcgaggcatgcagggtttcgatgccgacctcgtggccgcggttgttttcgatggtcagcggcatttcgccgtggccgatggcggtggtggagaacggtccgaggttacggaacaatgccatggtgattcccttcgtgaaacttatggaaactcgatatccacgattaagcctaagcatcccgttggatttcacactctcggcctgcccgcacaatcaatctatgaaatttccgcaacttcacggaatagaaaacgcaacttactcatacccagttcagtgaaaacgaggggccggaaccccatggattccggctgttccgctgatagatcagtggcctcgtctgagactcattcccagcaataccagtgcggcaatgatgatggccgtcgaccgcccctgtccaacttgattggccagggcgatcaacaggccggtcatcagaccttcccggtattgccggtcttgtctcggacggttgtcatggttgttgcctaccatgagaacctcctcttgaattttgagacgtcattatgccggttgacacaacgacaccgcgccaaagtggcacgctagtagaccttggtttggtcagtccagtgtactggtgagcttcggtggaggctggtatgctgtgttgtagcagaaaggtcacgctagcttcgaggcaatcttctcggcggcgccacagactttcgccccgttggacctgactgttgaggtctcctcacctcgattttgagagaaaggcccgatgtcttatgacaccgggccttttactttcagagctatagggactttcagaagcacaccgcttaccgcccgccgaacgaaccgccgccggaaccgccgctgctaccgccaaagccgcctgagccaccggatggcgaggccgcattgattgtcgcggtgatatccgcaaatccgtacgacaattgcgtgccgaggtcagagaacccagccgcgaacgacgtgcccccgaacgctggcaccgctccggccaatccgctgtcagccacggaatccgcgaacgccgagccattgtagaaacgcaacccataccagtcgtacggacgataattccaatagaacaccgtgtcggaggcattggcatcaagccattccggatcggatacttgcggataggccatggccagctcccgcatcacccggtcggatatgccaaatgcggcagcgtagaccatataccaatcccacagcgtcgaatccgcgactccacggtacttgaagttcgagaagccttgcatatatcgtttgagacccaagcattgcccggccatctgctgaccatgatcggtcagcacgtaggaattccccatcaggaagcagaatatgccgaccgtcatcaggggaatgccgatgagggccccggccaccagatatccggccaaaccgttgatgaatatgctggcgccaccgatcagcacggtgattgccccgggaatgagccatccgttctcggttttcggcgcgatatccgccgccgcgaattcggtcttgcacgcattggtgaacttttcgagttccttgtagccgtctttccaatccttgcaggcgtctttgatgtcatccatgtcaaatgccgtacgacctacgcgctcggaaatcacggtgagcagatagagcaatgcccgctcagaagcactgagatcgggctggtgtgcatcggacacgctagatgcggcagatccagatccgccagatccagatccatcaaatacggattcgacgaatactgattcatcaaatccctcagatacgccgtaatcggactgccacagcatcacaatcgtgctattggtacgcgcattattgcgcttgtatggatcggacccgattcgctgactgagctccaccggagaaacttgtttcagatccacgccgatatacaggtccgccgaaccggggaacacagcaatgactttcttcacggccagagaaagcaaggtcgcgacgagttggcgctcggaaatgtcgggtttgtcgccggaagtcacgatatcgatgagtttggccgccgatgcggggctcagctcggggcgatcgcgccaatattcgatggagccacggtaacgtgaacgtccggaggagcgtaaggctgcaacaacaccaataatcccgaatatcaggccggccgatatggtggtcatccagttgttcaggcgccttgtggcgcgttggcgttccagattgcgccagaaccgttcgtcgtcggcttcgtcttccttcaactcctgcagatgatcgtcggtctcgacacgagccatatctcccgccttggccgcgtcgaaagcggccaccacgtctaggtactcgccgcttttcacatcatttacggtgaaggtgaagctgccatccttggttcggccggtttccgaggtttgttcagtgtgcagccaagtccacgagttgctcgcggtcacacctttggggaaatgcaccgtgccggtgaccgtaccaatcggcacctgattgttctcaccgaatggctcccattggaaggtcgccacgtctttccacttggtggccacgtcatgcatggtgaagctcaccgtgaacttgatgctgttggtttttacggtggtgggaatattccagccgatctccacggtttggtcttgccatcgtcatccttgcgtttgcgcaacttgatatcgatatgctccgtgactttaagatcgccgtcggcggtggcggtcacatcgtaatcaagcgtgcggtagctcaggtcggcaccatctgtgccgagaatcaaggcaccggcacagagtgcggcaagaatcagcgcaccgacaaggcttaagcccagggcacgaacaatgcgtttcgacataggcatgcgctaccgcccgccgaacgagccgccacctgagccaccgaacgagccgccgaaaccggagccgccgcccgaaccgaagctggagaaatcgccaccggaatcggcggatggtgctgccgcgctgatggtcgagctgatgtctgccagaccggagttcagctgcgagccgaggtcggagaatccgccggcaaacgacgtgcctccgtaagccggagctgggccgccaacgcctaggtccatctgcccggcagcatcgtggtcgaatggaccattatgacggtggctgtaccagccatacgggcggtagttccagtagaacaacgagttggaggcgttggcatccagccaagtcgggtcgttgacctgaggatatgctttggccagttcacgcatcacgcgatcggaaatgccaaacgcggcggcgtagaccatataccaatcccacaaggccaaatcggcggtaccccggtcggtgaagttggagaagtcttccatataacgcttaaggcccagagtccggccggcgatatcctgcccttgatcagtgagcacggtcatcgcgccggccatcgagcagaacagtccgaccaggaatatcggcagcccgataagaccagccaccgggtatccgataaagctgttggccagcagcgaaccaaatcccagcacggcggccaatacgccgggtaggatccattgccagcccacagagcgcgtggcacccagccgctggtattccatgctgcatgcaccggtgaatttgccgagctcaatatagccgtcttgccagttctggcaggtcgccttcatctggttcaggtcgaataccgggctgcccacgcgctgagaaatgacgatgagcaggttcagcagcgcatcttccgattcgctcaatcccaactgttgcgcgttgggtgcctcatcaatggcgagcggcagaatcacgatggtgctggtgatgcctgccgcatactgcttgccttggtcggcggcaatcatttggctcaagcccaccggcgtggcctggctcatgtcgatgccgcgatacatgtccgacggccccggataaatggcgatggccttcttgacggcgagcgacagcatggtggcggtcagctggcggtcttcatcggattggcgcgtcgacggatcgaccacgcgaatcagacgggctgcggaagctggactgatgccgggctggtcgcgccagtattcgacgctgccactgtattgcgcacgccggttgctggagatcacagcccagataccccacgcgcacaacgcgatgccgagcacgatgctgacaatccagaacacgagacgagctctggcagcgaatcgttgcttgtcgagccagcgctgctgttgcttatattcgtcctgtttcaggtccttgagatgattgccggttcccttgcgggcgatgcccttggctttggcggcatcgaacgccgcgaccacatcgaggtagtcgccattgtggatgttgtaggccgtgaacgtgtagctgccgtcgctgttgcgcttggtttccgaggtgcgctcggtgtgcagccatgtccatgaggttttgccggtgatgccgttggggaaatggacggtgccggtgaccgtgccgataggcacttggttcttcttgccgaacggctcccattggaaggaggccacgtctttccatttggtggccacatcgtgcatggtgaagcttacatcgaacttcatgctgtcggcctcggtggtgaccggaatattccagccgatctccacggttgtgtcatcttcggtggcggaggcgctgggcttgaggccatcggtaccgggcgtgtatgcctttggatggtcgctgccatcgctcacatcggcgacataccaatggttggcgtagtcgctgttccattccttgtcggaagagacgtcactgggcagcttgggctcgctctgttgtgcgtagtcgatgccgtcggtgacgttgcgcacgctgatatcgctgatatcagtcaaggtgccggagttcagcgtgtattgctggaacagctgcttccacggcttggtgttgtcgtcactgtcggtacgctcacgcatcttgacgtcgatatgctgcgtgaccttcaaatcaccgttcgcggtggcggtcacgtcatagtccagcgtgcggtagctgaggtcggccgaatcgccgaacgcggaagtcccgattatcgccaaggtgataactgccaacaccaccgtggcaacaatgctgatgattccggcgcgaatgaatcgtatccgcatatcttccctctcttaagacaatacgggcccggccggcggcttaccggacgggcctgaagcgggtcagaactggacctgtggcacctgacgggaagcgtcatcggcctcgaagtattgcgcctgctcaaagtggaacagaccggcgatgatgttcgtcggcacggtttcgatggcggtgttgagcttcaggaccacgtcgttgtagaactgacgggcgtaggcgatcttgttctccagttccttgagctggttctgcagatccatgaagttctggttggcttgcagctgcggatatgcctcagccgtggcttgcaggttgaacagggcgcgggacagctggttttcggcggcggcgcgctgagcagtggtcgtgctcgggttgctggccgcagccactacgccggcgcgggcggcggtcacctgagtgaagacttcagactcgtgggatgcgtaccccttgacggtattcaccaggttcgggatgaggtcggcgcgctgcttcaactgcacgtcgatttgcgcccaaccgttcttcacacggttcttcagcgtcaccaggttgttataggcgctgacgccccaaccaatcaagacaacgataataacgacaacgac

SEQ ID NO: 3990 - DNA, 9922 bp, Unknown
  R22_24m  MAG No. k141_46664
atatgacggatgaacagccccttgaaacggagatagatgtctccagaaggccaaatcagccccttgaaggcgagatagggttctagactctgggacccgactcgcctgtgatgaaaacccgctcggcgtagaattaccgtaggttcgtttctctcgaatgcattcgaacaaggaaggctgctatggggaacatcaccgacgatatccggcaacatttcgacactttcaccgcactgccgttcaccgaggcggacagtctcgccctgtcccagctggcctacgcgcgcatgccggataacgtgccgcgctatcacgaggattcggcggacgccagcggcatgattcccgcggtctccatccgcgacctgctacgtgccgaatgctatgacgacatgttcggcaaggtgtggtcgccgcagatgaacgtcgatctgctgcgtgcgatgggggagagcccgcgctggcgcgacctgcgcgtcggcgaatacgtggatgaattcgacgccgaaaccaccaaacagttctcggcctgcgtcttcgaactgggcgacggcacgctgtacgtggctttccgtggcaccgacagttcgatcgtcgggtggaaggaggatttcacgatggccttccgccgtccggtcgcctcgcaggaggccgctgtgcggtatgtgactgatattgccggccgctgggccgggccgattatggtcggcggccattccaaaggcggcaatctggcggtatacgcggcggccaatgtgcccggcgaaattcagggacgtatcacggccgtgtattcgcacgatggtccaggcttcgatgaggcgttcttcgatgaggatgggtacgcgcgcattgcgccgaaaatccataaatcggtaccgggatcgtcgatcatcggcatgctgtttgagacccgcgagcatgtggaagacggctatacggtggtcagcagcgacggtgccagcatcatgcagcattttgccctgcactggcaagtcgatcatggccaattcgtacaggctgatggactgacaagtagcgcgcgatacctggcacgcacgatcaacggatggatggcgaaatacgatgatgagcatcgccgcaagttcatcgaaaacctgtttgccatcttcgaggccggcgggtacgtcacgttcggcgaactcacgtcgcacgtgacgcagtcgttgccggtaatgctcgccgcggcccgcaacattgatgtcgaagatcgcgacgtgatgattgaagtgctcaaaggcttcgccacgacagccgccacgtcggtaatctcggccaagtagccggaggccatcaaactggttttgccagtcagtctcaatagcgcaagagccggcccctgagatactcaggggccggctcttacttccatttccccagcggggttggcttaatcgcagtatatctcactgctgaccatgcctgttttacttactcctaatcaatgagcttgtagccgtgatcggcgactacggacttgagcttggtgaggtaggtttcggcggccttggagagcttggaacgctcgttcgtgatccagccgaccaacatcgtttcgtcggtgtcgagcggcacggtgacgatcttctcgttgttgaggtcgccgttgtcgatgccggtgcacaccgtgtagccgttgaggccgatgatgaagttcagaatcgtggcgcggtcggtcacgttgatctgcttgggggagtattccggccagaccgcctcctcatagaagtagaacgagccttcctcgccctgttcgtactggatgaacggatagggcttcagatcctccatggtgatgatcttcttggcggccaatgggttgtcccgtgagatgaacacgtgcaggggggcgcggaagagcggatggaattcaaggtgtttctcgcgcaggagtttgccgatcacgtccttattgaagtcggacagatagatgatgccgatctcggactgcatgttcgccacctggttgatgatgtcacgtgtacgggtctcacggatcgtgaactcgtattcgtcggacttaatggagttgatcatctccacgaaagcctcgacggcgaacatgtagtgctgggtggagacctggcacagctgcttgcgcggcttggcatgcttgtaacgctcttcgagcaggtcggcctggtcgagcacctggcgggcgtaggtcaggaattccgcgccgtccacggtcagggcgatgccctgcgaggagcgggtgaagatctcgatgcccagctcgttctccaattccttgaccgacgagctcagggccggctgggagacgtacagggcatgggaggcctcgttcatcgagccgcactcgacgatcttgacgatgtatttcagctgcagcagtgtcataaagtctatttatatcgctagggatggtcgccacacgggtttataacctcatcaatccactatggcgacacaatatgagatgcctcgcatatcgcggacgctgtgtaacgggatatgcgccacattggtaacctgaggcaggaccagtacgatgccatccagaccttctccttctccagcatcgaccgcttctccacgccgagcctgatgaccaggctcggcgccgacgtgatgaacatccagaacgccttcatgatgattctgcgcatggtgccgcgtgccgcgtcgttgaagtgctcaccgaacagtgcgacatgccggtcgccaaacggccggtcaccgtcgtcaaggacgggtccatagacttcaactgccgcgacgcaatatttggcgacttacaggcgtacgccgagttcggcgagcgattcgcgcgcctgcgacgcgttctcgaagaggatgctgtggatgccgacctcgttggcgccgacgatgttcttggcggtgtcgtcgaagaacacgcagcgctcggccgtgagaccgaagcgggtcaggaccagctcgtagatgtcggcgttcggcttgtgcatcttctccacgccggagaccacggtgccctgcagcagctgttcgaggcgcgggtacttctcgaaggccaggtggaaggtctcatgcgaccagttggtcagaccccatacgccgtagccgtgggccttcaaatccgccagcagttcgaccatgcccggcagcgtgcggggcagcgcgtccgcgtagtggccgatgtagaacttgaagatgtcggcgagttcctggccttgttcgcgtaccacatccgggtagatgtccgcgaaatcctcgccggcgtccatgcggtcctcgtagtggaagaagccgcaggggtcgtcgtcggcgcagatgcgttccacgatttcatcggggaatcggccttcaaggcatgcgcgggtgttccagtccagcagcacgccgcagaagtcgaaaatcacgtcggtgatgggggagttggccatgatggttccttgtgtgtttgggtcgttgggtggggtctgcgatttagtgtacggggtttgtgtataggtcggggtatgtggagtttgaggcttatgtttctctccctccgtctcggctttgccgagacacctccctcgtcagagggaggtcaacaaggttatgcgatgacgtcggcgatggcttcggggatggcgtggaccacgtcgccggccacgatcgggtggccgagcgtcatgaagcgctggcgatgctcgcggccgatcagttccggctcctgccagccctgctgctcggattcggaggcgatcgccgccgccaggccatgcaggtaggcggccgaggccacggtctcgcccgtggtggccacgtcatcctgctgggcgagtagggcgccggtcagaccggccagtacgtcgcccgcgccggcggtgcccagccaggccggcgcactgcccgacgcatagacatggtcctcatccaccacgatggtcaccgcgcccttcagcaatacggtggcaccggtgagctcgtgggcgcgcttcgcgctggccaacgggttcagccgcacgtcgtcggcggtgtacggctcgtgcgaatcggcatgctccgcggtgctggcggtggtttcgaaccggttgagcagtttcgccatctcgccggcatgtggcgtgatcaccacctggccgggcacacgctccggcagcaggtcgagtgcgccggcatccaccacgattggcggcatgtcgtaggcgtccttgttctcatcctcgctgccgagcgcgtaatgcttgagcaatgcggcgatggtgtcccgctgcatatcgccgtcggcgccctcgacgctagcctcgggcacgccggaccccacgacccaggactgcacatgtcccttgccgatcacggcttccggcagtgcggtgagcaccatgttctgcgcgcgctccgggcccagataccggaccatgccggtgttcgcgcgggcggcggcgctggtggtgagcacggcggcaccggggtagcgctgcgagccggtcaccagaccaaccacgccccgggaatatttggaatcctcgaaccgggggagacggaccgcgtcggacgcgaacgaattatccaccacctcgacgtccggatccttgtcgtcgatatcgaatccgaaatcgaacaactcgatacggccgcaggcgaacgtggcgggcggcagcaccgcgcacggcttcatcgcgccgaacgtgaccgtgaccgtggccggaatgtacgggccgggcagagaaccatcgttcacaccgacgccggatggcgtatccacagcaagtaccagcggaaaatcgcctgacgactcacggttcggcagggcgggctcatcgggagactcgccgtcgagaccaagggcggaggcgagcgcggcgggaatgccgcgtagcgagccttgaatgccgatgccggtcatcgcgtcgatgatcagatgcgatttcctggccacggcgatggcggtctgcagtcgctcgccggcctcaccggcggaaaacccggacgcgcaaccgggaatatcggctgccgggtcaagcaccagcaccttgccgccggcgcgcacgagcgcggcgaatccggcctcatgcagcgaccggcccacggcgatggcagtgacgttcgcgccctcctgggccagcgcggcggccgcgaacagaccatcgccaccattgtctccggccccggccagcagcacgatcgacgtgtcctccagcgccagatcctcgtcgtccagcatgccggccgccatgtgggccgcggcctgggcggccatgcgcatcagcggcacgcctttgtccagcaggggtcgctccatggcccggaccgtatcggagtcataggcgctgtgcagcagcagttcgcgatgatcggcgtcttcagtgtattccatggcaacccctttcctgtgtttgttacttgcggcccgtgtttacaggccgtacacctcgtgggcgaacttttcgagcacggggatcgaacgcttgactttctcggtgtcgatgcagtaggccatgcggaagtatccgggcacgccgaagctgtcggacggcacgaggatcaggtcgtattccttggccttcatgcagaacgccacggcgtcgtcctctaacgccttggggaagatgtagaacgtgccgccggggcgcaccacgtcgaagccgatgccggtgagcgcatcgtagagcaggttcatgttcgtctcgtagacgttgaggtcggcggtctggtcgatgactttggctacgcccagctggatcgagctcggcgggcagttgtggccggtgccgcgcgagatttggcccatcatcggcacgagcaggtcggcgtcggtggctgcggggttcaccgcgacgtagccgatgcgttcgcccggcaggctcagcgacttcgaccacgagtagcaggtcagcgagttcgcatagaagctggccgggtagggctgggtggctccgtcgaacacgatttcgcggtaaggttcgtcgctgatcaggaagatgtcgtggccgtactcggcctgcttggcggtcaggatcgcggccagacgcttgagcgtgtccgccgaatacaccgcgccggacgggttgttcggggtgttgatgagcgcggcctgcacgttcgggttgagcgcggcctcgaacgcctcgaagttgatctggaagttctcggtgtcggccggcacgatggtcagcttggcgccgatgcccttgacgtacggctggtattcggggaagtagggggcgaaggtgatgatctcgtcgcccggcttggtcaccgcgcgcatcgcgtgggacagcgcgcccgccgcgcccgtggtcgggaagatatggttgccggtgtatgccatgccgaaacgttcgttgaggttttcggcgatcgcgttcttgacggacgggatgccgagcgagggggagtagccgtggatggccgccggatcgccgttttcgtagaggtcgaccatggcgtcggtgaaggatttcggagccggcaccgagggattgccaaggctgtaatcgaacacgttctggtagccgatttcagcaccgcggctcgtggcgtactcgctcagcccgcgaatcacggacttgccgccaagcatggccttgtattcctcattgatcatggctgttctcctcgcatggttgtactggtatgcaccacgctactactatcgcggccggtttgcgccatttgccgcgccgtacctaagccggctgttctatttgttctattagtggagtttgaaccggcatatacccttgcaataaagccatttgtagggtctgaggctttccggggttgcttgtctcatagattttcggcctcttgatatttgcggttgatagctgtgatgtgtgtgggcgatggctgttgaggcatcatggggatctcttcgactgtccgccgtcgccatgccgccatgatgcctacagaaagtcgagttgcgtatttccgccaagcagggtggtgaccggtggggggcgatcggtgggggtgaccgacacccgctataggcagcaggcagccgcacacatcccaatatctgtgggacggcagacgagtcaatcgtttgtcgtccgcgccgtccctcaagggcgcgggatggcagacaagtcaaccgtttaacgtccgtagcgtcccacaccgacgactgtagaaaccgcggaataacgccgattctcgctgcagctccatgactatgcacaaccgttcatagcgagcgctgtgggacggcgggcggaaaacggccgaatccgcgtgccgtcccacacctcgtacaatccgcgttttgggaaagcatcaccgtaaggctgacgcgcatccgcatccacagcaggagccttaccggccgtaatcccgcactcgattattttttctgacagggaatcgaacccgaaacactaacccatgcccgccccaccgcaaacagcgaataaccaaaaaaatgcatgatctatccttggtgccgaataatgagagcctgactgtagtggctacgggtagctatatcggagaaggattcgatcagaagcgtttcgacacgcttctgcttgccgctccggtctcgtttgagggtactctctcgcaatatgtagggcgacttcatcgcgagaatgatggcaagaccgaggttcgtgtctatgattacatcgacgtgaccgtgcctttatccgctgtcatgtatcgaaaacggctgaaggcatacgcaaatcaaggatattcggtaaatcctgaccatactgacaaaatggacatgctcagtgcaaaggcggaagcgttgcgcgcttgcatgacggccgcgacgcagggcgaagatgctgcggatgcgttgctcgacacccggtctgacggattattcgaaggcagcatcgttacagccacgaattatgcagagatactccgcaaggatattgccggttgcgcacgttccctgattatctcggctgaatatgtatcacaacagggactcagcgcaattgacgatgaattgctccgactggccgacaggaaagcgctcatcgaagtttatgtccgtttgccggcgactgctgcggtggcaaccagaacacgaatagaacggaatattaatcggctgcgtgctattgggtgcattgttcggaccgtcgaatcgtgttccgattttgccataatcgatgacggattgatttggtttggaggcatccctttacttggcaatccaaggagtgacgactgtgcacttcgattcaaagatacgaaaatcggcgagaatctagcagatggactgaaacgacggtcgtcctgagtcaatattcagttaagataatcgcgcagtacgagggcgtgattgatatgcgggtccttggcggcatagagcagggtcacgtcgggatgctccgcgcagatgtggcgcagattgtccacggcggcattggcgtcgagctcggcgatgtaacgcatgcggaattccgcgaatttggcggggtcatggccgaaccatttgcgcaggaggggagagggagcgacgtccttcagccacaggtccaacgccgcacgctctttcgtcatgccgcgaggccacaggcgatccaccagcacccgatacccgtccgacgcagtcggctcttcatatatacgtttgattgcaatacccatacgccccatgattggcgtgcgcttgccggaagtcaaggggagacgcgatccatctacccgttcgatttctgggtgttctgtctaaggccttgtgctatgacagctagcgattcagcagcttttggtgatatcgtccaaccggaccgccttgcccctgtcgaaggtgttcatagtgagatcgacgggtttggtcttgatgaacgctgacagcgcggtgtgcggcgggttgtcgatcaagtgggtgatgggggcaatcgcctcctcgacgctgacgcccacaatggcgtaaatggcacgcgccagcagcttcatcagtggcgaatcgaaactgttcaatgcctcattgctgcgcacggcccaagggttgaacaacacatagtggatgcggcctccggtctgctgttggttttccgcgaagagcactcccagcagatcgttcagacgactcgtacagatagtcgcgcaatgctagaacgtgattgatgtgcacccttcattgacggtctctcaattgatctcctgcgattcatgccgtataaggaagttctcgaccaaggcgatcatcgtgtccttccccgcaggtgcggacagcgcaatcatcagcgtcatcgccgccaaggcgttaccctccacaagcaggggagtcatcgtcgcccagtatactgttgccgttcaggaaatacacgaacagtgcggcggcacaacgtttattgccgtcggagaacgggtgatccttgacaacttgatacagcaggttcgcggctttctcctgggtggaacggtacagttcttcgcctccgaacgtctggtagagtcctgcgacgattccttggaacgaaccgttgcgtttcctcccgaacagatcggattgcgtgtagaacggcatcgaccggatgaacagcatcgcgtcctcataggtcaagacccactgggactcgtcgcccttgggtatagggacattgcctgtgtcatagtcgttaagcagcacaagactcggcaaatatcgttccaagatctctgcggtgccagcaatttccggttcggtgggcctcgatagcaccttgacgacggcgtgaagtgcgtcaagccgcttgtgattgatggtgtaaccatcaacgagatgctgcttcagaactgagttggcccatcgccgggaatagatgccttccttggatttgacgcggtatccgaccgacaggatcatatccaagttgtaatgctcgacttggtatgtcttaccgtcagatgcagttgtcgcaaattctgcgacaactgaaaatccattgagctcttccctcaatgcattgccgacatgcttgccgattgttttgatatcgcggccaaacagcaa

SEQ ID NO: 3991 - DNA, 30437 bp, Unknown
  R22_24m  MAG No. k141_47325
aagcactgagcgttgcgcacaacaacagtaggtctcacggcaatgccgctcgttccgagcctacgggaagcccaccgggcttcccgcttaacggctcggccagccaagaagccaaagcactgagcgttgcgcacaacaacaaaagaggggaacctcctattgaggttcccctcttttgttgtttgacgttcggatgacacgactgtgggacggcacgcaaatatcccgcattgtaagctggcggcccacaatagcgtgggccaccacgcgtgtcaaacgttttatatacgcggcgtcccacagaccgaatcaacaaatccttggaatttagccattcttcaaactatagttagctctgactcacaaaagggtgtgggacgccgcatcgaaaaagccagtttttgatgcggcgtcccacaccgataacgcactttacgcatattgggcacctgtcgcatgcagattttcccgcatacaccatcacaccgtcggaatcacgatgaggtatcgggtttcggcggttttttgttgcgtattggggctatcgagctgcgcgacggcctgcgccaagagcgtgccagcatcgctgatctccacggtctcattgatcagcgcgctcatgtcatgcttgagcagcgtgccgccagtgccaaagccgaacagtactggagcggtgtcaagattgttgccggaatcgccagtatcgctcgacttggctgagtcgttcgttcccgaaccatcgctcttggacgaatcgaacttacctccaccaccgatggccgaagtaagaccacccgcatagttcatcacatcgccagcagacatggacatggtgtcatcgaccagtgaggccttggaatgctgcgactgctgctgttgcgcggctttggcctgcttacgggcggcatcggccttacgcttggcttgggaggcccgggtcttgccgtagaacgattgcgattgcgaatcgaccaggccagtcagtgcctgagcctcggtcaccggaccggaagagacatcaccggacgagccatcgccatcgctgccggaagccgaggacgcgactccttcgaactgatcggagaatcgcaatacaatctggcgcaaggccgtggctttgcccgtatgctcggaggcggtggcaagcgtgctcatcgcggcatcgaccttggattgagcgtcggcgagttcatcgctaccgttggtttcggcgatggcttggctctcgtaagcagtggcgcccgaagacgtgccgccggtcagggcgctcaaattggccgtgtagacgtccgtgtatttcatcgaatacggaatcattgcggcggagagctggctctggccatcggcgtattgcttggagcctcgaatggcttcctccgaagcctcggcggtcagatcatccaccagtccggtggtgccttgctgctggatgcggcgaatcacctcatccaacgcatcgaccgcaccggcatgctgatgtgcggcactgacgttgttcaccgcgttggccaagtcgagtacggcttgtgccaaaggcgtatccccggacagttcgccggccgtgcccatcaacgccggcaactgggtggaggtaccaatcgatccagacaggtgcgtggtatatgagcccacatacgcggccatatagtcttcaaacgtccgcttatgggcggtttcgcgttcggccactacggacttgtccagcgcacgctcattatcgcgcagggtttgaagctgctcgatgagctgttgatgctccccggaaccggcgtcggtcagtgaatcgaccagtatggcggcagaggcgacgagttgggcgacatccgtatcggcagcaggctgtgcggcggcattcgcggcatcgggattagcaccaaccaccggactgctggaattggaaggcaatacggcgagcgccacggaactcatggagaagtctttggcgttcatatagcagctgaattccaagccggttgcggcttttccagctgcggcgactacggtattggaaccttgcgtggttaccgtaatggagttgtcagcggaaacatcatcggctacctgcgtaggcacggtaaaggcgacaaccgggatcgtacggttggcctccttggtttgcggcttaatatcgatatacacgccgatcagtccagatgcgccggcaacctcgtttgcctcgacgtttggaccgtcaagcgagtaggtgacgctgactttccatggcagggtggcggcggaagcggggatacgagaaaccttgaacgtgccggaatcactattggcggaatcggtatcagtggaaccgctattgccggaatcggcactggcgccattgccggcgccgcccttccctaccacataccaacggaccggctccccttcggcatcggcgacggcgtacatatcacttgccgtagcgagcaccggaccgtaatcaaccggagtcggacgagacatccaagcaccgccgagaatcgaagccacgcacaatgcgcaactgaccagtgcggcaccacatctcatctacgtatcccattcatacagtcggccactatgggcattccattcccgtattaatgtagtcgctgccggcaacttgccctatagacgaatatccgaaaggtgcccattcgctacgggcgaatcaggcgaatacgtcgagtacgcccgggtcgccaccggcatcggcgatgcgctggtggcgcttcttggcttcggtaaccacgaattcacggtacatttcggcaatttccggatcaagcccggcatcgatggcgatgcggtggaggcgttcgatctgatagtcctcacgcttggtgtcttcgggcgcgaatccggcgttggctttgagcacgccgacctgcgaggtggccttgaaccgctcggccagtaatgcgatggccgccgaatcgatgttatcgatggtttggcgcagcgctttgatgcgcgccaccgcttgtgcggtttccgggtgggccgccgcctgggcggagtcgatggtggtcctttgccagccgctgctcgtttcgctcatagattcgaggatactcccgattgcggctttgcacgatgcgcaaagtcagatatctcagatgtcatagtcgccggtggggatatggctggcatccgcatcgccgaacatggccgcaccattgcccactcccaaaacaatcgaacccattgatacatctttcatctcatatatcgtcagcgtgcatgtgaacgttgacggcaatactacaactgcaatgtgatagttgatgtatttgcatcatatacggcaagggctgcgccccgtatcaatcggggtgcagcccttacactattgttcagcggtctggtcagttgccgttgaccgcgttgccggtgttggcctgctgcacgatggcggcgaggaagtcgcggttggtggcggtcttcttgaggcgcggcaccaacgtctggtaggcctgctcgggctccatgccgcccagcagtcgacgcagacggtagataatcggcagttcctgcgggttggtgatgagctcctcgcggcgggtgccggaagcgttgatgtcgatggccgggaacagtcgcttgtccgccagctcgcgggacaggcgcagttccatgttgccggtgcccttgaactcctcgaaaatcacctcgtccatcttggagccggtttccaccagcgcagaggagatgatggtcagggagccgccgttttcgatgttgcgggccgcgccgaagaacttcttcggcgggtagagggcctgcgcgtccacaccaccggacaggatgcggccggaggcgggggcggcgatgttgtaagcgcgagccagtcgggtcatggaatcgagcagtacgaccacgtcctggccgagctccacaagacgcttggcgcgttcgatggccagttcggcaaccgtggtgtgatcggaggccggacggtcgaaggtggaggagatgacctcgccctggaccgtgcgctccatatcggtgacctcttcggggcgctcgtccacgagcaccaccataaggtggacctcggggttgttggcggcgatggagttggcgatgttctgcagggtgatggtcttaccggccttcggcggggagacaatcagaccacgctggcccttgccgatcggggaaacgatgtccatgatacggccggtgagcttgttcggggcggtttcctgcttcaaacgctcctgcgggtacagcggcgtgagcttggagaactgcggacggttgagcgcttcttcaacgctttggccgttgatggaatcgatggcctgcagtggcacgaacttctggcgttggttgcgacgatcgccttcacgcggggcgcgaatcgaaccatggacggcatcgcccttgcgcaggccgtacttcttgacctggcccatggaaacgtacacgtcgttcgggccgggcaggtagccggaagtgcgcacaaaagcgtaggagtcgagcacgtcgacgatgccggccaccggcaccagatcctcctgcggctcttcgcggcggctatcacggtcattgcgatcgctacgattatcgcgatcatcatagcgacgatcatcatcggcgttgtcgcgatcacggccacgcatgcggcggctgcggcgatcgttgcgatcattacggttatcgcgatcgttgcgatcgctacggtcgcggcggttacgacgcacaaactcgtgatcgtcgttctgctcgccgtcttcggacgtttcctcgtgcttctgcgtgggcagcgtggccaggatatcgtcgaggtcacgcacggtttcttcgctgttttccgcagtgcgacgacggcggcgaggctgctcgtcctcatcatcacggactcggcgaatcagcggaacttccacgtcctcatggcgctcgcggcgacgctcggtaggcgctgcatctcccaaatcgagcgtggccagcagatcgccggcctcatcggccttcttgcgcggcttgcggcgagcgaaatcggactggtcgtcatcgcgacgatggcgggccgcacgcggttcggatgcggcatcatcggcggccttacgacgggtgcgtcgcggttcggtctcgtccttcttggcatcgtcggccacgggaagcggcaaatcgagctgcggttccgtggaggccggagccggcgactgggtggccacgtcagcattgtctgtggtattggcctcagcggcatcggactgcggagccttgacgaccttggcggttttggcggccttgggagcgcgcacggtcacaccggccggcggctctccaccattgcgcgccgcctgcagggtggcgagcagctcgggcttgcgcatggtcgacgtgccgcgcaggcccatctgtttagcgagctctttgagctcaggcagcttcatatcctcaagattctggctatttgccactggttgccctttccataccgaacagacccatgcctatccaggcgttaagagtgattattgcggttgcaccgctcatgaatgttcgctgcgtctctgagttttcacgaacttcgtttactgtacaacgccaactcgaccaacgcaaaacggcccgccgaaaaccaaaaaagctccctctgtgacgagggagctcaacaaggtttattcacttctcttcgtggtaggacttttcggtgttgacggaccacacgttcttcttggacgtcttgccggtcttgatgttgccgacggcctccatggcggtggccatggagtggtccatgttgttgtagcggtgctggccgttgcggcccacgcagtagaggttgccgaagccgtcgaggtactcgatgagctcgtccatgtgctcgtaggtgtcgaagtaggcggggtacgccttcttgacgcgctcacgatgggagtcgatgacctcgtccgggccgttgatcacacgcatgcgggtgagctcggagatcgcgaacttggtgacgtcctcctcgctcatgttccagaacgagtcgccctcctcgcagaagtactcgaggccgacccacacggtgtcgtccacgttcttgaccaggtacgggctccagttgttgaagatctgcagacggccgaccttgtagcccgggtcctgcacgtagatccagcagtccggcacgatcggcggattgccgagggtggggatgttggtggtgttcttgagcttcaggtgcttgaccagcaggcccacggtcacgaagtcgcggtacggcaggccgttggccacctcggtcatatcggccggggcgggcttggaatcagcggcctcgggatcgtcgccggccgcgtcgatggcgttgaccaggtccttgaccggcatcgaggagatgaactggtcgccggaaagctcggtgcggttgccctcggaatcctcgtacaccacggaagacacggcgccatcggtctggcggacctcgaccaccctggcgtcggtcagcaccttgacgccggcggcctcgcaattggactcgacggtctcccacagctggccgggaccgtacttcggataccagaactcctcgatcagcgaggtctcgacctccgcgttggagcgcttcctggggctaagcttctggaaggcgttcttgagcacgcccatgatggacaggcccttgacgcgctgggcgccccagtcggcggagatctgggaggggtggcggccccacagcttctccgtgtagccctcgaagaacatcgaatacagcttgcggccgaaacgattgatgtagaagttctccaggttgtcttccggcagcttgtggaacatagacttcaggtagctgaagccggccaccatggtgagcttgaagcccatggccttcaacgtgttggggctcagcgaaatcgggtaatcgaagaagtggcggttccagaagatacgggacacgcggtggcgcttgagcatcaccttgtcctccgtctccggatcggggccgcccggctccatgtcgtggtcgcggccgagcttcttgtcatcataggagggtgcgccctgcaacggcagaacggtcttccaccaatccatgatgcgttcgtctttggagaagaaacggtggccgccgatatccatgcggttgccgttgtgcttcacggtgcgcgagataccgccgaattcgcgggtcccctccagcacggtcacgtcatagttttccgcgccgccatccttgacgagttcccatgcggcggtaagtccagccggaccgccgccgataatcactacggattgcttgtcggtcattatgctccttataaacgcaaaatcagagacagtttactagaagccccggaatcgcacaccgaaagatgagcgaatgcttacagaattctcccgatatacgaccgatgcgccgtcttccatcagcagaaaggcgacgcatccaatcgtgaggtaggggtattcggcaacgctgcgtcacgcacagcgcggcgaatcggtttggtcttgggctaattcgtcagcgacgaaccttccatagattcagcgagattcctgcaagtgcaagcagcagcattttctatcagccgcaagcaaacaagacacacgatggcaaggttacgaatctgaacttttgctatgcgttgtatgaacaatgcgcgacgccccgccgtaagatgacggaatgccgcgcattgtcaatacaggctgtatcagacgattgcctgtcagtgaatatcgtcgggaatgtcgatatcggttttctggacttcttcgacgttcacgtccttgaaggtcacgatgcgcacggacttgacgaaacggctggaacggtagacatcccatacccatgcgtcagtcagctgcacatcgaaatacacgtcctgaccagcggaacgcacgttgaaatcgaccttattcgccaagtagaagcgacgctcagtctccaccacataggtgaacagcttgatgacgtcacgatattccctatacagcgcgagttcggcgtcggtttcgtaattgtcgagatcctcggcactcatgcttgtttactcactcactttccgtatcgcgtttgcggccgcggcccagcgtacgccaccatgcttcctttgagggcttgcgttccgcctggccgtacggccagttgctttcctcttcgagactgtggcgcgtgttcttctgcgtatcatcgtggtgcccggcctgtggctcgactggctgtgcggccgccggcgtctgggcctgggactgcacgtcactcgtcgtgacggcggctgcttcaccacgctgtgccggctcgggttccggcttgttctgctggatggcgatggaatgctcacgcgcggacagcgcttccttgacacccgggttgtcctcaatcaagtgcatgccaaaagcgtcaagcgaacgaatcggatcgtactcgtcgaccaacgtgtccatgacgataaggtcctggtatttgttgttttcgacatcccacaacgcgtcgcgcgaggtgccggacggcacgaagccgagcgactggtagaccgaaatcgaacggctgttcttttccggcacgctcacccagatgcggtgcatgcccaggccggccggttcgggcgcaaagccgtaagtcatcacacgcggcatggcgtcacgggagtagccgcggccacggtactcacggcccaagatgatctggatgcgggcggacttggaccagccgtcgatgtcgataaggaaaatcatgccgatgacattatcggtgctggccgcatcgagctgaccgtcatcgtcatggtcggcgtcagtcaatacggcccatgcgatggtgcggcgggattccgggtcgcccacgccggattcggcgggtgcctgaccggcttcccaggcttgggagcggcggacccatgtgtgtacgatggcgcgttcggtgaccgcatccttgccggtgatcttggatgcgccatagaaggcatctagttcatccaaacgagccaggtcctcgatggtggcggggcgcaggtgcaccatttcgccacggattggcggaatgacgatgctctgtggcagatcgcgcttcagttgcgcttcggtagccatgctcagcgtctcgttggttgcggtcatcggtatacatcccccggttcggcttgtttcggctcacggtccagtgccgaacatatcttactcgactgggtgaacgctggaaatgctctgagacgactttcttacagaatcaataaaggctcccgctggcgggagctgtccaacgaatttgaactggaggatttccctacaaataagtgctcccgctggcgggagctgtccgcgaagcggactgagggtggtcatccgtacatggcgaccaccctcagtctcactccgttcgacagctcccgccagcgggagccagtgaatctaatcagcccttgatcttgcccatgacgaccttggtgacggccttggcgtcggcctgaccgcgcgtggccttcatcacggcaccgatgatcacgcccatcggcttcatgttgccgctcttgagcttctcgacgacatccgggttggattcgaacgccgcgtcgacggccgcctcgatggcaccgttgtcttcgacgatcttgtagtcgtgcttcttgacgacttcatccggagtgccttcgcccttaagcactccttcgacggtctgcttggcgagcttgtcgttgagcttgccggaggcgatgagcttctcgacctcggccacatcggccggggtgatcggcagctcttcgagggacatacccttggcgttggcttcgcgggaaagctcgcccagccaccacttgcgggcaccggcggccttggcaccggccttgacggtttcctcaatcaggtcgagggcgtcggcgttgaggatgtcgcgcatctgcagatcactcaggccccactcagacttgaggcggttgcggcgctcacgcggcatttccggcatctgggccttcatctcctcgatgtgctccttggtgatgtggagcatgacgaggtcggggtccgggaagtagcggtagtcgtcggcatcggacttcagacggccgccggcggtggtctgcgaagcctcatcccagtggcgggtctcctgcagaatctccttgccgtcgtccagacgggcggcctggcggcggatctcgtactggatggtcttctcgatgccgcggaacgagttcacgttcttggtttcggaacgggtgccgtagggggcgtccgggctcggacgcagcgagacgttcacgtcggcgcgcatgttgccctgctccatgcgggcatgggagatgttcagcgcgcgcacgatgtcgcggatggcgcgcatgtaggcaccggcgatttcgggagcgcgatcgcccgcgccctcgatcggcttggtgacgatctcgatcagcggcacgccggcgcggttgtagtcgaccagcgaatgatcggcgccttcgatacggccgtcggcaccacccacgtgggtgttcttgccggcgtcgtcttcgatgtgggcgcgctcgatcggcacacggaacacggtgccgtcctccagttcgacgtccaggtagccattgccgttggtgggcttgtcgtactgcgagatctggtagtcacgcggcatgtccgggtagaagtagttcttgcgggcgaactggctccactcggcgatttcgcagtgcagggccaggcccagcttgatcgcgtaatcgacggcggtcttgttgatcaccggcagggagcccggcaggccaaggctcaccggggtcagctcggtgttcggctcgccgccgaactcgatgtgggccgggcagaacagcttggtgttcgtggacagctccacatgggtttccagaccgaagaccacatcgtacttcttggtggcatcggcgtacttcatcagtttttcagccatgatgttgtttctttccttccgatgctcacttgcccaggccgtcaagccacggggtcttgaggtcgttccagatcgggccgttccagctgtcttccagcgcggcttcgagggccgcagccggcttgtacatgacttcgtcgcgctgctgcggggcgatgaactggaagccgacgggcaggccgtcgtcggacaggccggccgggatggacatggcgggcacgccggcgaggttggccggaatggtggcgatgtcgttcatgtacatggccagcgggtcgtccatcttctcgccgaacttgaaggcggtggacgggctggtgggggccacgagtacgtcggccttctcgaaggcgttgtggaagtcccggatgatcagcgtgcggaccttctgggccgagccgtaccaggcgtcgtagtagccggcggacagggcgtaggtaccgaggatgatgcggcgcttgacctcgtcgccgaagccggcctcacgggtgtaggccatcatgttggcggcggtctgaggcacgccggtcggcggcatcacgcgcaggccgtagcgcatgccatcgtaacgggccaggttggagctgacctcggacggcatgatgatgtagtaggcgcccagcgagtagccgatgtgcggaaccgagacctcaacgacttcggcgcccatctccttgagcttgtcgacggcctcgttgaagcgggcctcgacgccgggctggaagccgtcgccgccgagttccttgatgaggccgaccttcatgcccttcagatcgcgcttggcgccttcgcgggcggcggcgaccatcgggcgcgggccttcggggatggaggtggagtcacgcttgtcgtggccaccgatgatctcctgcagcagtgcggagtcgagcacggtgcgggagaccgggccgatctggtcgagcgaggaggccatggcgatggctccgaaacgggagacgccgccgtaggtgggtttgacgcccacggtgccggtcagggcgccgggctgacggatcgagccaccggtgtcggtgccgagggcgatcggtgcctcgaatgcggcgactgcggaggcggagccgccaccggaaccgccgggcacgcgctcggtatcccacgggttgtgggtggtctggtaggcggagtgctcggtggaggagccctgggcgaattcgtcgaggttggtcttgccgagaatcggcatgccggcggccttgagcttttcgatgacggtggcgtcgtacggcggcacccagccttcgaggatcttggaggcggcggtggtctcaatgcccttggtgacgatcatgtccttgatggcgatcggcacaccagccagctcaggcagggcggccttgtcttcggcggacttggcgtcgaaggcgtcggcctgctcgagagccacatcgccggaaaccttcaggaaggccttgatggacggctcggcggcttcgatcaccttgaggtgggcttcgacgagctcacgagaggtgacgtcgcccttcttgatggcagcggcctgctcggcagcagacagtttgacgagagttgcggtttcgttgctcatcgattactcctcgcttcccaggattcgcggtgccacgaacatgccggcctcggtcttcgggccaccggcgagcgcctcttcctgcgcgagcggggtttcggcgacgtccgggcgcaggtaggcttccagaggaaccgggttggcggtcggcggcacatcgtcggaggcgacttcctggaccttgttgatggagtctgcgatgacgttcagttcgccctgcagacgggtgatctcctcatcggtgagcgcgattcgggccagatcgcccaaatgcacgatttcttcacgtgaaaatgttggcatggccataactatatgagccgtatgtgacacgcagttgtcgggaagcctcattttcccgcctactggagcccttcagcgaatcagaagctcaagccggtcgagcatttgccccgctgctggcttcttcggcggggcaaaaccgttgccggaccgcaagttcaccttactgagacgactcgcagcagagcaaaaccgcgagctgaccgatgaaacgccccgctcagccatcccagcaaaacaaaaccgcggtccaaccaataaaacgccccgctgagacgccccgcagcgaggcaacgccacggcccaaccgcaaatgtgccccactgaagtatctgcatggccaccctaataagctcacaatgagcccaaacacacctacatcgaacatatgaacgacaatcgccctgcgcacctcgccagttatccacattttgcatacccacccaaaagaatccacataatcagtccaatacggtcagatgcctgataatcaggcaaaaacacacatctaggcaccgaagctagaaccacataaccccagacagatagacaccgtgttcaccattggcataccgtcgaatcatgaaacatcacaaagcagtggacatactcatcacgaaggctgaagcaacgcaacagtgcgcttatggaacaaccaaggcacaccgctcggcgctggctcggcgcgtgcaggcgcgcgaactcaaacgtgtattccccaacatgtacgccgcttcggaatactgggattcgctgcaacccgacgaacgtatcagacatattgcacgaactcttcataacagacatccggattgggtgttcgccggggtcacggcagcggccatccacgattttgaacaccaatggcatcttcatgctggcaccatcactctcgccacaacatcacgaggccccaacgccagcagtgcaaaggtcaaacgcatcttcacgtcaagcagcacgccagaatatgccaatggactcccggtgaccagcaaagccagaacggtggtggattgcgggctgtccgtcgacttccgatttgcactgcccattatcgattcggcgctgcgcaacggcgtcgccatcacggacattctgaatgtgtgcagcactatgcgacgtgattgcacgccgatattccgcctactgcattatgccaatccggcgagtgagaatggtggcgagtcacttggacgaggcaccatcatcgcaggcggcctattagccccagaactgcaacaaaacatcaccgacccgcaaaccggtgctctgtatcgcgtggatttcctctggcggctacctgagaatcggcttatcgtgggcgaattcgatggctatgaaaaatatgtgaacccggatatgaatgaccgcaagggtgttcgtggtgcagttcaagcggagaaagaacgggagacggcactgtaccgggccaaagtcgacaccattgtccgattcacctatgaggaggtgatgcaacaacatcctttactcaataagctgcgggcagccggcatacctcatgctggaacagtgatgggagctggttaagcgcagtgaaccacggtggtcaaatccatggggtcagagtcaccagaaccatggtcactgcagaaccgccaaagccatagccatgacaaactgccaggaccatggccgaaccggcagaactgccaaagcagtaacccgcgttatttgatatctgatatccgcttttccggtgatgatgagaccgccgatccatgcggcggcagcccaggcgatgagaatcaggccggactgccaccattcgggaatccagtagtccggtttaacggcttcggccagtgtggactgcgcggagctgctgatgcctgcggcgagcaggatgccgacgatgccggcggcaaatgcgaattaatgccgcggcgatggatttggtggcgtagatcatgcctctaatgtggcccatattgggcagatgcggcgggattgtcgatgcatggctacacgcctgatacggcgtgttgggcaatccatgcgtgcatggccacggccgccgcagcgcctgcattaatggagcgcacggaaccgaattgagagatgtagaccacatcgtcggccaattcgagggccttctcgctcaatccggggccttccgcaccgaagagcagcaggcaccgcttggggaaggtataggtttccatcggcactgcgccgggaatgatatcgagggcgatgacgcgggcggcttgaagctccttgatgcgcgcatcacaagcatcgatttcggccagcagctcatgaaggtgcttgttgtctccatccacagccacatcatgcgcatggatggcggcgacaccggccttggctcgttcataggcgatttcaccggcgatgcgatgatgccagctttccaccagttcggcgatggaggggtggtgttcgacgtgctggtacagttcggtcatcaacgcgcccttgcgattccacttatgtggaccgacaatgtgtacgcgcttggcctggaaggcgttggcggtgcggaccatggaaccgatgttgaaatcgtgggtccagttttccaccgcaacttcgaagtcatgacgccctcgagcgtcaagatcggccttaatggcagcgacggtccagtagcggtaacgatccaatacgttgcggcggtcgccgtcgttcaacagcaccgagtcgaaacgaccgtcataattcggagaagtcggatcgtcaggacgaggctcgccgggatgggtctcagaccacggcccaaggccgatttcacggaattccggttcacctgaagctttggcagccaaagaaatctggttgggtgcgtgcaatctttctcctcgataacgctattcaccggttcctcttagtcaacttcgcggctcagcccggctgactttatgcgaggaaagtcaaaggtggatttaccgcagttcggattcgtcgaagacctggatgaaggggagcgtttgctcgtcgccggtggaggggttgaccacattgatgtctttggcaccgccaccgaccagcgaggcgatggccacgaccttggcacccagctgctccactatgccaaagtcgaggctcagctcattgccgttgcgcagggtgaccagcgagctggtctgcacgtacgacttttcggacagccaagcatccaacagcaccacacggcggccttcgatggaggggcccttgatggacgggtagacgaagtccatcacgaatccgtctaggtcctcgccacgagaggcggcggcctggatcatggcggacaccatgggcacagatgctgcggtcaaggcaccaacagcatcgaagtcatcaaccgaatagcccgcatcttccaaagcgtcaatcagtacatggcccatgacggtggcggcacggtggtcaaaagtcaccgcggcaagttcggagaacggacggcccaccacatgctccctcagcaaggtggctagctgttcacgcggctccagcatggcaaagtcattatggctcttcgcgacggcgaggtccggggtaccagtggggcggaatccagattcagtcatgactccagactatcgcctgaggcagtcagatgagtatcaccctcatcggccggcaccacttcaggggcggacagttcgctcacattgcctttgtctgattcgatgatcggtacttcctcgatgatcttggtcggttcgattttttgcagcttgcgagcggtgggcaacacacggcgttccaagctggacgcgaacttgttgtaggcgctgaccgtcttggtgatctgggtgcccaatttgatggcataatcacccaacgtggagaaccgttcgtaaagttctcgggacaaatcgaacagctgcttggcgtcatcggtgagcgactgctgctgccaggcataggccacggatttcagcacggcccacagcgtgaccggcgaggtgagcgccactttgcgagagaacgcatcatccatcagtgtggggtcggcttcgagcgcggcctgcaacagcgcctcattggggatgaaggccaccacaaaatcaggtgctacatcaaaggcattccaataggccttttcgccgagagcacgtacatgctcgcgcaacgccttggcatgggctcgcagcaaatcatcgcggcgggcaatatcctcggggctggcggtgtccgggatctcgcaggcacgctggtaatcggcataaggcactttggcatcaatcggaatggtcttgcctcccggcagatgcacgatcatatccgggcgcaacgtacgtccatcggcatccgtgaccaccacctgaatgtcgaaatcgacatgttccagcaatccggcggactcgacaatgttcttgagctgggcctcgccccacgcgccacggaccttgttgttgcgcaatgcggcggacagggaactggtttccttgtccaaacgggcctgctggtcgttgagccccttgagttgggctcccaatgcgcccatttccctcttgcggccctcttcgatctgcgtgaccttgttctgcaaggtatcaagatttttggccactggcgcaagcgcctcgagcaccttgctctgttctttcaaacgtgcttcctgttcagcacgcttggcctcggcgtcccgagcatccgcctgacgcttccgttccgcctccgcagccgcacgctcacgttcctgctgaatgcgaatctgctcagcctgctgcgcctgggcaagttgtgacttggcgaaagccaattgctggttcacgccttcaatctgagcctgtgcggcagcattgcgcgcgctaagctcagcattctcgaatcgcgcattctccagcgaggtcttggtctcctccagctcctcgcttttgacgcctcgagccatctcctgacccttatggcgccccagcacgaagccggcgaagaggccaagccctgcaccaaccactagcacgacgatgacgataaccacggttcctatttgctcaaacatggtacctagtatgtcatcgatggtgaatgacggtaaatttttaccgaattcgacggtttcaagccgttaaacggatgctcagcagcccacattggacatttggactcatcgcagtcgagcatcaaccgttattgcgctgtgtcacacccgaacgccggatgtccttccatgatttgccagcgcgcgtcatcatgcggcagaactcgtcacgatttgacgagacgtgcgatggccgcggaagcctccgcaagtttttcatcagccacctcgccgccctggaccgacgcctgccgcacgcaatggttgagatgatcgtccagcagcaataacgccacggatttcagcgccgagttcgacgccgaaatctgtgtcagaatatcgatgcagtatttgtcatcctccaccatctgtgtgatggcgcgcacctgcccttcgatacggcgtaatcgtgcgatgaccttggccttgtcttcgtcataaccatgcatcgcaaccccctgatacttatccgtcagctgaacacaccccatcatataccctctaggggtatagggtatacactgttgttcagtgcattaggaatgggaaggaacagttatggagttcagcatcttctcgaccgccacggcgctgatagtggcggccgcattgacatggctggtcctgcgattcttcttcggaacgcagaaggcaacggccggggccatggacgcttccggcgaacgccaatccgcaacaatcactgtcaagggcgggtactcccccgccgtggtgagcatgcgtgcgggtacgccgatcacactagccttcgaccggcaggagaccggcgaatgcacctcgcatgtggtgtttgctgatctgggacttgacgccatgctgccgggcaacgccaccaccgacgtggaactgccggcgttgccgccgggcgagtatccgtttgcgtgcggcatgaatatggtgcatgggatgttgaaggttgagggagaggacggctcggatgagaacacgccccttcctcatcctgatgcttcgtatacggcacctaccgccgtggatgcggcggaggccgatcggcgagaggcggctgaacgcgccaatgagatcaaggcgctgacgaagctggtgattgtgggcgcggtactgacgttgccggtattcgccgtcaccatgctgcatatggccaatcccacgctggtgccgcattggatggtgaacccgtggttgcaggccatcctgatcacgccggtgatgttctactgcgggcgtccgatccacacggtcggcttccccgcgttggcgcatcgctcccccgacatgaactcgctggtctcactgggcacttcggccgcctacctgtattcgctggtgacctgcatcgccccgtgggtgttcccggaaggttcgcgcgaaccgtatttcgaatcggttggcgtggtcatcaccttggtgctggtcggccgcctgctggaaaccaaggcccgcgaaggcaccggcaaggcggtgcagtcgctcatcaaactgcgcccgcgcaccgcgcacaaactcaacgccacttccacagacaatgtggacggcatcggatggcgcaatccggcgtatttcacggacaccgacatcgacgccatcgccaccggcgacctgctggtcgtcaagaacggcgagcgcgtgcccacagacggcatcatcgtggccggcgaggcgcatatcgacgaatcgatgatcaccggcgaatccaagccggtttccaaaaccgtcggcgatccggtaaccggggccaccgtgctgctcaagggcgactgcgtgatgcgcgccacccaagtcggcgcggacacggtactctcgcagatcgcggcgatggtggcccgcgcccaggcgaccaaggcgccggtgcagcagctggccgataagatcgcccggtatttcgtgccggcggtgatgatcatcgccatctggacgttcgccatctgggtgtcactgggcccggtgccgcaactggcgcatgcgctggtcaccgcggtcagcgtgctgatcatcgcctgcccgtgcgcgctgggactggccacgccgctgtcggtgacggtctcactgggcttgggcgccaccaacggcgtgctggtcaccagcgccaaggcgctggaacaggcgcgtcgcatcggcaccgtggtgttcgacaagaccggcaccatcacgcgcggcgtggtggacgcggccgccgactgggacaagccgagctacgagcaggacacagtcaaggaaggctcgcgcgaggccatcgcggcgttgcgcgcacgcggcatccgcacggtgatgctatcgggcgacaaggccgaggtagccgggcgcatcgcccgcgaagtcggcatcgacacggtgatctgcgaggtcaagccggacggcaaggcctactggatcgccaaactgcagcgcgaacgcgacgaggccgccgccaagtccgcggacggcacctcccgcacggccgcgcaatcccgcactctgattgcgatggtgggcgacggcatcaacgacgcccccgcactggcccaggcggatctcggcatcgccatcggcaccggcacggacgtggcgatgcagtcggcggacgtgaccttgatgagcggcgatttgcgcggcgtcatcaagaccatcaacctgtccaacgccacgatgcgcaacattcgggagaatctgggctgggcgttcggttacaacgtcatcggcattccggtggccgccggcgtgctctacccgttcaccggctggctgttgagcccgatgatcgcgggtctggcgatggcgttgagctcagtgtgcctggtgctgaacgcgaacaggctgcatgggtcgaacatcaacgcgggcgttgtcgatggcaccgctggctcgggcagcagcacggcggatgtcgaatcaaccggatcggccgaatcagccaacgccgccaacatcaccggctccgccacatccaacgcgcctcacgagccaaccgtcatcatcgacgatcgcaccacgctgaatcacaccaatcacgcatctgaccaatccaataatccaaccaacaaggagaacactatggatatgggaatgcacatgcaccacaccgcccccgcggacggcgaaaccgccatcgacccggtgtgcggcatgaccgtggcggtgaacgccgacgcgatcacgcgcgagtatgagggcaagtcctattacttctgcggcgaacactgtgccacgaacttcatgaaggccccgcaggtgttcctggagcagtagtctctgcgtttacctgattcaacgacaatggcctccgcccaaaacgagcggaggccatttgcatatatgaatcaatcaacgaatcagctggcgaagaagaacacgaacagccaagcgccgatgatggcgccgacgatcggggccacgaccgggatccaggcctcgccccagcgggaggagcccttgtgcgggatcggcagaatggcgtgcagcagacgcggcatgaggtcgcgagccgggttcaggccagggccggtcgggccacccatggaggtcacgaggccccacacaatgaagccgacgacgatggaggcggcggcgtaatcctgcttgccccaagccagggacaggcagcacagggcgccgaagacgagcaccagggtgccgaacatctcgttgaggaagtagttgaccttctggttgtccgcgtcggtggtgcagaaggtgccgagaatggcttcggcgtcctcggtctccttgtagtgcgggtagtaggtcaggtagacgatgaactggccgagcagggcgccgagcagctgggcgacgatgtacggcagcacgtcgctccacgggaacaggccgttgacggcctgggcgatggtcatggccgggttgatgtgcgcgccggagacgctaccgaacataagcaccgggaacatgacgccgaagccgtagcccatggcgatgttcaaccagccggcgtggtgacccttggtgttcttgagctcgacgttggccacggagccgttgccgaagatcatcagaatggcggtgccgaagaactcggcggccagcttggtaaagagagagtattccactgcttcttcttttctcttcgccgcgcaacaggcatggctgactgttcacggcattctgtgtgattggaaatccgttcgcggagccggcgacgcgatttacgctgggcgcgaaagcaaacgtggcgattgtacactttgccccacgacgaaatgctggcaggatgcgatgtcgaatgtccagccgaatgcaatgcccaaaaaagccaccggaatcagccgaagcgaccttgactctcagtggttgcgaatgacgttgcgcaggggtaggacgctggtgggcgagacggacagttcgtcgattcccaggcacaggaacgtatcggtcaggctcaggtctgcgccaagctcgccgcagatgccgcaccagatgccatgacgatgggcagcctcgatagtcatctggatcatgcgcagcacagctggtgaatgcgggtcggcaaagcgttcgaggctcggggtctgacggtcacaggccagcgtgtactgggtcaggtcgttggtgccgatggagaagaaatcgacttcggcggccagctcgtcggccatgatgaccgacgcaggcgtctcgatcatgacgccgatctggatactctcgttgaagtcggtgtgctcgccgcgcagctcgcttttggcttcttcaagaatccgcttggcgtcgcgcacctcctgcaccgaggtgatcatgggcagcataatggcgatattgccgtatgctgaggcgcgcaacaatgcgcgtaactggactttgaaaatctccgggcgggtcaggcagatgcggattgcccggtaaccaagcgcggggttatcctcgtggtccagattgaagtagtcgacctgtttgtccgcgccgatgtcgagtgtgcggatgatgaccggacggtcgcccatctcctgtgcgacttgtctgtatgcatcgaactgaaattcctcggtcggccagtcctcgcgttccagatacaggaactcactgcggaacaagccgatgccctcagcatcgttggccagcacggcggctacgtcagagggacggctgatgttggcgtacaggtggacccgctgaccggacttggtttcggtgggcttgcctttgagcttcggtagtaggctcaggtgttcctcagcttcggccttcctgcgctggcactcggtcagcgtggcctcgtccgggtcgacgaacaccgcaccgctggcgccgtcgattacggcaacgtgaccgtcatcagtcgggtcgaaggcgtcgccgataccggtgatggcgggcaggcccatcgtgcgcgccagaatcgcggtgtgcgagttcgctgagcccttggcggtcacgaggcccaaaaccttagcgcggtcgagctgcgcggtctcgctgggagcaagatcttgggcgaagatgatgtggctttcgccgttctgcgcaatcccgttctgcacagtaccgttctgcacagcatcgccttgtatactgccatcctgcgccgtgctatcgcgtttgccttgcagcacgttcatcacgcggcgagaaacatcctcgacatcagcggctcgagcctgcatggtcgagctatccatcgcagcgaacatggcggcgaactgttcggcgacgctcttcaccgcaaattcggcgttcaccttgtcttgcgcaatcaaaccttcgacgcatcccgcatagtccgggtcctggagcataagccgatgggcgtcgaacagctcggccttgttttcgccgaactcagcggcgacgttgtcacgcagttgcttgagctgagcgacggccatgtcacgggccgcgcggaatcgatccatctcagcctgcggatcgtcgattacgcggcgttctacagcatgatcggcggcggcgagcacgcggaccgtgccgatagcaatgccaacggatacgccgacgccctgtatcgttctcattacaggtgctccttgaggaatcgctcgaactctgcggcagcgacagcttcatcgttgccctgcacccgaaccgtaacctcgtcaccttgttgaacatcaagtcccataacaccgaagatacgcttggcatccacggatttgccgccgtaggcaacggtgatgttcgactcatattcccgcgctttggcaaccaaccggccagctgggcgggcgtgcatgccttcggggtcggatacggtgaacgcgaatatctgagacatgacgccgctccttacacgtccggccgtcacgcgcgaagacggcctttccgcaccagctacggactgatgctggaaaaaacaaaaaaccggaatctttcgattccggttgtctgtgcccccgcagggattcgaaccctggacacgctgattaagagtcagctgctctaaccaactgagctacaggggcttggttagatgttgaagtgttccttgcaacaggtgataaatatactcagatttgaagcggatgcaactctcggcgtgtcgcgcctatttccagcgtttttaaacaccaatacaaaaatcccccatgcggcgcgaaccgcacgggggatgatgcttaagctcagactcttggtctgtgtgattccagcactaggccggaatgactcactcggccacgaccttcacgaagaaggaagcggtgatctccgggtggagggccaccttggcggggaagtcgccggtggtcttgatggtctcgacctcgatggccttcgggttcaccgcggccttgtcggacagagcgatggcgatggcctcgttggagataccaccgaacagcttgccggactcggacaccttggcggcgatctcgacggtagtgccctcgatggcggccttggcggcgacggcgtcctcgcgggtggcgacggccttggccagacgagcgcgcttcatagcggtgatctgagcctcagcacccttggtccacgcgaaagcgaggccctgcgggaacaggtagttgcgggcgtagccggccttcacgtcgacaacgtcaccggagtggcccaggttggacacggtcttggtgagaataaccttggtttcagccattgttcaaagcctccctaactcagcgacccgaggtggcgtacggcagcagggccatctcgcgggcgttcttgatcgccttggagagctcgcgctgttcctgcacggtcacgccggtgatacgacgggaacgaatcttgccgcgatcggaaatgaacttgcgcagcagcgcgacgtccttgtaatcgatctcggtgaccttggcggccttcagcgggttcggcttcttcttgaacggcttgaccggcggttgcggcctcttacgtgacatgatgttctccttataaatcttgatattgattgctgctggcagcggggaggtaagtactgatcagaactccgggtcggaatcgtcgccgccgccgaaatcggaggaagcgccgaacgtagagaagctaccggcatcagatgcaccggcattgctccacgggtcggccgcaggagcggacgggttggcgggagcggcaggctgctgggagtatccagcgccaccaccctgatagccaccgttgtaaccgccctggccaccggcataaccaccttggccaccctggttgccatagccctgattgggttgctgactaccctggaaaccaccggaacgaccttggaagccgccctgaccggacgactggcgggtcacctgtgcggtggcgtagcgcagggagggcccgatttcatcgagctgcatctccacgacggttcgctgggaaccatcctgtgcctgataggaacgctgctggaggcggccggtggcaatcacgcgcatgcccttcttcagggactgggcgcagtggtcggccaggtcacgccaagctgagcacctcatgaacagcgcctgaccatcctcgaactggttggtctgacgattccaggttcgcggggtggaagcaatcgtgaagctcgccacggtcgcgccgctgccaatagtgcgcagctcggggtccgcagtgaggttgcccacgatggtgatgacggtttcgcctgccataacggtccttcttacttaccttgaataccagctgttcagctgactaaacgcttgattcagcccttacgaaggatcttcgtacggatcacggattcgttgaggttcagaacacggtcgagctcatcgctggtagcgggctcggcggtgtacttcaccacgacgtagttgccttcggtcttaccggcaatctcataggcgagcttgcgacggccccagtaatcgggctcatcgaaagagccgccttccttggtgacgagttccagatactgctcggtcagcttcttcagaccgcgctcatccagctcaggatcggcgatgaacatcagttcgtacttgtgcgcagacatcacccacctccttcggactattcggccacggacgttccgtggcaggagtgtgtatgcgtgttagcccatgacgcagcaccaaaccggcaccgcatcttcgggcaacttggacagtctatatataaggcgggacagggtatggccatattcctgccggtttcgcgatgcccaccattttggccaagcccgcgcagccaagcccgcgcagccaagcccgcgcgccaagcccgcgcgccatcacccagtattgtccatttcgagcctcgccctatggtcatggcgctgattttgcgggtacgatagtgctcgaagaagcatcagaagaaagggggactatatgttctgtcctaattgtggcgcagctgtgcgcgaaggagcgcaattctgcggttcctgcggcaaccatcttgccgcggcgtcagctccagcagcagcgacgcccgccgcacccacgcccggtcaacccaccggcgccgttcccacgaccgcacagcccgcggctcccgcaccatcgattccgttgcccggcgcagcggctgtgcagccgacgcctcagcccgctgcacagccgcaggcccagcccgcaggcggaccggcattcaccgcaccgaccacggccattccgaacccagggcagcccggcccatcgtcggctcccgccgctccggcacaacccatctcttccagcccactggtcaaggaactgttcggcgcccccaacatgcagaccatcggcattgcggccggcatcggtacggcagccgccttggtgctttcgattttccctgcaatcgcaatgaattccatgagcaccgcagcacccagcctcggggccgattcaacactgaaccaagccgttggcggcatgttcatcaccggcaacggcatgaacttcttccactacctgttcctatcgttggtcatgggcctgtctggcggtattcatttcgacatcgtcgacctctcatcctccagcatggacgccagcaacatgatgtcgtacccactggggctcaccggcttggcattgctggtcggcaccgcattcggcgcattcatgctggcccgttccaagagcattcgattcaagttcaccggcctgatctccggctttatcaccggattgctgccggccgtggtcatcacgctgcttgcggccatcgcggcggcaccactcgccagtggcaccaccatcgtggccaaggtgaccggcgccacagtgcgtacgttctttatggcctacctgctctccgcgctcggcgctctggccggctatgcactggcccaatatgcttccgattccaagaatgtgttcggagctacttggcagtgggcacaccgcgttcgcggatacacgcgcacggtggtcagcgtcttgagcttccagctggctttgctcttcatcgtcggcctggtggccctgttcgccgtggcattctcctcaggtcagggaatcctgatactgacgttcccggtcacactgctgatgatcggcgagttcttctttacctggggaaccttcggcgccattacactgaccgagtccggtcagctgccgcaggatctcagcctgttcagcatcaacctcagcgttaccgtatggcctatttggatcctgttcgccgtgttcctggtcctcaccttctacacggcattgcgcgtctccgcacgcaacctgtacgaccgtgcctacatgggctggcagcactgctggaaagccccgatcgccatcatggtgttctgggcgattgccacgctgctgatgggtactatgggcaaccgcacctccgtcacgcaagttcagaccatcggacctgccatgtggtacttcctggtcatgggcctgtgggcattcctggttgaggtcgttgcgctgacgttcggcccgaccatggtggtttccatgccgggactgcgggcactgcttgtaggcggcactgtgcgtgctacgcctcagccggtggtcgactacatctatgccagcggcgcaatggtcggcaagtggcccacgtggggcacgccgagcgccggtgtgggtacgggcgcaaacgctgcgcagcctcacgtcaacgtcacgccgacgtccgccggccagcctcctgttgctggtgtcggtgtacccgcgcccgctgccccgggtgctccgggcaccacattcgcaaccgcggctcccaccactcccggagcggcaccggtagccgcacctggcgcgacctccaccaccatgaatgagcagcagaagaagatcttcatcatcgttggtgccgtggccggcttcctcgtactgttcggtatcgtgtatggcgtgctgtcttccgccgtgttcagcgcgaagagcgtggcgaacagctatgtggccgccatctcctccggcgactacgacaaggccaacaccatcgccgatcctcacgtggatacgaaccagcgcgcactgctgaccagcaaggcatcctcgggcgagaacacgcacatcaccaacgcgcgcatctcgcagacttccaacaatgccgatggcaccgtgagcgcccagctgacgtacacgcttgaaggcaaggaggtcaccggcgattccatcaagatggtggccaacggcagcaagttcctgatcttcaagaactggaccgtcgccgaaccgttggtcaagaccatttcggtatatgcgccaagctcgctgggcagcatcaccgtcaatggcgtgaccgtaacgcccaagaacgccgtgaacaacgacgcggacgaaaccggcaactaccggctcaaggtgtaccccggtgtctacaaagttggcgtggtgaagtccgactattacaccgccaagaccgtgtctctgagcaccaacagctccgatagcggcactcttgacgctcagcctacggacaagttgacgtcggaaatcgacacggcggtgaagagcaagctggatgaatgcgcggcttccaccgatgcggaaccgcagggctgcccgttcggctactacacctccaattccagccgataccgcaacttcaagtggacgattgacggttatccgaaggtcaccagcgtgagcctgtcggatagctcgttcagcaccgacgaaggtgatgtgacggcgaattacgagtaccgttacagcgatggctgggaaccggaagacgattccagcactttctcggtatacggcaccttcaccatcaaagacaataaggtcagtgtcgagttctccgaataatttcggcaatctcaacactcttacgaaataggcaccccgccgtggcgttcgctgcggcggggtgcttgtacactggttaaggcgtaaatcacacagcgactcaaacaaaggatgcgaacgcatgtcggcgattcttgaaggcactccggataaacgactcgtattggtcacgggccgcgcctaccccgagctagctgagaaggtggccgaatgtttgggaaccgaaatcctcgaaaccacgtcctatgactttgccaatggcgagatgtacgtgcgtttcaccgaaccggtgcgtggtgcggacgtgttcgtgctgcagtgtcattcgggcgatatcaacaagtggatcatggaacagctcatcatgatcgacgctttgaagcgcgcctccgccaagtcgattaccgtggtggcgcccttcctcggctactcgcgccaggataagaagcaccgcggtcgtgagcccatcaccgcccgtctgattttcgatctgttccacgccgccggtgcagaccgcattatgacggtcgatctgcacgccgctcaggagcagggtttcttcgatggtccggtcgatcatctaaccgccatgccggtgctgctcgattacgtgcgttccacccttgatctgggcaacaccaccatcgtgtccccggatgccggccgtatcaaggtgtccgaacagtgggccgccaagctaggcaatctgccgctggcattcatccacaaacagcgtgatattactcgtccgaaccatgccgaggcacatggcattatcggcgatgtcgacggccgcgactgcgtggtcatcgacgacatggtcgataccgccggtactatctgcgaagccgtgcgcaccctgaacgaatccggcgccaagtcggtgacgctggtcgccacccatggcctgctctccggcccggccgtggagcgcctgtctcactgcggcgcgcatgaaatcgtgtttatggacaccgtgccgattcccgaagagaagcgcctgccgaatatgaccgtactgtcttgcgcaccgctgctggccgcgggtattcgctccgtgttcgaggaaggttccgtggcgattctgctcgacggcctgcccgaggacatgcgtcc

SEQ ID NO: 3992 - DNA, 6628 bp, Unknown
  R22_24m  MAG No. k141_47839
catggccgacttcgctaccccggcaccagacgatccgggttggaaggtgttcgagcgttaccacatcgaccgttcgaagcccaccctgctgttcgtgggccgtatcacccgccagaagggcctgccatacctgctcaaggctttgcacctgatttccaaggatattcaggtggtgctgtgcgccggtgcgcccgacaccccggagattgccgaggaagtcaagaacgcgttcgccaagctggacgaggagcgcggcaacatcgtgtggatcgaggaaatgctcccgaagcccgagctcaacgcgctggagcacggctgcgacgccttcatctgcccgagcatctacgagccgctgggcatcgtgaaccttgaggccatggcctgcggtctgccggtcgtcgcctccgccaccggcggcattccggaagttgtggttgatggggagaccggctatctggtaccgatcgaccagctgcacgacggcaccggcacccccaccgatccggacaagttcgtgcacgacatggccgccgccatcgacaagatcatggccgaccccgagctcgccaagaagatgggtcaggccggctacgaacgcgcccgcgacgtgttcagctgggagaccatcgccgacaagaccgtggaagtctaccagtccgtgctcgacgagcagaagaagtaagtagcgctgcaacgagtgctcccctcagtctggcgcaggtgactgaggggagttctcagaccgcgaatcatagttagtatttcactcatgacaaacaccgtcctccaactcgacaacgtcgaattccggcgtaaccgtcgtgtcatcatcaccgacgtgaacctcaccatcaacgcgggggagcgttgggtgctgttcggtccgaacggcatcggcaaatccaccgcggtcgacatgctggccacccgcacgttcccctcggaaggccgcgtattcatcctcggccatcaactcggcaaatacgacgtattcaaactgcgcacccgcatcggtctcgcctcggccgacctgggccggcagttccccgagttcgaggacccgctggacgccgtggtcaccggcctgtccgccgtgaccgggcgctggcgcgacacctacacgcaagaggaatacgcccgcgcccgccagctgctgcgcgattttcgcgtctcctatctggaaggcaaggagatgtggcgactgtccgaaggcgaacgcacccgcgtgttgatcgcccgtgcgctgatgggcgatcccgagctgctgatcatggatgagccgactactggcctcgacttgggtggtcgtgagcaggtgatgcgcacattgagccgaatcggcgaggaaagctccgagcgtgccgtggtgctggtcacccatcgcttggaggagattccggctggtttcgaccacatcgctatcatgggacgaaagccgattcccgctgaggacgccaccgaagcgggcgtggattcaatgggtaatcccggtgctggcaccatcgtctacaccggttcgttggagaatggcctgaccgacgaacgcttgtcggaattgttcggtatgcccatcgaagtccagcacacccacggccgctgggccgcctacgccgtgtgatgcttgtaggtttttaggcgggattttcttcgccccctctggaggggctgtcagcgtaagctgactgggggaggtccaaccagttacgaaggcaaccatgacaaccaatagcaaactcgtattcatcgatatcgacggcaccctagccgacgaaaaccacgtcgtacccgaatctgccaaaatcgcttgcaaacaagcccaggccaacggccacaagctcttcatctgcaccgggcgttccgtgccgaaaatcgaacgcagcatcctcgacctcggtttcgatggcgtggtttccgtggcgggcgctcaggcgaatatcggagacaggctgctgttccagcatctcgtccctcctgaagcggtcgatgcggcgatggcgtattttgccaagcatcatatcgagagctaccaatggcaaggtgcggatggcatgtacatctcggaaggctaccgtcaacatctggaatcgaaaggcaagacctggaatcgtggcgaattcgcgcgattctggcacctgttggatgaggtggaggtgccggctggctcgactttgggacagacgattcgtgtgagcaaggggtcatacttcacctcgccgaatcctgacgtgactttcgaggagacccaacatgatttgagcccatggtttgagctcgtgcatggttcgtatgacaagatttccccgaacaatggcgagttgctgattaatggcatcgacaaaggtaccgctgtgcgcgacgtggcttctttgctgggctatgctattgccgacaccatcgccatcggagactccgacaacgacactgccatgctcaaggccgccggcacatccgtagccatgggcaacgccattcacggcatccaagccttctgtgacttcaccaccaccgacattcaccagaacggcctggccaacgccttcaagacgttggaactggtgtgaggctatgtcgtttgctctcagacgaaggatcctttcgtgctgtagtagtgagaaataagttgaatatatactgaacggggaaggagggaacgatcttatgccgacgataatgaaagaacagatggaagtcagcattcgtgtcactcctcagcaggtttttgatttcatcaagcagcaggtagacaccaatggaggctttgatgaggatactcgaccagtgcgggtgcatgattcagcttatttgaagcaacttctggagagctgatgagctccgccgtatgtgtcattttcgattgcaatatttatatcgatgtggcacaacgtatgctgtgccgagcatagagaattgtgaattcaaaatggtttgttcatcatgcgaagatagtggtcatctgtccgtcgcggttgcgcaatttacggtggcggaggagccggaacggaatctggagattattgacggatttgcgcgtgatgctgcgattgacggatttgcgcgtgatgctgcggcgggcgatagggaagctgatctcattactgctgagctgagtcgtgagtgtcttgattccgcgcgtcgaacattgccggtgttgcagaatcgccgttttgccgatccgcagttgtgtgactgacctctgaataactttactggcgctgttgataagggttctatgatgggaatcatgaccactactgttgatagctctgattcaatgccggaacttctgcaagaggggagcgcggcgcccgatttcactctgccggcggttatacctgggtttacagagagcggatcaatcaacctgtctgacgtgcttgatgccggccgcaaggtagtgctgtatttctacccggccgcgatgacgcccggttgcaccaccgaggcttgcgatttccgcgacaatctcgcccgattggcgtcgaaaaacgttacggtgcttggcgtctccaaggactcgcttgacaagctgcgcaagtttgcacagcgtgatcatctcacgttcccgctgctgtctgatcccgacctgaccgtgcacaagctgtacggcgcatacggcgaaaagaagctctacggcaaggtgcacgtaggcgtgatccgctcgacgctcgtcatcaatcccgatggctccgtggcgattgcgcgctacaacgtgcgtgccaaagggcatgtcgaatcgctgctgaaggcgctggacaagctggagaagccggagaagtagtgcgttctcgttgttcggacacggtggttcgtgcatagcagctccgcgcggtatgtgccgtatgaaccactgccgtatgaaccaccggttgacttctcggactcaccggcaaatagtgagaccgtgggcgcgcagtacgtctatggctggcatgtaatcgagcgatgttgcggtgggattgagcatcagttcgcggatggcggcggatgctgaggactcgcttgtcttcgaggattctgcggccgggaagagagcgtcggcgattagggagatgatacgggaacgtgcatcgccggcattggcattgttgctgctgctgccggcgtcggtagtggcggagttgccaatagtagcggagctgttttgtagagtcgtatccaacgctgtgacaagcggctccaggttgttctttgtcgcctcggcaatgtcatcgagctgatcgaataaggcgaacagccatgcacgacttcgctcctcatcgttgccggtcgcaagcctttcattggtgacgcgcacgagttcgtcaatcggtactgctggcgtctttgctggatcgcgatgctcacggttgtcttcgatatcgcccataagatgctggatttcgcactcgtcctgcaatacggtggtctcggcaaatgcggtggcgatggcgtccgcatcgatgaacttgccaccttcggactggaagcgcacgcgcttgggctcactgtaataatgcgacatgccgaatgtgatgtactgaggcatctcattctgcaattgcttgactgcatccgctaccttgcgcatgtccgcaagctgctgatgcaccacaataaaggcaagtattgctttggcatcggcgagagtgagcgactgcccgatactggctccatgatgatgttcgtgatgcgcaaacatgttcttcagcgaatcaaacaatcccataatgtcctcctttgaactggggcacaatcggctacatctgccgcttactgtagtcctgaatatgtgggaatggtccatggaacgccgaaagcgaatattgacgaatgcgtgtgctgagttcttttgacttagatgattggaggaataactgaggaaatgaataacctcccagcgattttaaaaagcacttttgcatgattagcgaggcaaatcctctggtgaatggagattttggctcactgatgggcggtcagtgaagtgttcctacggttgagttgagcttttgcttcgctgagcagtctcagtggggcaaatcttcggatgggccaaggtattgctttgctgagaggccgcttagcggggcttttcctctactggctctctgggttgcgccactggtgatgattcagcggggtgttccctcaggtttgtcgaggtttcgcttcgctgaacagatctaggcggaacattccctctagtccgtcgaggttttgccctgttgaagtagtcctgagcggagcaaaccatcgattaggaagaggttttgattcgctggtgagttctgagcgggtcatttcttcgggctgattgaggtttagctcctgctgagcagagttgggcgaggcgaatctgtgggcgagtcgagaatgtgcttcgctgggctgcacctcatcgaagcgtttcttcgaattggtcgagaaaacgcttttggattcgctgattgtcaatgaatgacgagtcaacaccacagatatgcgcggacgtgggctcatcgatgatgtgcttgggacggaactgttggcataaggcgctcgcagtgagcgaacattcctagtgttgggccgttacgcttcggctgagttgggaggcggccttccagaagtagatggccgaggcgatggacgtggccaggccgacgatgagtaggaatatgcccaccactttgttgccggggaagttggcgggtgacagggaaatatctgccggatatatcaccaccatgagggtgagcgtgccgttcagtccgattgagcaggctacggtgagggccgagcagagacgtacgagtcccagcatggatttgtatacggcgagtgatgccgcgcggccggtctgttccttcatgatgccgtgggattcgagggtagctgtagtagttgtgtttcgaggtgttagccaacgtgtccttgcgcgcatacacgttgatgagcgacgtgccagtaatgaagagaacaacaaacttgaataaagctccgaaaatcccgctataggggtcgaagaggtcgcagacaaggctcagcgttccaggagcatacgcgatgaaaatggtcaatgcgctactcaacggtgacgcctcccatgttgtttattcttgccagtcaggtagggcaagaatatgctcagtgattctccctgttcgcgtattacggcttcatatagatacggcgcatgacgaattcgactatgcgatccggtaggaaacgcttgagttgcatcagggccttgtagctgctgtcgacggcgatgcgcaccggaggattgcgtttgccgagcgtcgcgacgatgactcgggccacgctttccggaccgtcaccagtctgctcgtcatgagccatttgcccgaccgaacgttggcattcgtcgtagtacggtgaattggctggttcggcgaggatacgcgagccggtgaatccagtggataggtcacccggttcgatgattgtggcggtgaggccatgacggcgcccctccaaccgcagcgcctccacatacatttccagcgccgcctttgtggaagagtagtgcgattggaacggcaaacccagccgtcctccaatcgagccgacaacgatgactcgtccccgcttacggttgcgtgccgcggtacggcgcagcaacggcagtgcgatttcgttgacctgc

SEQ ID NO: 3993 - DNA, 19174 bp, Unknown
  R22_24m  MAG No. k141_48169
aaaggagcacccatgaccgcttcaccccttgcgcagaaagcgaccgatgctttcaacgcgccgatctgcgaaaccgatcctgagatcgccgaactgctggactccgaactgggccgccagcgcaatggccttgagatgatcgcctctgagaacttcgtgccgcgagcggtactgcaatgccagggctccgtgctgaccaacaaatacgccgaaggctaccccggccgccgctactatggcggctgcgaatacgtggaccaagtcgaaaccatcgcccgcgaacgcgccaaggccctgttcggcgccgaatacgccaacgtccagccgcactccggtgcccaagccaacgccgccgtctaccaggcgctcgtcaagcccggcgacaccgtgctcggcctggccctcgaccacggcggccacctgacccacggcatgaaaatcaacttctccggccgcttctaccatgccgaggcttatggcgtgaaccccgagaccttccgcatcgacccggaaatcatccgccagcgtgcgctcgaaacccacccggccatgatcatcggcggttggtccgcctacccgcgcatcgaggacttcaaggccatgaaggaaatcgccgacgaggtcggcgccaaattctgggtcgacatggcccacttcgccggactcgtagccgcgggcctgcacccgagtcctgtgccgtacgccgacgtagtctcttccaccgcgcacaagaccttcggcggtccgcgttccggtttcattctcgccaagcaggaatacgccaagaagctcaactcctccgtgttccccggccagcagggcggtccgctcatgcatgtgatcgcgggcaaggccgtgagcttcaaggtggccggcacccccgaattcaaggaccgtatgcagcgcacgctcgacggcgccaagatccttgccgaacgactactggccgatgacgtcaaggccaacggcatcagcgtgctgaccggcggcactgacgtgcacctggtgatggtcgacctgcgcaacagcgagatggacggccagcagggcgaggatctgctcgccgcctgcggcatcaccatcaaccgcaacaccgtgcccttcgacccgcgcccggcctcggtggcctcgggcctgagaatcggcacgtccgccctggccacccgcggcttcgggccgaaggaatacgaggaggtggccgatatcatcggcaccgcgctcgccgccggaccgtccgccgacgtgaccgcgctgaaggcccgcgtcgacaagctcgccgaagacttcccgctctaccccgacctggaccagatccactgatttgctgattcgctaatccaccgtggtgtaccggttagtgatgattcgctgaccggagcgcatcacgtcaccggcttcccgcctgagacggaggggagccggttctgtttgcgattcaaaacgtcagacatcccataacaagcgggtcggagtaagcaatcagccgcgttgtgagttacgcttgactgttatgagcgatgaattgagtcctgaggtgttcgacgcggtgtgccgccaggccgatcaggccgcacgcgcgcaggagcgtcttgcacaggcaaataccgaagccaaaaacgaactgctgctcgccattgcggacgcgctggacgagcacgccgcggacatcgaagccgccaacgcgctggacatgctcgaatccaaggaaaacggcatggatgcgggcaagcttgaccgcctgctgttcgacgtgccgcgcgtggccgccgccgcccaaggcgtgcgtcatgtggccaccttgcctgatccggtcggcgaaatcgtgcgcggatacaatctgcccaacggtctgcgccttacccagacgcgcgtaccgatgggcgtcatcggcatgatttatgaggcccggccgaacgtcactgtggacgtggccagcctgtgccttaaatctggcaatgccgcgttgctgcgaggcggtcacgccgccgaacgcaccaatgctgccacgctgggcgtcatcgccccggtgcttgaagcacacggtttcgaatccgcactggtgcaatccgtcgaccagtacggacgcgccggagccaccgccatgatggaggcgcgaggccatatcgacgtgctcgtgccgcgaggaggagcgggtctgatccaagccgtcgtgcgcaactccaaagtgccggtcatcgaaaccggtgccggcaacgtgcatatctacatcgacaagtccggtgatctcgccaaggccatcctgatcatcatcaacgccaaaacccagcgcgtgggtgtgtgcaatgccgccgagaagctattggtccataaggatgtcgccgccgaattcctgccgcagatcgccgccgctctggccgaggcgaacgttgtactgcaggccgacaccacgtcgtatgacatcatctccggcgcggcgatcgagggccttgacctcaaccgcgccaccgaggaggattgggacactgaatatctggccctcaagatgggcatcaaggtggtgccggatctgggcgcggccatcgaccacatcaacacgcattccacgggccacaccgaatccatcatcgccgaggattatgcggccatcgaggaattcgccaagcgcatcgactcggccgtggtcatggtcaacgcctccactcgcttcaccgatggcggcgtgtttggctttggtgctgagcttggcatttctacgcagaagatgcacgcacgcggtcccatgggattgcgggagatgaccaccaccaagtggatcggttacggaacaggccaggtgcgcgcatgaacgaggacggcaacatgaacactacggctgacacggcaaacaaggcaagcgaactgcggcccgacatcgacctcaacgatcccaagctcggcctgaagatcgcggccgaacggctcagcatcgtccgctatgtgttcctcgtgcagattgaggacggcatcgcctccgccgcccagcgtgcgtcgctcgaatacgcggacgccgtgctcatcggctggcccgagaccgattcacccgaagtcgtggacctcaacgatgcccagctcaagatcgtgcgcgaacacatggaactcatggaaggctacatcggcaaatacagccagatggagcacgacggcgacctcgacggcatgaccgacacgctcatccgcatcaccgagcgcgtggccgaggtccgccgcctctaccagccggacttcccgctgcccaccttcgccgagattcgtcgcgtggtccaagacgaatgggatgaagacatgggcaagatcgatcccaaggaagacaatccctccgccggcgaaatcgaagaggaaaccgaatcagccgatgacgccgccggcgagggcggccaggcatgagtggtgttaccggcagccacaaaacggctgcgtcagttcagtccgaaaaaacagtggaatccgccgagcccgccgaaatcattgccgtcacccaaggcgaaaccgaacggcgcatgtccgacctgtccgtaccggccggggccagcagccacggcaaaggcaggctttccgcacgcggcaactggcatacacgcctgcgcgtcggcatcatgggcggcacgttcgacccgatccacaacggccacttggtcgccgcctctgaagtcgcctgggtgtatgacctcgatgaggtgattttcgtgcccaccggccgacctgtgttcaagctggacaagcacgtcaccaacgccgaggatcggtatctgatgactgtgatcgccaccgcatccaaccccaaattcaccgtctcgcgtgtcgacatcgaccgtccgggcgtcacctacaccatcgacactctgcgcgatatccgcgcccaacatcccgacgccgagctgttcttcatcaccggcgcagacgccgtggccgaaatcatgcagtggaaggacgccgacctcatgtgggacctcgctcacttcgtggccgtcacgcgccccggctactccagcccggacggcgtgaccttgcccgaaggcaaggtcgatacgcttgagatcccggccttggccatctcctcgaccgatgtacgccgccgcgccgaacacgacgagccggtctggtatctggtgcccgacggcgtggtgcaatacatcggcaagcatggtctgtattcgtacgaggactgacgattcgtacgaggactagtgtgcatttgtacgagggctggtgaggattagcgcgaatcagcgcgcatcaatcctcgccagtgcaaggatgaacggtcaggccagtcccatcttgattttcaatgtcattacgcgagtcgccgccgccgtcaccttcgaagcgaaagccggatcggacttcgcccgttcgttgaggccgtccacaattggctttacataatccgtctgaccgatgcagggcatgtcgccgcccgcctcgacaagatttactcccaattggcttacatcgtagctgctcaacgcttcggcagacatcgaatccgaaatcaccacgcccgtgtacttcaggacgttgcgaatatgaccgtcgataatcgtagaagaaaacaccgccggattattcgggtcgatggattgatacgtggctaacgacatcatcaccattgcaggatcggccttggtaatcgcctggtcaaaggcacctgcctcggccccgtccaacgtggtggtcgtatccagaatgccttcggtggtgaagtcggtattgccgcttaccgcgcccaacccaggataatgtttgaccgccgcaccgacttgagcgtctcgcaaaccttcaataacggcgatgccatgttcggcgttgccggccgcatccaatccgaaatcacgatccagcgcgccaatcggagcatttgaggcacgatcgcccaccaccgtgccgagcaccggtgccaaatcgacatttatgccagcagcagctaattgcgaaccccacgtgcctgccgattgacgcaatgcgtcagcggacattgtgccctgctcaacggcactgggcattgtgtcgaaaccggtaccagtcagatgctgtacctgaccaccctcctgatcggtggcgatgatgagacgattgccggccggcgcatatccttggagttgcgcggtcgcggtcttgaccgtatcgacgccggtattccaattgccaatgagaatggccgagccaatgtgctcgtcggcgattgttgaagccaacgaggagggttcggaaccggcgaacaacggcaccatcactaactgtcccacacgttcctcaagcgtcatggcggataccgcacgtcgggcttgtgccgccggatcgtcgttcttcttcggggaaggaacgtcggtgcgcggtaacacactcgtctgggaggtctggggagtggtggtgttgccgtttgatgtggatttggcgaaccatccgacatgccatccgtagactgccacaccggccaacaccaccgccaaagcacatattgccgccacgattggaatgctcctgtgccgaagttggcgtgtggcgtgtgctgagggacgcatatgttgtggccgttgtctgtccataccggcaagcgtagaacagagcgtagaacaggatgttgcctcattctgtgctcagggcataaccgacctcccgccctttcgataggcttgagttatgtcttttaacgatcctttctcagtactgttcggcaatggcggcgattcacgacgcaacaatgcgaacaatgacgatccgatcatcctcgatgtcgaggccgatggggacggtccggcccacaacaccaacgctggcccctccgggtcatcccgccctccacgtggtccggccaatccgcgtatcacccgtaagccagcgtccggtggctcaggagccagccgtggcagcaagattctgatcggcgtggtgctggccttggccatcatcgtcggtctgttcttcggcctgtcccgattcatcaccgatctgatgtggtacggccagctcggcttccagtccgtggtctggacccagctcggggtgaaaatcggtctgtgggtggcctacgcgctgctcatggccctgaccggcttcgtttccgcctggctggccattcgagcacgccctgattcggccgacggttccaccattcgcattaacggcgatgtggtcgaggtcggcaaatccgtcagctcgaaaaccgctcgccgcgtggccgtggtgatttcgctgatcgtcggcgtcatcttcggttcccagtttaacgcgaactggagcgagattctgctcatgttcaacgcgcagtcgttcggcaccaccgatccgcagttcggtctggacaacggcttctacgtgttcgtgctgccgggcctgaagctcgtgctcgccgccgtggccatgctgctgggcgtgggccttgtgttttccgtggtcacgcatgtgctgatgggcggtatccgcattaccatgccggttaacggacgcggcctgttctccattaccaagcgttgccgtcgccagcttggcatctggctgatgctcaacatgttcgcttgggcagtgcgccagatgattggcgtcttcgaccagctcaccgtgcagggttcacgcatcaccggtgcctcctacaccgccgtacatgccaacatccccgtcaccttcatcatggccgtgctgaccgccatcctcggcgtggtgctgggcatctggctcatgcgctcccacacgctcgaaggccaggcgtccatcggcgtgcgcgcttccgccgcgctcaaggcctggcgtgtgccggtgacctccattgccgtcgtggtcgtggtgggtcttgtactcaccgtggcatggccggtgctgttgcaacgcttccgcgtcaacccgaacgcacaggagatggaatccacctacatccagcgcaacatcgacgccacccgcgccgcctacggtcttgacaagctcaagaccgagcaatacaaggtgaccgacaagggtgagcagggcgctctggccaaggaggccgacaccaccgcgcagatccgtctgctcgacccgcaggtcgtcagccccacgttcaaacagttgcagcagtccaagcagtactacaccttcgccgacaccctggcggtcgacaagtacgagattgacggcgtctcccaggacaccgtgattgccgcccgcgagctcgatctggccggcaatgacaaccgcaactgggtcaatgaccacaccgtgtacacccacggttacggcgtggtggccgcctacggcaacaaggtgaccgccgacggccagcccgaattcttcgaatccggcatccccacccagggcaagctcaccgaatccgaaaagtacgagcctcgcatctacttctcgccgaacaccaccgaatactcgattgtcggtgcccctgaaggcacgcaggcttgggagttcgactacccgaccggttcggaaggtgctctgaccacgttcaagggcgacggcggcccttcggtcggcaacctgttctccaggattctctacgcgatccgcttcggctccgatcagattctcttctccgaccgtgtgaccagcgaatcgcagattctctacgatcgttcccccaaggagcgcgtggccaaggtggcaccgtacctgacgcttgacggccgcgtgtatccggccgtggtcgatggccgcgtcaagtggatcgtcgacggctacaccacctccgacgcctacccgtactcgcaaataaccgacctcggctccgccaccaaggattccaccaccgtctcttccgcaacggtctcgtccctgggctctcagaaggccaactacatccgcaactcggtcaaggccaccgtggacgcctacgacggttccgtggacctgtacgtgtgggatcaatccgatccggtgatcaaggcatgggagaagatcttccctggccagtaccaccagctctccgatatctccggcgacctgatgagccacatgcgctacccggaaagcctgttcaaggtacagcgcgagctgctctccaagtaccacgtgacctctgccagccagtactactcaggcgaagacttctggcagacgccggtcgatccgaccgaatcccagtcccagcaggaccaggacatcctgcagccgccgtactacctgaccttgcagaccggtggcaccgaggaaccggtgttctcgctgacctccacctacattccggctggccagtccacccgtgagatcctgaccggcttcctgtcggtcgactcggatgccggcaatgagaagggcaagataggctcgaactacggcaccatccgattgcaggagctgcccaaggattcgaacgtaccgggccccggccaggcgcagaacaacttcaacgccaacgccgatgtatccaaggaactgaacctgctgcaatccggcgacacgcaagtggtgcgcggcaacctgctcaccctgccgctcggtggcggactggtgtacgtgcagcccgtgtacgtcaagtcttcgggcgtgacctcattcccgttgctcaagaagacgctggtcgcattcggtgatcaggttggattcgcggatacgttggatgaggccttggatcaggtgttcggtggcaattccggtgcggccgcgggcgatgccgagaacgtgtccggtgaccaatctggttccgataccaatggtggtcagtccggcaccacggacggaaagtcggattccggctcgtcttccgaccgcagccccgaactccagcaggcgttgaacgatgccgcccaagccatgaaggacagccagtccgccatgaagaacggcgactggaccgcctacggcaaggcgcagcaggagcttgaagacgccctcaacaaggccatcgagctcgacaagtagttccggctcccctcagggtgaggggagctatcgcagaaggcgactgaagggagttggttacctcaactgacatagcccgtccttatcataaggacgggctatttgcgtattcaaaggaacctcatgccatacaccttccgtccggccgtcgaatccgacatccaagccatcaccgacatctacaacgcctcagtgatggccggcggtgcgaccgccgacctcaccccgcgcaccctcgaccaacgccgcgcctgggtcgaatcccatacgccgccctacggcgtttttgttgtggaatcggaagacggttcaatcatcggcttcggtgcgctctccgtgttctacgatcgtgccgggtatgacggcgtcaccgatttggcctattacatcgatccggcatggcaaggcaggggagtgggcacgttcatgcttgacaggctgctcgccgaggcgcgggcccgccacatgcgcaaggcctgtggcatcattttcgccgataacgtcggctccattgccctcatgcgccgcttcggcttcacccaattcggcctcatgcccgccgctgccaccgactccaccggcaccatgcgggacatgtcctactggtatttggacctgtaggcccgaggcggtttacccttgctctccatggattccggtgtcctataacactaaaaagttgtatcggatctgctcttttcctcgaacgccatatatcggacgcgcttatcccagataacggcaaactacgggacggcacgcgattttcgtccgttttgacgtggtatcccgcaatcacgtgggatgccacacacgtcaaacgatgcacatagctcgcgtcccgcaactcttcctgcgaaatcattggaattctgccattcttatgattcggtgcagataacgtgcgataacgcttgcgggatgccacgccaaaaacgcccaaaatccgctgccgtcccgcaatatgtcatccgattgcagggaagcgtcatctgtctgagctgtttcccttgcttggcgtcgtaaacgacaagttgttgattgccgctgcatgtttctcctatttgagaaccgaatgctacatactgagattttttccaaccggagttgatgttaaagtgacgccaagctgggacacgctgttcgtgtgcggcatcctgtgcaacgtgctcgtctgcctggccgtgcgcatcggattcgccgcgcgctccgtatccgacaaggtgctgggcatcctgctgccgatcgccggattcgtggcgatgggcttcgaacactgcgtggccaacatgttcttcctgccgatgggcctggtcgccaaaacgtttggtttcggcgccgacgcggcgggcgtcgcggcgctcgacgtgtcgggcatcctctataacctgtccgcagccacgctcggcaatatcctcggcggccctgttcgtggcgctggcctactggtacctcaacggcaaacagcgcgaaaaggtcgctggcggcaccgcctaatagacgcgattcactcgtccccatctcttgtaatactggtattacaaggaggtgcgatatgactatggccatggtgacggcgcgcgtcaatgccgaacggaagcgcgacgcggagaaagtgcttaagcgtaatgggcgcacctattcggacctgattcgtgatctgaccgactaccttgcggatacgggggaactgccggaattcgagcgtctgacgctctccctgattcaggagcgggagcgtaggaaaaagcaggagttgattcaacgtttcgccgaccggaatttgccggaggcggaaggcgatctttcggatgaggagattctcgcgcaggcacgtatggaacgatttgggggacgggatgaaactgctgtttgacacgaatattctgctcgatttgtgcaatgacaaacgagcgcctttccataaacaatgtgttgatttgctcatggaagccgttgcacagccaaacattgagatcatggcgccggtatcgtcattgaatgacgtgtattgcgtgttgcgcaagcattatggcgaggagcgggcggcgcgagacgatatcggtggactgatggaattgttcgacatccgtccacttatggaacgccatgcgtgtatgtcgtaccggtccgatgagcccgacttcgaggacgggctcatccgtgccgttgccgaggacaatgacgccgacgtcatcgtgactcgtgacgtcgaagcgtttcaccattcatcggtccgatcgatggatgccgagcaatgccgtgccctgctgcttgccgattccaaggcttgacggcggcgttgagtacaatcttgacggttgaatccggccgggcatgggccagtgcgcgaggcgaacgcgcgcatgacgtacggaacgtacagaacgtgcatacgggaatataggaagacggacgaggagtggattatggcatcggatttctggctgattgcgggactgggcaaccccggcaaaaaatatgaggacacgcggcacaacatgggcttcatgaccgccgacgtgctcgccgaacgttggacggtgaacttcgccgaccacaaaggtctggccatgctcggtaaaagcgtgatgaacctggacggccgcaccgtcaagttctttctggccaagccgctgacttatatgaatgattccggcaatgcggtggcttccattagcgcctattaccagatcgagcccgaccatatcgtggtgattcacgatgacatggacttggaattcggtcgtatcaaggtcaaggcaggcggctccgcagggggccacaacggcatcaagtcgattgaccgttccctcggcacgccgaaatacgcgcgtgtgcgcatgggcgtcggtcactccaagcgcggtgcgaacgcgcatgacaacacggtgaactgggtgctgggcggattcggtccggaccagcgcaagcagctgcccgaattcctggctgacggcgccgacgccgccgaggacatcatcttccgcggtcttgccaagacccaggagaagttcaatggccggtgaggcgacgcacccggacctgatcaacggctcactggtaggcatcctgtctgagctggaacaggacaagaccttccttagactcgccactggtgacatcgaggtttcggacgacatcgacaattccgttctggccggtgtttccgaaggcttgcgcccggctttggccgccgccatcgggcagggtgtgaccggcaaacccggcaagccggtcgtgctggtcgtggcctccggccgcgaagccgaagagaccgtgggctcgctgcgctcctggtatgacggcgacccggacgacatcgcccagctcgaagcctgggaaaccctgccgcacgagcgtctgagcccgcgcgcggacaccgtggccagccgcatggccgtgttccgcagactcaagcatccgagcgataccgatccgatgttcggcccgattcgcattctcgtcatgccgatccgctcgctcatccagccggtcgtccaaggactgggcgacgtcgagccgctcgtgttcaccgtgggggaggacctgcccctcgacgaagccgccaaacgtctgatcgaaaacgcctacacgcgcgtggacctggtcatggaccgtggcgagttcgcggtgcgcggaggcatcctcgacgtgttcccgcccaccgcaccgcacccggtgcgtatcgaattcttcggcgacgaaattgacaccatcaaggaattccacgcctccgaccagcgtacctacggcgacggcctcaagaccatctgggccaccgcatgccgtgaactgcagctgaccgacgccgtgcgcgcccgcgccaaagccttggtcggttcgattcccaatgctgaggacatgctcgaatccatcgccaacgccattccggtcgaaggcatggaatccctgatgcccgcgctcgtggaccatctggaaccggtgggctccatgctgcccaagcacgccgtgatcctcctgagcgacccggagaaactgcgccgttccgccgaagacttggcaaaaaccgcgaacgagttcctggccgccagctggcatgtggccgcctccggccacggctccggcgcgcccatcagcttcgacgaagccagcttccttgactatgcggaaaccatcagcgccctcgaatactccgaacatccggtgattcgcctcaccagtttcggcgtggacaccacgctgaccggccatgtgcagctcgacgcccagaacccggccgaattccgaggggatgaggccaaggcctcccaaggcatcgaaggcctgctcgacgccggcttccacgtcaccatcaccgccgctgcggccggcaccttggccaggctcaggcgcgcgatcaacactaccggcatcgccaatttcgacgtcatccgctctcaggccatcgacggcttcgtggacaaagccgccaaaatcgccctgctcaccgaacgcgacctgaccggccgcacttcggccgtggccgtggccaaaacgccgaaacgccggcgcaaggccatcgacttggtggaactcaaaaaaggcgattacgtggtgcacgagcagcacggcattggccggttcatcgaaatgcgccagcgcaccatcggcaccggcgccaacaaaaccactcgcgaatacctggtcatcgaatatgcgccttccaagcgcggcgccccggcggacaaactgttcatccccaccgaccagctcgaccaggtcagcaaatacatcggtgccgaagcccccaagctcaacaagctcggcggctccgactgggcggccaccaaggccaaggcccgcaaacacgtccacgagatcgccgacgacctgatcaagctgtactccgcccgccagcgcgccaggggcttcgcgttcagcccggacaccccatggcagaaggaactggaagatgccttcccctatcaggaaaccgtcgaccagctcaccaccatcgacgaggtcaaatccgacatggagaagcccgtgccgatggaccgcctcatctgcggcgacgtgggcttcggcaaaaccgaaatcgcactgcgtgccgccttcaaggccgtgcaggacggcaagcaggtggccgtgctcgtgcccaccacgctgcttgtccagcagcattacgagacgttcagcgaacgattcgagggtttcccggtcaatgtggcggccatgagccgattccagaccaccaaagagatcaacgagaccatcgagggtctggaaaccggcacggtggacgtggtcatcggcacgcacaagctgctgaacccgaaaatcaagttcaaggatctggggctcgtcatcatcgatgaggagcagcgtttcggcgtggaacacaaggagacgctgaaagccctgcgcaccaacgtggacgtgctgtccctgtctgccacgcctatcccgcgtacgctggagatggccgtgaccggcattcgcgagatgtccacgcttgccaccccgcccgaagaccggttgccggtgctgacctatgtgggcgcctacgaggatgcgcaggccaccgcagccgtacgccgcgaactgctgcgaggcggccaggtgttctatgtccacaatcgtgtgcaggatatctcgtccatcgccgacaagatccacacgctggtgcccgaggcgcacgtcggcatcgcccacggcaagatgggtgagaagcagcttgaccagatcatccgcgacttctggcatcgtgacatcgacgtgctcgtgtgcaccacgatcatcgagacgggtcttgacatatccaacgcgaacacgctgatcgtcgaccatgccgaccgtttcggcttgagccagctccatcagctgcgtggccgcgtcggtcgcggccgcgagcgcgcgtacgcttacttcctgtacgacccgtccaagccgatgaccgagcagtcccatgaccggctcgccaccatcgcgcagaacacggcgctcggctccggtttcgatgtggccatgaaggacttggaattgcgcggcaccggtaaccttctgggcgacgagcagtccggccatatcgagggcgtgggcttcgacctgtacgtacgcatggtgtccgaagccgtggagaagtacaaggagcccgaggagaacgtcgagccggtggccgtgtccatcgacctgcccatcgaagcgtcgattccgatcgagtacatcgattcggacaagctgcgtctggaagcgtaccgcaagctcgcctccgcccgcaacgaggccgatttgaaggatttggaagaggagctcaccgaccgttacggcaagccgccggtcgaattcgagaccttgttcgatgtggcccgtctgaagttcaaggcccgcaagctcggcatttcggagattctcgcgcaatccaaccgcgtgcgcatcggccgtatcgacccgcccgaatccatccagatgcgtatgggccgtatttacaagggcacccaataccgtccggtcacacaccagctcatcgtccccaccccgttcaccggctccctgggccaaggccccatgagctccgaccaggtagtcctctggaccaaccaactcctcgatgacttggcatggaggccacaacgatgaaaaaccaacacgcggcaacacttgccggctatgagattccccgcctcggcatgggcacaatggcgctcgccatcgaggggcgcccctccaaccgtgatcaggcgatcgagaccatccatgccgcgctcgatgccggagtccgttatttggacacggcttggtcctattatctgcccagcgcacccggcaccggcgaaccggaggatatgggctatggcgaatatctggtccgcgatgctctgcactcgtggcatggccccaaagatcaggtgctcgtagccaccaaaaccggctggctgcgcacgcttgacggcaacggcaactacggctggcaggccgacgcccgacccgaaaccatgatcgccaatgccaaggaatcagcccgccgcctcggtgtcgatacgctcgatctgctctactcgcactgcaatgatccgcaggtgccgtacgaagaccagatgggcgcactcaagcagctcgtggacgaaggtgtggccaaagcggtcggtatctccagaatcgacaacgcggacatcgaagccgcccacaacattttgggcgatcgtctcgtggccgtccagaaccagttctccccggttcaccgcgaccccgaacacacgttggagacctgcgaaaaactcggtttggctttcgtctgctggtcgccgctcggtggattccttgacccgttcaacgagcatctgttcgaccggttccgcgaagtcgcgaagtcccacgactgctcctaccagcgcgtcacgctcgcgtgggaacttgcgcaataccaatatctgttcacgattccctcggccagaaacccgcaggagattcaggactcgttcaaagccggcgaactgaaattgtccgacagtgaaatcgactacctcaatggcaaggacgtcgactgagcgatttcgtccgtactgccttgcaatcaggcggcgcatcggcattgtgagcgctaacactaaattttgggcgtgttgttcacaacgtccacaaatcgcactactcttaagaatgtcattcaagatacacaaccgttttaaggagtagttgtggcagtaattgaaagcgtgtacgcgcgtcagattctggattcccgtggcaacccgaccgttgaggtctacctggagaccgaagacggcgctcagggcaagggtctggttccgtccggcgcctccaccggtgaagctgaggcttgggagcgtcgcgatggcgacaagtccgtctacggcggcaaaggcgttcttaacgcggtcaaggccgtgaacgaggtcatcgctccgaaggtcatcggcatggacgctgctgaccagcgcgctctggacgacctgatgatcgagctcgacggcaccccgaacaagggcaagctgggcgccaacgccatcctgggtgtctccctggctgctctgtacgcttccgccgagtccgccggcctgccgctgtaccgctacatcggcggcaccaacggccacatcctgccggtcccgaacatgaacatcatgaacggtggcgctcacgctgacttcgccaccgacattcaggagtacatgatctccccgtacggcttcgacacctactccgaggctctgcgcgctggcgttgaggtttaccacaccctgaagaacgttctgaagaaggaaggcctgaacaccggcctcggcgacgagggtggcttcgccccgaagatgaagtccaacgaggactccctcaagtacatcatggacgccatctccgccgccggctacgagcctggcaagcagatcggcatctgcctggatgtcgcctcctccgagttctacaacaaggagaccggcaagtaccgcttcgacggtgaagagcgcgactccgcctacatgctcgactactacgagaacctcatcaacgagtacccgatcgtctccatcgaggacccgttcaatgaggaaggctgggaagactgggctgccatcaccgctcgcctcggcgatcgtctgcagttcgtcggcgacgacctgctggtcaccaacccggctcgtctgcagaaggccatcgacctcggcgccgccaactccctgctggtcaagctgaaccagatcggttccgtcaccgagaccctcgacgccatcgagctggccaccgccaacggctacacctccatggtttcccaccgctccggcgagaccccggacaccaccatttccgacctggctgttgctaagaacacccgccagatcaagaccggtgccccggcccgtggcgagcgcgttgccaagtacaaccgcctgctcgagatcgaggaggagctcggctccaccgctcagtacgccggctacagcgccttcaaggcctgcaagaagtacttggccaagtgagctgaaacgcccgtaaaggcgtgagtttccactgaagctcgatacccgtcgtgttcgtcaagtcgaatgcggcgggtattttcatgtgacatgagcaagtcgtcccgtaccggcaaacctggcaaaaccggcaaagcacaagtcaggaaaaaagggtcggcggggcccatagcgttcttcgtctccctgttcatcatcgcactcggcgccatccagctggtctccaccttccacacttatgccctgaacctggccgagctcaatggcctcaagcgtgaggaagcctcgctgatcgcccaaaagcaggagttggagaacgatatcaagcgttgggatgacaaggcctacatcaccgcccaggcccgtgaacgcctcggcttcgtattccccggcgaacaggccgtgcgtgtgctgcatcccgaagccgtgaccggctccgatcgcgaatcccagaaaacggaagattccaataccagcaacaaaaaagtcctgccatggtacagcgaactgtcttactcgctcaaaaaggccgatgagcctgtgaccgatagcgagtccggcaaatccgatacttccggttcctctgactcgtcatccaacgactcatccaagcagtccgataagtcagaacagaacaccccatccgatcagaacacccaacagaacacccaacagaacacaggggagggaacccaacagtgaccatcgatatcgccgccaaggccaaggcccttgtcgacaccatgcttgccgagcccgccaacgaccatgacatcgacctggtgcagcgtcagctcggccgatacccgcgcggcatggtcgccgtgggggcgcgatgcgtctgcggtaggccacttgccgtaatcacccgtccggtgttgcccggcggaatccctttccccaccacgtgctatctgaccggtccggaagccgtcaaggccgcctcccacgtcgaggccgccggcgtgatgcagcaatacaacgatatgctggccgctgatgaggagctcaaggccgcatatgagcaggcccataatctgtatctggcattccgtcacgaactggcaggccgtcttggcgacagcgaggagcatattgaaggcacttcggccggcggcatgccggtgcgcgtcaagtgcctgcatgccctgctggcccagtccttggttatggggccgggcgtcaaccccattggcgatttggtgctggaacgcgtcaaagacgagttcgatccgaccgtctgccgttgcacactggacgattgatcaacagatgagccaccgcgaacagcccattcatacgcactaagggatacgaggagaaggcaatgagcaaggaatccgtaaccgtcgccggcattgattgcggcacgaactccattcgactgaagatcg

SEQ ID NO: 3994 - DNA, 7672 bp, Unknown
  R22_24m  MAG No. k141_51847
agcacagccgttttgtcatcatccgctgcggatggcagcaccgtggtatcggttcggtcatcgacggtcaccatggttgtggtctcggtggtctcgtcggtttcggaaggtatggccgtggtcggtgtcgcatcctcgatggaggcgaattccttggtttcatcagtcatgattccatctcctggttgtaacggcttgatcattccgattgcccggttgtgttcttgcttgtgctgttgccgtcgtatatatcggcaagcggctggaacgtggagcctccccaatcggaggcgtacaccacgttgacgcgtgcttccaccgcatagggaatattgatttttagttctgggccgttgtccggcatggcggattccttatccaaccattcgtaatcaggcccattcatgggattggtggcgctttcagcttcgaagaaaccaaagcttagacccatgtagttgttgtataccatctcgtatttgccgccgacgtcactcgaagtggagtaggagtcggcggtgccgaaggcgtaagtgcaggaatccggcagaacgatatgcacttgcgcctgtgttgcggctatggtgatggtaccgaccggacaattactgatggaggttttgccatccagcatcttcaccgtgtgcggcccatgtgtcttgccccaatcggaccaatcaatgatcgcctggtcggtgttgtagttttcaccgctgaacgccacaccttgctgcaatgtttcgaacgtggcatcgctggcatcggcaacgaagatgccatccttttgtacatcgttcatgccgtcgctgtttctcgcactgacagattggctcagtgaaacaacagtattgatgccgctggcaccaagatcacggtagtgcacgccatacgtgcctgaaacgatggtcatgcagagcgcgcatccaccggcaaccagtccgagaggaatcagaccaccggtacgccgccctctgaatccgagaatgatgaccaccagccccatcactatgcatactgcggcaatccagatggtgctcagacgcataatgccgataatgcccatgtcgtttacccaaatcagtcccatcagaccggcaaaggagaggaaggtaaggcccagtatgctcaagaccacgattgggcccgccggcttgcggcgcttggactcggtgggggcataagccgtcgcattcatacggtcgggggcaaacggcccgttgggtactgtgccgggcatcgcgctgggcactgtgcccggcatcacgctgggcatcgactgatagacaggctgtgaaacaggttgtgaaacactaggcgcggttcgtgaaacagattgtgaaacaggttgcggagctgaatacaaaggagatagagggaccggttgcgcggctggatatgaggcaggctgtggagctggatacgacacaggctgtgaaaccggtcgcggcgcagatgccccgaatccgtacccttcctgctggcgaatgccgcttttggccaacaaccatagcgctaaggcggcgagcgcaatacaaacccaccccgcacctggaatcacgattgccacggctaggaacaggaagcatccaagacaattccagtcccattggccggcaatgaggtcctcggccaagatgtgcccatcgcgtacatccggcatcagaaaccagccgagtgcgtacagagctgcgccaaaaccgaagaacaatgtacatacaatcaccaacgcacgtactaatgtggggctccagccaagccgtaaagcgatgccgctgcatacgccaccgatccaccggtcgtcgccgcgaaccagtccactggatcgcacccaagtgaagaagcgtcgcgatgtcttgtttttttgcggaccaggctgcggctgtggctgatacggattcgcgtttggattgctcatgattccattacaccgcccgaccactgccacaacgctcggggaacaccctgattgttccctgaacaccgggtaaaaccccggccgcaacgccctgagcgcggcacaataggagtatgacgtcatctcccgaaccattgctgcccgcgcgcatgccgctgatgcgcccccggcagggccgctggctcaccggcgtgtgcaagggcatcgccctgcacttgggcatcggcgtgacatgggttcggattgcgttcatcgctctgaccttcctctacggcgcaggcatcatcgcttatgtattcctgtgggtgttcatgcccgccggagacccggtggcggctgcggctcgcacagtgcccgttgatcaggcgccgcttgcgcgaggcaatcagccacttgccgctcatgacgacgaatcggctgccgcaccggaatcattgtccgaggccatccaacgtgctccgaaaccggccgtcgtggcattggccggtttcgcgttgatggccaccggactgctgctcaccagcaccggtgcggatgtccagattgtgcttccgctgctggtagggttgggcggcatcgcactggcatggatgaatcttagtccgcgaggcacgcagctgttgtctatgttgggcggcatcgcactgattttcatgggatgggcattgtatgtgcataatgtcagcattcccgggtggggcagctctcctcgacgcattgttgccagcggattcgtgatgatcgtcggtatcgtggtggcggtgatgccgtgggcgaacgcgatgctgcaacgactcacccacgagcaggcattgaaggaacgcgaagaggagcgcgcggacatgaccgcccatctgcatgatggcgtgctgcaaacgttggcgctgattcagctgcactccgaggaaccgactaccgtattcgccctggcgcgtagccaagagcgcgagctgcgcgaatggctgtatcaggaacgttccacatcggatcgttcggtgggagccggattgaagcagatcgccgccgaagtggaggacgagcacggcaaaccgattgaggtggtcaccgtgggcgacgcgcggccgagcgcccagaccgatgcgctgctggacgccacccgtcaggcgttggtcaatgcggtcacgcatggcggcgagccggtgtctttgtattgcgaggccagcgacacgatggttgaagtgttcgtgcgcgaccatggcgaaggcttcgatatggacgccattccgcccgaccggctgggcatccgcgaatcgattatcggccgcgtcaaacggcgcggcggtacagtggagatagtgtccagggccggctggggcaccgaggtcagaatgcatatgccgatcgcgctgaaagcggcgcagggagaacatcgatgagcgagaatgagacagccaagattcgtgtggccgtggtcgatgaccatgagatgttccgtgcgggcgtaatcgccacgttgcgtgattccttcgatatcgtcggccaagcggcggacgtgcccggttcggtggcgatgatcgcacagaccaagccgcaggtggtgttgctggatgtgcacgtgcccggcggtgaaggtggcggcggtgccgagatcctcgccaaatcgcggccctactcccccactaccgtgtttctggcattgtcggtttcggatgcgccgcaggatgtgggggcggtgattcgcgccggcgcccagggctatgtgaccaagacgattaccggcgctgatttgatttcatccatcaagcaggtgcatgagggctatgccgtgttctcgccaaaactggccggttttgtgctttcggcctttcagggtgtgccggcggcggggtctgatggcggcgctgatggtgcggcacgggctcatgatgaggagctggaccggctgtccgcccgcgagcaggaggtcatgcggctgatcgcacgcggatacacgtataaagaggtggcggccgaactgttcatttcgatcaagacggtcgaaacgcacgtgagctcggtgctgcgaaagcttcagctttcgaatcgcaccgagctcacccgctgggccgccgataggcgcattgtgtgataaacgacagatgagctccctcatcagagggagctcatctgctcatatcactcggcgtcgcggaaaccgttggggttcttggtctgccagttgagggaggaggcggccatgtcgtcgatggtcagctcggccttccagccaagctccttctccgccttggaagcgtcggcgtagcaggcggcgatgtcaccggggcgacgcggcttgatcgtgtacggaatcggatggccggcggccttctcgtaagccttgatgacctcaagcacggagtagccgtggccggtacccaggttgtagacgaacacgccttccttgtcgatgtggtcaatgacggccacgtgacccttggccaggtcgaccacgtggatgtagtcacgcacaccagtgccgtcgggcgtgtcgtagtcgtcgccgtagacctggacttccttgagctcgccgaccgcgaccttggccacgtacggggtgaggttcgccggaatacccttcggatcttcgcccagcaggccggactcgtgtgcgccgaccgggttgaagtagcgcagcagcacgatggtccaggacggatcggccacatgtacgtcgcgcagaatctgctcctggaacagcttggaggtgccgtacgggttggtggtgccgccggtcggcgtctcctcggtaatcggcagttccttcggcgtgccgtacacggtggcggaggaggagaagatgatcttcttgacgttgtgcttcttcatcaccttgagcagcacaagcgtggagtacaggttgttgtcgtagtattcgatcggcttggccacggactcgcccacggccttgagaccggcgaagtgaatgacccaatcgatgttgttttcggtgaagacgcgttccataagcgcctcatcgcgcacgtcaccgtcgtaacgcttgaccggcttgccggtgatctgctcgacgcgctcaagcgccacgggagacgagttgccgtagttatctacggaaataacgtcgtagcccttgtcgagcagttcgatgtcggtgtgggtggcgatgaatccagcaccgcccgtaaccagaacagtagtcatatctcctcctttggaaggacttgccttcggttttccttcagtattgagcttacttcacttgacctgtttcacctagcggcaaaaccaagactttcgaggaatgtttgcgtggtggctttctgcttgaagacggccgtgttgccgaggatgcggtagcagacgctgccgagctcgtcacgtacggcttggtggatggcctcgcggtcgcggtttccggccaatgtttcagcgagttcgccccattcgagactgaattcgctgacttcatcgggcaaatcgcggccttcggcgagcgcctcctcgacgatgccgagctggtcgacgagccgtccgggcaggatgaacaggccttgggcttcgatcagtccaatcggctcctgcttgaccggccagtattcggggtgtgcatggaaaataccttccgggtactcgtcgctgatcgcattgttgcggaagatgagactcatctcatagccacgttcggtgatgatcgcgctgggcgagagggcggattggcggttgccgtccgcgtcatggctggcgatgccgttcgccgcgtcgtcataaccgacccatgcctcgcggatgatgtcggatacgtcgatgatgctctggcggtttttcgacaccacacgcacggcggtaccgggccagtcgaggatttcgaccacggcgtccggatagtcggcgagcgtgaaggcggcccaagtggcggccttgtgcatcggcagcagttcgccgccgccctggtagtggtcgtgggcgagcaccgagccgccgatgcgaggcagcgcggcgttgcatccgaggaagtatccggggaagcggtccacgaagtcgagcagatggccgaaggtgtcgcggtccacatgcatcggcgtgtggtcggtgttcacgcagatgccgtgctggtcgaagtagccgtagggcgagaactgccagaaccatgactcaccgccgagcgtgaccggcagggtgcgcagcgtgcgcttgtcacgtccggcgaagccctcgttctcatggcagatcgtgcacttcgggtagccgccggacacggcgttgccggccgccgccttcttcatgttcttgaattcgggtttggcgaggttgatggtcaccgtcagcccgtgcgagtcgaagcgcgggttccggtcgagctgggtacgcttgacataattgttggccacacagtagtcgtagaaccattgcatggcggccatgccgccgtccctgtgctcgatgagcaggaaccggtcgtcgagatcggcggggttggcggagaggatgcccatgatggtgtcggcgtaggccgggccttcctccggatcgaagaggccggcggttgtggcggcggcgcggaaggcggcgagtagggggtcgggggtcttttcgtcagagggggcctggcttcggctgccgacaatgtcttggactgcgtctgacactgacgccgccgacgttgtggttttgggtccggggtaggaatccaggtggaagagggcgaagatttggttgcgggtccagtctgcgttgcgtggatcgaggtcgagatgatccaaggcgtaatcgactagggcgtcgatgctggcgtatacctcggtcagctgatcgctcattgctcggcccccatcatgctggttcgggtatggttcgactgacagctcacttggcagcctccatgatgtcggctacgatggcgtgggtttcactggccttctgctccatctcctgcacgagtttgatctgggtgcgggtgcgcaccagattgtgctcggggtacttggtggcaaagtagatatcgccttccaagtagtcggcgagaaagcgcatgccgcattccatggtgagcaggttgccgctgaacggcagcagttcggcctcgcgcgcggtgatgctgccacgtagttcgcccacgaatccttccgtgtaggcacggaacagctcggtgctgaaatgcaccttgctgaggtccttttcgtcttccagagcagtggacgcaccaaagcgtatggaatcgccgaagtcgaacagcatggagccgggcatgatggtgtcgagatcgatgatcgcacgcgccttgccggtggtggcgtccatgaggatgttgttgagcttggtgtcgttgtgggtcacgcgcaacggaatcgaaccgtccctgagcccatccatcacgacggcatactggtcggcgtggctcagatagaagtcgatttccggctggcatgcggcggcgcggccgagcttgtccgcggcgagggcggccttgaagtcctcgaaacgatgcggggtgtcgtggaagcgggcgatggtttcggtcagctggctggcgtcgaattcggacaggaagttctggaagtcgccgaatgcgctgccggcttcgcggaacacgtccgggttcggcacgaggttgtaggacacggtgtgttcgatgaacttgtagacgcgccatgcgccgccatcgatctcggcccaggtggcgccggaggtggtgggcacaatgtccagcgtctctttgccctgagccttgagagtggaggtgaccagttcgacattgcgcatcagattcaccgtatcggggaagatgctggtgttcatctg

SEQ ID NO: 3995 - DNA, 27271 bp, Unknown
  R22_24m  MAG No. k141_52512
cgtgagacgtcgtccatcgagcgtccttcgataattgacaccagcttggccacggcccagtagcccatctcgaaatgcggcagttccacagtggtgagcatcggttccagcgtttcggcgaacacgcgatggttgtccacgccgatcacggagatgtccttgccgaccgtgagtcctcggcgtgcggcgcattcgtacacataccaggcgcgggcatcgttgaagcagaagaatccgtccggatgctcggcgtcgaacaaatcgctgactgcggtcagtgccggcccgttgttgagcacattgacgaccagatgatcgtcatagtcgaggccggcgtccctgagcgccgcctgatagccttccaaacgatcgtcctgcgcaatcagcggctccaagcaacccacataggcgatacgtgcgcatccggccttaaccaatctggtggtggcgtcgtagccgatttggaactcgtccggttccacgctcgggattttgccaagcgagtcggtggcatccaccaacaccagtggcgtcttggccagcgaagaaggcgcatgggtgatgcggttcgacatcttggcgtacaggaaaccgtcggtgccgtatcgcttgagtgcggcgatttcctcgctctcgctgttctcaccgtcggtgctcacggtgatgagcatatagccgaactggcttgcggcggtctgcgcgcccagaatcataccgccggcgtacggggtggtggccacctcctcactgatgaaaccgaggatgtgcgtcttgcctgtacgcagcgaactggccagcggattcgaccggtagccgagcttggtggcgatggcgcgcacattgtccgcaatttcggactttacgcgcccctcgtcgcgtccgttgagcaccagcgacaccgtagagacggaaacccccgccttgttcgcgatttccttcatcgtagccatgcgtcaaacgatacaccctaattgacggactgtcgggaaagtatcagtgttctccaccgactccgccgaggttgcgcaccgcaccgatgaataatggtatgccgtccggggtgacgtacgaatacaggaatgggcgatccaccgtgaactcgatgttgtccaccggcgcgctagtgaagtctgcgccggctttggtgaaggacatggccttggcgccggcctcgttcacctcgatgcgcgtgccttgcagaatcgaaccgatatacagattctcgccgtgcgaatcggtgtcgaccatcttggtgaagtcggcgtcgcctgcactgaacgcatcggtcacccccagtttttcgaatgccttgatggtggcttccgagtcgaacatgctgtcgacggtgaatcgtggcagcgagacgttcaccgtggccgagttgacggagacgccccatccgggcaaactgtccgcggtgcaacccattgcgtcctcgccaggggatgccgacgaacacgtgccgaacgcccatccgagtttctcggcattgccggccagctcgtcgaaatgccctttggccggcagcacgatggccagattgccgctgttgtcgaatggaatctccacccgctgccaagtgttgtactcatcatggctgtaagtcatttggctgaaggtccggtgcatcatcggcacctgagcatctccggcttcgccgtggaaggtgccgtcgccggtggactgctcttcgaacggatccttccagcggccatccgcatagacagtgttgatgatggacaggacttcacggtcacgcagcgtgatcttcggcttgagcgaaccattcgtatgcttggcaatccaatcggacatcttggcggcggcctgatcgtcgaacggtagcgtggtgacttcggcctcgaatatcttcttgacggtggattggtaatcgctggcaagagagtagtcgttatcgatccacagcgagttcgcggcgctcatctcggatttcgcccccgaatattgcccgttgatcgaactcagcagcgattggtagtcgctgtcggccagcgaaccggagcccagcagctcattcagttgcgagcgggtcgtgccattggcgccctgcgcggcgatggccaacgccatccacatcgaagcaggggagtagttcacattaccggtgtctcggtcgccggctcccatcgccaggaattccggtgcggtgcggtaggcgaaggctgcggtgctgtcgactaccggctgtgtggcaggcgtggccttcggcttgaacatattgcgaaccagtgcgctgccatcgccggccgtccaccatacgccgccggcgacggcaaggacaagcactactgtcacgatggcggcgatacaagcgttacggcgtttgcgttgtttgcgcaaccggtactgttccatcagtttctcgctcatggtcagcccctttgcttggatcggctcgtgcatcattgcacgaagcccctgattccagtatattttggtctctcttattttgtgcgacgagccacaatccaccgcacggcccacaccacgccgaatccgaggaagctcgccacggcgaacacgatgacgaaatgcaagacctgatccatcgagccccaggagaggtatcggtcgccgatcagcgtgcaggtacttcctatcgggcacgtgtcttcatacaccgtgatgagcgccatgagcatcggcgcaggtaccagtgtgcacgccaacgggaacagcaggcttttccacggatacgtcagtgaggccgggcgtagcgcgtagatgccgttgatgaccagcaaggcgggcggaatcacaaaattgattagcaacgcggcggccatcgcagccatgccgccccgtaaggtcagcgccaatagcaagccgtacatgattgccgtcgccagccagcagccgaagcgaatcgcatcctgacgaatccatgtgagcagtcgtccgctcgccgtctgcggattcggatccacaaacaattcgcgcagaccgtagcgtccgattgcatagcagatgaacgcaacggccgtataacagatcaacagcatggccgagccgatcaacgaatgaaccaatagctgatggccgctttcagcgtgcattagcttccaccactgagcccaggaacggtatgggaaccccggccgtaagcgaagattggtacagccgaatgccagcggtccgatgattgcgctcgccaatgggaaagacagactgccggatcgtatcgaaccgagtatcaggttggtgattcccaacaccaatggccagtgcagaaccataccggggaaccatacgaacaggtttttggcagccctgtcaaggacctcgtcgggcatgagatacattgatgagctccactgcagcagcaacaacaccgctatcagtacaaccatgccaatccaatgcgcgcggttccacgcgaatattcgttgcgtcccgcgctcggcggcggcattgcgcatatcgctcctgttgagcttgctgagtgcttgtgcacggttcattgcagtcctcctttaccgccttgtcaaggattgatgatgattccatcgtaaatcgcgcaggaaatgtggaatgatagttgtcatagtgaccatgacatgtcaggacggagcagttcggcgtcgggcacactgaaggggtgaatgtaatgggagaagcgcgcaaccgcaacatacgcatcggcattgtggacaatgacccgtatgcgctgaaagtgttcggcgcgctaatcgagcgcatgtccagcgattttgccgtgatatggacctgcgatttgggtgccgtggccatcagccgatgcctgagccccaccaagcggcctgacgtgctggttacggatatgtctatgggcgacgtgcccggtaccgaagtctgtcgtgcgattcgtaccaaaacacccgaggttgggctggtgggtgtcacctcatacgcgctcgcgtcatttcacgacgaggcggctcgctgcggggcgcaggccttggttggtaaaaccgatttgaacggcattgcgctcgctattcgcaatgcagcccaaggattgtcgaccaatgagctggtactgggagatgaggggagcggtaattcgctgtccttcatggatgccgcaaccgcctacgcggtgctcgaagatacgtcatacgcgcaccgtggcgcgctttccggcaaagaacgcgacaccctgcgtatgtatgcggatgggtcgaccaccaaggaaatcgccgagcgattgggcatcagcgtggccactgtggcgacttttgaacgccgcgcactcgccaaactcggcgctcgcagtcgcgctcatgccatatcaatctgcgtgaaacggcatgagatttaagagttggcatgggcggtatgtgcaacggcatggatggtaggaaaggaactgctatgaaagcgttacgacaccgattggccgagctggatagcggtgttcgcaatgcatggctgttgattgccatactggttgttgccttgatatgcacgatggaaaccatggcgggcttggctgctgacagtgtctcggcggcggactgccttgcggagttcatattcgttgccattgtggggtggatggcgtttcgtccggtcaccggatgcgtggcggtagcggtggcttggatagtgttgtgcatgagtccgatctggatgccgtcgggtgcaatgctcgccgtgttattggcggtgggtattgccggatacgccgataagcgattggcgctggcggttgccggcattgccgttgtggtgtggatgttgtcgcgtggtggcgtggccattccttggcttgatggcggctcagacacgatgagcggttctgcggatggcgcggcgagtagtagtgccctagacggtagtgttgctgatggtggcgctgctgatggtggctcttcatccagtgggtctgacagcgcagggcagtcgggaagcgacttcaccggaagcgcctatgaatcgagcggttcttctgccgagcatcgcactgggcaagtgattcttggtgcgattgccctctatggtgtgatgccagtggccgtgttgtttattggcttcatgcttggtggcatggcggcgcgatggaatcacgaacgcagcttggttcgagcggagttggctcaccgccgtcagcaggaacgcacagctcaggacattcacgattacgtatccaatgatttggcatacctgattttgcgattcgacaaggatattgccgatggcaagaccccttctgaagaagaattacgcgaactgcgtagcgtggctatgggcgcattggatcgcacgcatcaggtcattgatgttattgaaggcaggggagaagcggcgcacagtgcagtgactccgcatgattcgaccgttgatgccgcttctggcattgcatgtggcatcacagacgctgattgcccgctagccgagcaaattcgtgatgttgcgagcaatggtgaccgccgattatcagagcttggctttgaaggtcagacgattatttccggtgctcatggcgcagccggtcggagtggcctgatcgccgggctgctggaggaactgtacggcaacatcgccaaacatgccgacccggaagcgggctatgtaatgacgattggcatcggactggacaccgtccgcatcgcctgcatcgacacggcccgcacgtcatcggattcggatgcggatggcagtgcggacctatccaccggtaccggtctcaaccgttaccgacaattactagaacaacaaaacggcgccctgcatatcaccacgcaagacgccgaatggacattatcagcagttattccactgtgaggaaaccgatcacccaaccgacttctgcgcagtctccgcgccaaagaagccgacaatcagcatcgatgcaatagcaattgcgctgatggccacaaagatggacgtggcaccaagcgaggtaagcatccaacccaccaccataggcatcaacacattgagcagcttggccacggcgttcgcgaagccgacgcaacggaagcgaaccttggtggcgaacagttccggagcgtacacagccaccacggaagccataagcacgtacaggcacatcatgagcaggaagccaacgataattgcgctcacggtagaggtctggaaggcatacattaaaccgaacacgccagtgaacaggaaggccggcacaatcgtgcgcttgcggccgatgcggtcgataagcagagagccaatcagacagccgaccggggcaccgagcatcatcgccgtggaggtgagcagcgagctggacaggttaataccacgcttgaccagaatcgtcggaacccaagaagtgaaggcgtaggagcacacgttcgtggcggccacagcaaccacagctacaagcaggcagatgccgagcgaacggccgccggcgttgcgggtgtcgctggtgtcggccttggcggctgcgtcgatcagttcggagccgttggcctcaagctgcttgacgatggcgtcggcctcatcgtaacggccgtgcacggcgagccaacgcggggattcggggatgtcgcggcgcagccaccagatgatggcggcccccagaccgatggccacgaacagcggacgccaggaccagcgggggatgatccatgcacacagcagcatagcgatcggcacaccgcagttggccacgagcgagacaatcgcgcaccagtggccacggcggttcatcggtgcgaactcgttgaccatggcgaagccggtgacgatttcagcgccgaggcccaggccggcacccagacggcacagggacagcacggccatgttcggggcgaatgcgccgaggaaggtgaagccgccaaacagcagcaggttgatttggtaagccacgcggcggcccttcaggtcaccgacgaagccggccagcagcgaaccgaccagcagacccaggaagcctgcggacataaaggtggaattttgcgcaacggtggaccagtgtgtggccaacgcgctggaggcaacggcgctgccaatatatacgtcgatgctgtccatcagcatgccagcggcgaccagcgccacgatgcgatggaacatcggggtttcatgtgcgcgatccacgcgcgagataatatcctgaaccttggcttgatccgtcacggtggtacgtgcttgtgcgctttccatagccgcgggattgccggaaatctgctgttcagcagcagtcatatttgagccctcttcttgcaaacctgcccgcgtgcaactgctcaatgatgttgcggcgagcgaactcttgattggactgcgtgttccgttcgccctcccattgtgtgggatgaacgacgtttgcagtccaagtcttgaattccacgtagcgagccaatcgttgtgagatagctcactacatggggcttaactataggttcgatcttgtggcacgccgcgttgcggtcacattgtgaacgataacagagtttgtaacgctcctatatatgccccacttacgctcttaccccgttgaaagaaggcaaaaccgtgattcccatggggcggtaaaacactcatggggcggtatttggcccatggggcggttagcggattttgcctttccgcagaatagagccgttttcgcctaccgccccatgagggttttaccgccccatgagatatttaccgccctatgggtgagttaccgccccatgaaacgtgtaataacaaagcatgcccttgctggtggaagcgatgctttgctatttcgcctgcttgtcggcgaggatctcatccaccagcttgggcttttcggtcagctggccggtgaagccgggacggatatccatgtgcagcaccagagaagtgcggtagccctgctcggcgagcttcttggcggcctcaccggccaccttgagcacgtcgtccagattgccttccacgttggtgaacagggcgttggtttcctgcggcagggcggattcgcgaatcacttcgacggcctgagccacgtatggtgaaacctcggagcccacgccattggccgacacctggatggctgccacggtgttgaggtacggtttgccggtttccgggtcgatcggcacttcctgagtaacggcattacggtcaagaaccatgattctcctttttcagtagtgttaagctcccctggcaaggggagcttaacaaccacacttatgtcagcgatacttccagaaatgatccatcgggccggagccgtggccgagattcagctgggtcttcagcgcaccggtcaggtacttcttcgcatgcttgatggctttgggcagcgtgtcgccaagcgccagatacgaggcgatggcggagctcagcgtgcatccggtgccgtgcgtgttcggattcttgatacgcgcgccatcaaaccaggtcacggttccatccgtctcggcaagcacatcgttggcatcctcggtgccatgaccacccttgaccagcgcggcacagccgtaacgctccacgatgcggtgggcggcggcctccatatcctcctgatcgcgaatcagcgtatcggtcagtacttcggcctcgggaatgttcggagtcacgaccgtagccatcgggaacagcttgccggtcaaggccgcaatggcatcgtcactgatgagcttggcaccggaagtggccaccataaccgggtcgagcacgatgttcgtggcgtgatggaaggtgagtcgttcagcaatgacgtcgatgatgtcagtggcagacaccatgccgattttcaccgcgaccggcggaatatcctcaaacaccatgttgatctggtcggcgagaatgtccggtttggtgtcctgaatggaacgcacgccggtggtgttctgtgcggtgagcgcggtgatggcgctcatgccgaacacgccgcaagccagcatggtcttcagatcggcctgcatgccggcaccgccggacgagtcggagccggagatcgcgagaacagcgggcagtgtagatgttgcaatttgtgccatagtgttcattctaagtggggcccatgatgtttttcggagcgatttccttgatgttttgccgctcctgtggtgagatggggagggtttgctgattgcgattgattcatgaaatgttcgggaggggacatggctgataacgatgtactgcgccgtgacggcgtcttggtgcgcatcaccggttttgacgatgaacgcaccgcatattttggcgtaatgcctaatgggcacaccacacagctcacatttccgcgtcaggaggtgttcgatgtgggcgacgtgttgctcgtcggcacggatttctatcgtaaagtgccgcatgatgtgtggccgttgaagccccgtgtgggcatcgtgcgccgtgcgctcaacgaaggcgtggtcctggagacttccgatggcctcgaactgcttgaaggcgattacccgaattcgatcatgcccggcaacaccgtgcagttcaccgacctgttcggcatcgaacgagtgctgtggcccacggccatccgcccaggcgaatccgatcacgatgacgacatcaagcagtaccgcatcacgccgggcagcgatccgtcgcttaccttcgattcgttcggcggttatgagcaggtgatcacgcgcgccaaggagcttatcgaaacgcagctgggcaacagtgcgcagatgcgtgcgatcggtgccaagcccatcaagggcgtgatcttcaccggtgctccgggcaccggcaaaacgcatctggcccgcatcatcgccaatgtggcggacgcgcagttctatctggtgtccggcccgaccatcgtgagcaagtatgtgggcgatagtgaggaaacgctgcgcatgattttcgccgccgcgcaggcggacaagcgcgccatcatcttctttgatgagatcgattcgattgcgtcctcgcgcgagaacgataccaatggcgtcggcaagcgcttggtggcgcagttgctgacgttgatggatggtttcgagtccaagggcaatgttgtggtggtcgctgcgaccaatcgtattgaggacgtggatcccgctttgttgcgtccgggccgtttcgactggcagattcctttcccgatgccgtctgagcgcgaccgtttgggcattctgcaggtgcaggcccgttcgttgtcaatcgagggcgaactgccgttggtggatatcgcacagcggaccgaaggctggagcggcgccgaagtgtgcgccatctggaccgaggccgctctggtggccgccaaggaccgccgcggcgcgatccgtgctgccgacctcgtcaccgccttcgagcgagtcgagcgtcgtcccgaattaagacaccaccgggcataataattggctcccctcagagaggggagccagagaggtttactcctgggcggtggagtagagcttgccgccttgggcggtgtacttttcgctcatcgcatccatgccggcgaggatttcttcggggctgagcacgttggcggacaccacgtcgttatcgacattggccttggccttagccagtgcctcggagtcgatgccagcagcagcctccttcacgatttgctgctgagcggcctcgccaccgaatgccttgcggatgttctgggagatggccatcgagcagaacttcgggccgcacatcgagcagaagtgcgccatcttggccggctcggcgggcagggtgtcatcgtggaaggcgatggcggtgtccggatcgtaggacagattgaactggtcgagccaacggaactcgaagcgagccttggaaatcgcattgtcacgatccatcgcgtgcgggtggtgcttggcgatgtctgcggcgtggcaggcgatcttgtaggcgatcacgccctgcttcacatcatccttgttcggcaggccgaggtgttccttcggggtcacgtagcacagcatagcggtgccgtaacgaccgatctcggtggcgccgatggcggaggtgatgtggtcgtaacccggagcggtatcggtggtcagcggtccgagggtgtagaacggggcgcccttgcacacggccttctccagctcgatgttcatacgcacggtgtcgaacggcacgtggcccgggccctcgatcatcacctgcacgtccttggcccaggcgcgctcggtcagctcgcccagagtcatgagctcggaaagctgcgcggcgtcgttcgcgtcggccagggagccggggcgcaggccatcgcccagagagaacgccacgtcgtacttggcgaagatgtcgcacagctcgtcgaagtgcgtgtacaggaagctctcctggtggtggcgcaggcaccagtcggccatgatggagccaccgcgggagacgatgccggtcacgcggttggcggtcagcggcacgtaacgcagcagcacaccggcgtggatggtcatgtaatccacaccctgctcgcactgttcgatcacggtgtcgcggaacagctcccagctcagcttggaggcatcatcctcgaccttttcgagggcctggtacatcggcacggtgccgatcggcacgggggagttgcgaagaatccactcacgggtggtgtggatgtcgttaccggtggacaggtccatcacggtatcggcgccccacttggtggcccacgtcagcttctccacttcctcgtcgatggaggaggtgacggccgagttgcccatgttggcgttgagcttggtcaggaaggcggatccgataatcatcggctcggcctcggggtggttgatgttgcagggcatcaccgcgcggccggcggccagctcggagcgcacgagctccacatcgcagttctcgcgggtggccacgtactgcatctccggggtgatgatgccgtggcgggcgtaccacatctgggtgatcgggtggtccttggcgcgcatcggctcatgcttgcgtccacgccattccttggtggcgcggccgcgcttgatggcgcgcttaccatcatcctcaaggttgcggcggcggccctcgtagtcttcgatgtcgccgcggtcgcggatccagtcgagacgcaggggcttcaaaccttccttcgggtcgcacttggggccttcggtgttgtagtcgtggaacggcgggttcgggcccacgccgggcgtgtcgctcagcttgatttcggtgtacggcacttccaggtcgtaggaaccatactgataggtgaacggtacggacttggtcttgcggatgtgcgccttgtcgcgctgcttggaaccacgggcggcgatgtccacgcgctgctgcttggcgagcttctgggcatccttggcgtccttggcgttggtgaacttcttctcagtggcctcggagccaggctttgcggccccttcctgagcagcctgagtatcagcagcgggggtgtgggctacgacgcgcggcgcgtagccgtgcttcttgtcgccgcggacggccttccagccttcgaccatggtgcgcgcggcctcttccgggttctcggcacccgcgatggcggagaccgcgaaccagccggcggccttggtgccggcgagcatggccatatcggctgcggtcacgccgccgcccacgaccaccgggaattcgctggcagcgcagatggtgttgatctgggcggcgtccagtgtcttgccggagccgtcgttgccgcccacggaagcctcgggcttggtggtggagacgtgcagagggccggcgccaatgtagtcgatgcagccgtcgggcagctcgttgatgagctgaacgaggctttcggtctcagccgacagacccacgatggcctcgtcgccgagcagggcgcgggcttctcgcggctccatgtcggtctggccgatatgcacaccgtccaccttgatgcccttgcggcgggcctgccacaccacgtcggcacggtcgtcgatcacaaaggccacggaatcggacttctcattgtcctcgatgatctgcgcgatgtcgcgggccatgtcggtcagctcagaggcatcggcctccttggcgcgcagttggatgaaggttgcgccgccgcgcagagcctgatccaccacgtcggtcagcggacggcctttgcagtcctccggccccaccacgaagtacgcggacaagtcgaagttgtctcgcatggaggcgtatgggtattcattactcattattattcctacctttgttgtttcttgtggaagtcttattgggaaaaactgttatgagctccctcatcagagggaactgaaactactgcaccaaaatctcggattccgccacctgttcggcggtaacattccacagcgcgtcaaggaacgcgacctggaacgagcccggcccgtgcgaagtcgtatcggctatctctgccgcgcggttgtacagcagagatgcggacagagcggcggtcaacggatcggaaaccgccagatatgtggcagccacgccgcccagcgagcagcctgcaccgatgatcttggtcatcatcgcgctgccgcccggcagtcggtacacggtttcgccgtcggtcaccagatcggcgatgccggacacagccactgcacagcgggtggaagcgtcatgggaggaatgcttggcgtgctgttcggtcagatactgtgccagcgccaccgccgcaccggttgcggactccacgtcgtcgacggattccactccggcggggcggtgctcggaagcgtcccccacggtttcggtattgagcccccacatgttcgccagcgcgattacctcggaggcgttcgcgcgaatcatggtcgggggagcggccttgaaggtctgaagaatggcggtgcgggtgtggccgatgccggcggccaccgggtcgagcacccacggcttgtccaagtagttgagtcgctgggcgatttcgggcagcgcatccttatagaacggcagcagcgtgcccacgttgatgtagttcgcgcccgcgattttcgcggtttcgatcacgtcgtccggcaggaaactcatggccgcagtgccgccggccgccagttgcgcgttggcgaccaaattgatggtcacaaaattggtgaatgactgggccaatggagtcgtctcgcgtacgcggcgaacggcatcggcgatattgtcgcggatgggtgaatcggctggaaccggagtcccggcggtacaaccgctggacacatcggcaaacgatgatgcactattgctcatttactgctccctacgatggtcttaaccaacaggttctaagggtcaggctcaggcctttctcaactcgcgaaccacatgcgagtccccctgcactacagtgccgacgctatgcgccaacatggacattatcgtgacggatttgttcgatacgtgtcgtcaggtctggcgcgtcccgtccattcgtgatatgtggacgcctccgccgagcaacatctcccgaatttgtgacgctaacgcgatgtcagtggtacaaattggggaagggcaaaacaacaggaacaatatggaggtgtttgcgatataggaatcgctgcgaacggccgctcgtgagacgcggaacatataccggacaatgccgcctgacctgtcaccgtatacggctatcctgaagcggttgttattagaccccaaaccgttcaaaccagaaggtgcattgtggctcagtccaaactcgatgaagtcgtatcccttgcgaagcgtcgcggcttcgtgttccccgccggcgaaatttacggcggcacccgttccgcttgggattacggccccctcggcgtcgctctcaaggacaatatcaagcgtgaatggtggcgctccatggtcgtcacccgtcctgatgtcgtcggtgtcgacacctccatcattctgccgcccgaagtgtgggtggcgtccggccacgtgagcgtgttcaacgatccgctcgtcgagtgcctcaactgccacaagcgcaaccgcgccgacaagctcgaggaatcctacgccgagaagcacggcgacaagatgccggaaaacggcatgaaggacatcgtctgcccgaactgcggcacccgtggccagtggaccgaaccgcgcgacttcaacatgatgctgcgcacccacctcggcccggtcgaggacgagaacagcctgcactacctgcgtccggagactgcacagggcatcttcgtcgacttcaagaacgtgatgacctcctcccgttccaagccgccgttcggcatcgccaacatgggtaagtccttccgtaacgagatcaccccgggcaacttcatcttccgcacccgtgagttcgagcagatggagatggagttcttcgtcaagcccggcaccgatgaggaatggcaccagtactggatcgacgcccgcacccgctggtacatcgacctcggcgtcaagccagagaacctgcgccactacgagcacccgaaggagaagctctcccactactccaagcgcaccgtggacatcgaatacaagttcggcttccaaggttccgactggggcgagctcgaaggcatcgccaaccgtaccgattacgatttgagcgcgcactccaagcactccggcgaagacctgagctacttcaaccaggccaccggcgagaagtacgtgccgtacgtcatcgaaccggccgccggtctgacccgttccctgatgtgcttcctcgtggacgcctacgatgtggacgaggccccgaacaccaagggcggcgtcgacaagcgcaccgtgctgcgtctcgacccgcgtctggccccggtcaaggccgccgtgctgccgctgagcaagaagcctgaactgcagaccgtggcccagaacctggccgacgacctgcgcttcaacgaatggatgatcgactacgacgagtccggtgccatcggtcgtcgttaccgtcgtcaggacgagatcggcaccccgctgtgcatcaccgtggacttcgacaccctcgaggaccacgccgtgaccatccgtgagcgtgacaccatggcccaggagcgcgtcgctcttgacaaggtggccgattacgtggccgcccgcatcggcgagaagcgcacccgcgtgcccctgaagcccgtggaaatgggcggcgaggcttggcctgagtccggcgttcaggaagccggcggtctgtactaaagacgggtctgtatagaggctcccctctatgaggggagctgtctacgaagtggactgaggggggctcttgctgaggcgactcccctcagtcgcctacggcggcagctcccctcaaagaggggagccaaaactatttcagaacaggaaccacatggcagaatctgaaaccgaaaccaccatcaccgctactcacgagaccaacaatctcgacccgcgtacggacgcgccggcccggcccgagactccggtatacatcgcccccgtgcagctcggcaacattaccgtgccgaccccggtggtgctttcgccgatggcgggcgtgaccaactggccgttccgcgtgatctgcgaggaatacggtcccgatggtctttacgtggccgagatgatcaccgcgcgggccctcgtggcgcgcaacccgaaagccctgcgtctctgccatttcgccaaaagcgaaaaaattcgttcgctgcagttgtatggcgtgaatccgtccatcaccgaacaggcggcgaaaatcgtggtcgacggcaacatggccgaccatgtggacctgaacttcggttgcccggtacccaaggtcacccgtcgcgggggaggctcggccctgccatggaaaaccgacatcttcaccgagctcatccagcgcgtggtcgccgtatgcgagccggcgggcatccccgtcacctcgaagatccgcgtcggcatcgaccataaccatgagaccttcctcgaagccggacacatcgcgcaggaggagggctgcaaggccgtaaccctgcatgcccgcaccaccgccgaatactatggcggtcattccgactggtcccgcatcggcgagctcaaggaacacctcaacattccggtattcggcaatggcgatatctggggtgccgaggacgcgctcgaaatggtgcgcgagaccggctgcgacggcgtggccatcggccgcggatgtcagggccggccgtggctgttcgccaacatcaaaaacgccttcgagggcaatcccgaacggctcaacccgaatctgggcgaggtctgccgggtgattcaccgtcatgccgagctgcttaccgagttctatgagggcgatgagatgatggccgtccacgatctgcgcaagcacatcgcctggtatctgaaagggttcccggtgggtgggtccacccgcaaggcctttatggaatgcgagagcctggccgatgtggaccgcgagatcggcaagctcgacccgaccatcgaatacccgccacgcgtggtcgacaaaccgcgcggccgcgtgcgtttcgccaagaaggtgcacttgccgtatgggtggttggaatcgcgtaccaccacccacgaagagcgtgaggcgctcttcggtgacgacccaatggacgccagttactgagaaaatactgaaaatacacgcaacacgcgccattctgcgcgtgaatttccctccaagagtagcctgtttgcgctactcttgggtgtaaccgtgaagtgacaggagccaaacgtgagcgagatcgcgcagaatgagttcaacgacaagaccaacatcaaggttgttggcgtcggcggtgccggcggtaatgccgtcaatcgcatgattgccgagggactgcagaatgttgaatttgtggcggtaaataccgatgcgaaggatcttctgcgctccgacgccgacgtgaaaatctccctgtccgatcagtccagccgcggactcggcgctggcgcggacccggagaagggtgctaaggccgcacaggatcatcagtctgatatcgaggaatccctgaagggtgccgacatggtgttcgtcacctgcggtgagggtggtggcaccggtaccggcgccagcccgatcgtcgctcgtgcggctcatcagcaaggtgctctcaccatcgcggttgtcactcgtccgttcagcttcgaaggtcctcagcgttccgcttccgccgaatacggcatcgacaacctgcgcaaggaagtcgacgcgctgatcgtcatcccgaacgatcgcctgcttgagctttccgaccgttccatcggcatcatcgaagccttcaagacggccgataccgcactcctcgccggcgtgcagggcatcaccgacctcatttcgatgaattcctacattcacgtcgatttctccgacgtgaactccattcttcgtggcgctggtactgcgctgttcggcattggttccgcgcggggcgaagaccgcgccacccaggccgccgaaatcgccatcagctccccgctgctcgaggagagcatcgagggtgcccacggcgcgttgatcaacattgccggcccgaccgatctgaagctgcaggaagcttccgccgccaccgagcttgtacgcaaggccattcaccccgaggcccagatcatctggggtcttgctctggacgatgcctatggcgacgaagtgcgtgttaccgtcatcgcggccggtttcgatccggttacaccgcaggatccctctgccgccgctccggcaattgccgtaccggccgcccagccggctgccacgcaaacgcagcagcccgccgccgctccggccgcccagcccgtggccactccgcgtccggaattcaccccgacgaccgcagacccggcatccctgccctttgacgatccgactacctcgcatccgaacatcgccgtgaacgatcccgccggcgatctcgacattcctgatttcctgcgctgaaaggactgatccatggctgggttcatgaaaaacgcgatgtcctatctgggcatgagcgacgttgtggacgatgaggacgactacatcgaagaggacgaggagcagaagccggctccgaagtccgcattcgattccgaccatacggtcacgccgctggcatcaaccaccgcgcctgccgcatcgtcgactaccaagccgttccccggtggtcgcgtgaacagaatcaccaccatccatccgaagtcatatgaggatgctcagctggtcggtcgcgcattgcgtgacggtgttccggtcgtactgaatctcaccggtgtggccgaagccgtggcatatcgcattgtggacttctccgccggcgtggtgttcggcgtgcgtggttccctcgagcgtgtcactccgcgcgtgttcctgttgagcccggcgcaggtgaacatcaaggtcgaagagccgacaaaaccaacctcggcacacgatttgttcgctgactgaccggttcagtagttttcgcattcgacgttatatcggtattcggccgactcccagcaaggagtcggccgattcttattgcgctccgagcaaacttttcatgcgcggttgttagtctgtcagcatgctttccttagtgttctctctgatcggccgcattcttgcatggctcatcaacgcgtatatcacggttctgttcgtgcgcatgattctggactgggtctccgttctcgcacgaaactggtatccacgtggtgtggtggcccagctgatcaacattgtgtattccattaccgaaccccctctgcgctggctacgtcgctatattcgtccattgccgctcggctcgatttatcttgatgtcagcttcatcgtgctgtattttgcgttggtggtactagaaagtgttgttctgatagtgttctgaggccgtttttgacccgccggaggcatatatctggcataaaaacccacgttgaatgttctgaaacgatggggtcgtgatagcattctgacttgagaccaacgtaagtgcgggcaatgccccaaagcgaggtgcaagatttatggctctgttgacgccgaaggatattagggagcataccttccagactgttcgattcaaggaaggttatgatgtcgacgaggtcgatgacttccttgatcaggtcacggaaaccgtcgaggctcttggacgtcaggcggtagccggcggtcaggccactcagtctctgggccctgacgtgaccaaccttaatgcgaagatctccgatcttaccggtcaggtgcagcaactccagtcggagaatgctggtttgaagaacgctgtggctcaggcccagcaggccgctcaggctggcaatgatcaggcggcacagcttgcctctgccaagctcagcgaagccgaggaatccaaccgcgcgctgtcctcccagaatgagcagctcaagggtcaggtcgatcagctgaacgctcaaatcgatcagctcaccgcccaggccgctcaggcctccggtaaccaggaagccgtcggccagcagatcgccgccattcagcaggaacgtgatcagttccgcgcggccaacgaggagctgtcccgtcagctcgccgctgctcagcaggagggttccgccgctcagcagcagtccgctcagatcgctgaactgtctcgtcagctcgaagaagccaagcagcgtgaaaaccagcttcgtgcccaggtttccaaggtcgagccgagcactgagaccggttctctgcagaagatcgctggcgtcgcttccatgccgggcaccgagcccgagcgcgccaccgccatgctgaccctggctatgcagctgcacgatcagtatgtggagaagggcaagaacaaggccaaggaaatcaccgaggccagccagaacaagtacaacgatttggtcaccaaggccaacaactactccgagcgtacccgctccgaggccgacgactactccactcgtactcgttccgacgccgacacctattcggatcgtacccgctccgaggccgacgcttaccgtgaccagattcacgcggatgccgagacctactcccagaacacccgttctgaggccgacgcatactccgtcaagactcgtcaggatgcggacaactactccaagtctcagcacgatgacgctgacaactacgagaaggaagtgcagcagcgtgccgccgagtatgacaagaacactcgttccgcagctgatgcgtacgacaagaacacccgctctgcagccgatacgtatgccgagcaggtgcgcgacaaccttcaggctcagtccaaggtcgtcgagggcaacatccagagcctcaagcagttcgagactgaataccgcgcccgcctcaccgagtacctcggccagctggcatcgcaggtttccgagtcgaacaactacgtcgaccagacctcgtccaagaccaactgagcgcaggcaggtacaggtcgtatgacgaaccaacagggacggctgcgcactcgcgtggccgtctttgcatgtgtggccgcggctgcgctgattgtcgatcagctcaccaaggcttgggcgatggccgcgttatccaacggtcagaccattcgcgtgattcccggactgctgtccttcaccttggtgcgtaatccgggcgcgtccttgggcatggggtcaggcgctacttgggtaatcagtctgttggccgttgtggcttgcgtggcccttgctgtggctggggtgcgcactatctccatgaaatggtcggtggcgctttctttcgcgtttgcaggcgctctgggcaacctgattgaccgtgttatgtacgctgacggcttcctcaacggcaaagtggtggatttccttaactatggctggtccgttggcaatgtggcggatatctatctggtagtcgccggtgtggtcctggtgattctgattcttatgggggagccgttctcccacaaggatcttatcgagcaatccgacgaatccctacagtctgagccggaggcggacgccaagtaatgagtcgaatggtccctgctcccgatgcattggtgggtaagcgtttcgacgtagccgtggccaaaatgctgggtatttcacgatctaaagccgccgatctggttgactccggacaggcgcgcgttttagggcgtgaagttgcgcggtccagcacgttgcaggcgggggagaccgtcgaatttgatttggcggaggaacaggccgggcctgagcctatcgcaactgatatggctgttgtctacgaagatgatgatgtcgtcgtagtcgataagcctgtaggcgtggcggcgcatgcctcggttggctggaccggtcccacggtattgggatcgttgcgtgatcgtggcgtgcatatcgcttcctatggcgcggccgggcgtgaaggcattgtttctcgccttgatgtaggcacttccggcttgatgttggtgtgcaagtccgaccttgcgtacaccgagatgcgtcggcagttcgccgagcatgaggtaaagaaaacctatcatgcgctcgtgcagggtggtcttaaagagaacaaagcaaccattgaggcaccgatcgggcgcgccaaagtgtccgatttccgcttctgcgtgactccggccggcaaaccggccgttacgcattgggatgtgttggagcgtttcggccatgaggccacactggtatccgtgaatctggagaccggacgtacccatcagattcgcgtgcatttctcctcgattgggcatcctctgtgcggcgaccccatgtatggtgccaatccggtgctgtctgaagctttgggacttgaccggcagtggctgcacgccatgaagctcgaattccgccatcctcgcacccgcgtctggaccacggtccggtcccagtacccggccgacctggccgccgccctcgatgccatgcgtgcccgtcacatcgaacccgctgaacctgccgagcatgccgaagttctggtggactaattccgcaacgtgtgcatcatgcgttttaatatttagattcagttccagcctcgccggattcatcccagaataatgagagatcggtcatgatggctctccgtcatgaccataccccaagtgactgcggatgctgagtaccgttcaggccaatggtcggtaaccgtacgtgaattaccggtatttccgctcaacgtgtctcggtactccagcgtgaagtgaacagaaatgagccaaagcagtaaggctgagtacgagtattcgtggccgtcatcaatcgatggtggtcattgggattcgcgccatgtactacgcagtatgttgtacgctctgcctggctgtgactggattctggggcccgctgccggttgacgaggctgaaggcatgtaaaacttatgcatactgatctgttttcttaaatttggctttatcaatggtgtcgcgcaggctctttacccgcgttcggattcgatcgttcgttttctccatggtcgtccgggctcgatcgagccggaccggtgccatatccggatcgcagatgactggcgattccggaagatctacgaaaacgtcatctttagatgacgattcaacgtttcatattgcaggtctccttacggggcgttacgtccgatcgcattctttgaaaaatgggccacctagatttccgaggagattgaagggcaacacgtgacttcggtagaccaaagctgccggaatatctccgtcaaaccgcctgtagctcgatggtgttgtcgcattgtgcggcgatgccaagatcgtgggtgacgatgatgagggtcttgccgtattcgtgctggaggcggagcatttcgtcgaagacatgttgggcgagatcgcggtcgagcgcgccggtgggctcgtcggcgaggatcaaatccccgggcttcaatatgcatcgtgcgagggcgacgcgctgctgttcaccgccggagagggtcatgatcttgtctcccgcgacatggccgagtccgagccgggagagcatggccttggccttgcgctgcctgacctgtttgctgtcacgggtgaagcgcatgccgagggtgacgttgtcaagggcgctcatgtcgtggtagggggctgcggatgcgggcaagccatttcttggaagacgtttcgtcgagattggcgggagcttgcgtcagcaggcgtcgatgaaggcgctgaggatgcgacgttggttgctatcggcgcggtgagagaactcaggatgccattggacggcccagacgaaacgcttggccggcatccagaccgcctccacgatgctgtccggcgcagtggccatcggttccagtccctggcccagcgtgcgaatcgcctgatggtgataactgttgacgcccagcgtataggcgcgcggatgatacggcctgccgaaggaatcgacctcatcggcctccgcctcactcgggccgttgtctcccagcggccacaacgcgcgggccaacggcgaatcgggcgcgatcgacacttcgtggaccaccgggtcatacggcggcttgtcgccatgatgcacgaccgggctgggatgttcgtccggcagatcctgccacaacgtgccacccaaggcgacgttgaggctctggatgccgcggcagatgcccagcaatggcttgtccgccgcgatgacggaggggatcaggcgctcctccatccggtcgcgggccttgcatagtttgaccgtcttggggccggccgcctcgccataccgttctggatccacgtcgtggccgccggtgaccaggaacccatcgcattggctgaccagctgttcgattgtagtctcgtcgtcggtcagcggcagcatcaccgggatgccgccggcttcgatgatgccgtcgaaatagccgggcagcatccacaggctattcagtgtgtcgtcccacaacgggaccacgccgataagcggacgatgggccatcgatacctccaaatacagacttactgataaagcgactcaacttgctacagtctcaaacctgaaaattgtaccactgtgacttgcgggcggagcctaccccgatgtctatttagaagtgcaacacccttgttggtcttgcaattctaacagttcgtcggcgaacgcctcggcgggcgtgcggtagccgagcacgcgcatggggcggttgttgatctcgtcgacgatctccctgacctcctttgccatgtccatccgtatctcgcagcgtttggtcagataccggcggatcatgccgttgcggttctcgttgcttccccgccgccggctggagtacgggtcggcgaagtacgtggccatgcccagcccgtcgcgcagcctttcgtggtgggcgaactcggtgccgttgtcgtgcgtgacgccgacgcgcgcgccggccggcagcggcgagaacatgtccagctgcgccccgacgctctcgccggcggtcttgtccggaacgacgcgggccatgaggaacctggtcctcctctccacctcggtgtgcaggttgcatcccactccgatgacgctgtcggcctcccaatggccgaacgcgctcctgccgtcggcctccggcgggcgttcggagatgggcactcggccggggatcgggaagcgcgacgtcctcctgccgccgtgcctgcggcgccgcctgtgccctcgcggcaggcaccgcgcccagcgttcccgaagcggcctgctggagtagacccatcggtagatggtctccgggcacacgcgcatgagcgcatcgtccggccacaggacgtgcggcctgccgctgacgggcagcggcgaccagccgcggcccagccattcggccacctgcgcccacaggcggtcgtgcgacagccggtagggctttcgtggcttggatctcctgcggtcggccttgcgctgcgcgggcccggcgatgtagtagcggccggtccatggccccgccttcagtcttttcggccggtacgggcggtacgactcgttctcgttggacgggaaccatgtgttgcgcttgatctcccggctgatgctggacgggctgcggcccagcatcgcgccgatcccgcgtatgctggcgccgttgcctacctcgatctggatgacctggcgttcctcttccgacaggtgcgaatatacttctcccataggtgcgacatcccttcggactggttatctggacaatctccaatctaacgggtgttgcactttcatttagacaacgggaggcgattactcttgtcgctggttgtcctgtcatctaaagatgacaggacaaccagcgattcttcaggtttcttcattgacgttgttttgttcctaccgagatgtgcataatggatccgcgtctgcgggagccacggcctgacgcggtcgatgggcgcgaagggccgcaggccggacaacgcagccgccgggggcttcggcaggcaagcaggagttcttccacaagcgaagcttccaaggtgtctcgatcgacgagttcgtcacgttgttggacgggtgcatggtctggtacagggacaagcgcatcaaactcgaatacggcatgagcatcatggacaaacgcatcgaactcgggctcgtcgcctgaacgcgcgtgctatcgttgcgaacgaccatacagacaacgaagtccaacaaaacgtcaccccccccccgacgagcgttgcacttacaaattgaattcgggacaatggtaacaacagctacagttgaactatgcatgggttgaagagtgcgattgacaggggagcggacgcgtgggcgcgttcgctgcctgggcgcgtgctcgaccggtatgtgtcgcggcgcggccccctgctggcgaatggtctggcatatggtctgctgttcgccttttttgccggcgtctggattgcggtgagcgtgttcggccttatcatggtcggcaacattgattggcagcagatgctgattgacgcggtgcgtgaagtcattcccggtgtggccgactcgtttctgacgtcttccgcactaaacaccatgtcaagcacattgacgtggaccggtctggccacgttggccatattctggtggacggtgaccggctggatgaactcgctgcgccacgccgtacggtccatgttcgacgactgcggcgacgagctcaatatcgtcgtcgcaaggttacgcgatacgcttgccgccatcgccatcgcaatactgttcattctttcgaccgcggccggtacggtgtccggtggcatcgtacgccgactgctgcaatggggcggcatccccagcagttcgttgcccggcaccgtgcttttggagatgaccggtttcggtaccggcgtcgcgctgaatttcgcgttgttcatgttgctgctgcgtgtggtctcccacatcaaagccggacgattcacgatattcggcgcgttactgggatctctgacggtttccgcaatgcagcttctcggtgcgcgactattagccggagcctcccgcaatccgctgctcgcaccgttcgcggcgttgatcggcgcgctggtgtggttcaatctcgtcgcccaggtcatcatgctgtgcgccgccctcatcgcggagtgccgacgggaatgctgaacagccgcccagacc

SEQ ID NO: 3996 - DNA, 17797 bp, Unknown
  R22_24m  MAG No. k141_53748
cgaggccacaaactgccaatcgcgtaaacgatgaacggagacaacgctatcgacgcaaacacaatgacgaacaccccaacattggggacggccgccaacggccaccaatcacccgaccctttcgccttcgccgcatccatgaaaactacctgcaccaccacggacaccacaaaaacagacaggaaccacaaagacttcaacaccacgccacgcattccgaacgcacgatgccccggacgcggaccatgcagatgaggaaccgtcaacgccaacaagccatgactctcatactccagagtcggaccaccattcgccgcagaccgttcatacctgtctctatcaatggtctttaacatatccctgaccgcaggatcgttctggtctcccttagcaagcagaaactgatggaactcctcatcagactcatcctccgaaggagactccgataaacgtgcatattgctccggttgccgaccatcatttctagaatgcttactcatcgtcaatcatccatcctttatagatcactgataccaactcgaatggcattagatgcctcagccgccccatcggacaactttcccggtgcctgatatatggtcttgaaattccataactgatctggatccggaacgagcgtcttgaaataatcctgtggcgaatgcttccactgcagaccaccatccgcagtcggattcacgaaaggcttcaccactttcgccgtatgccaacgtgtcatacgtcgcgttggcatacgacacaacatgctgaccaaaattcatggtgtcccacaccgtccgacgggtgtcgacagccgcgatattcttcatgtcgtggataccccgaaaatcggtatacccggttcgggcattcataattgtgtcgccgatggaccacccatggcctttgctccaatctccgaatctcttgaactgaccatcccagaaatccctcatcaccgtgttgtttgggttagaatgagcggcattcgcggcctgtttcgcatcctgccattcggagacgaaacgattccatgccctgccactgttcttcaacgaatgctggataccgactacggtgttatgcattccctcacctagagcattccatccctgccttatcatccccttggcaaagactttcgcgccgtcatgattcaaagtatccaacacatgctcccgcgtttgcattgtccactcgcttccgtcacttagtagcttatggaatccgcgattttcagaagcttcttaccccacttagtcggctgccacagtcttgcgcgtaaagctttttgtaaattgcgttaatcaccaccatgtctctcctcaataaaaaaatcatttgtgatgttctatacgtttgaggcccgtgccggcgtcgatctgagtaaggctgagattgatgtcaataagcataatcgaaccatcgacatcacgctgccagcacctactatctagtcagtttcggtggacccggattcattgagattctttgatgaagaatcttcactatttaacggcaatgaagtttcagatacagcagatgccttgaaagacgccaaaacgcagtcggaaaagaaactgaataagggggatttgttgaagaatgctaatgagcaggcaaaaacggtgattgaaaagatgtattcatctattgcagaaatggactcgtatacggtgaatatccacacaacagagccgaaaaaaatagtctacattgttgccaagcgctgttactcatgctatgaggcatgagtaacagcgcttttttatggtatagcaaggtcaattatttatcgtcaaaaatcagttgggaactgatttattcttggaggttatgcagtcgcgtcataggaaaaacgaggaattgagaggactcttatgatttcctatgtacgaaacgtgggtaagacggtacttgcagcggtcgttagtttggtgttcatcgttggcgctgcaggctgcggtaacactcaaaaggatgacggtccagactatgcggatgatgaggcgatgtccataatcgcaaaagcgtatcagaagcgttcggatgttctcgaccagtacgagcagaagaaagataccgattccgtcaagcatgtcaaagatgctgttcaggctgaaatcgataacgatgagcctttgaaagagcggcagttcaaggattcgaagttgcaggagaaagtcattacttatatcaacctgcttgaggattcacaaaaagtgaacgaggattattcctatctcagctcggattacagcaccgaatggactaaggtatacgataagcgttcggcattgctcaaggattttgtcgataattacaagctcacggtagacagtaaatatcaagatccattgaatgatattgttgccaacggttcgtccgtcaagaaaaagacggaaacggaagacgcgctgaataatctgattgcctctgcgacttttgagaaaactgatgacggatatggctactacgcatactcagccgtcatcgaaaacatcagcggaatcgatttcggtaccgtcaacttgatattggctctatacgatgccgatggcgtgaaggctgccgaagtatacgccagtactaatgcttggcctgcaggagaaaaggtaaaattcgaaaccggtagcgatgccgatgcggcgcaggtgaaggcatctgtcgaccactatgaagtagacgattaagcgtatccatacacaacagatagtgatggcccacagggaatcttcctgtgggccatcactattaaacgtcaatatcagtcaacttacgccgagaactgtttgccgaattccgagaagagctgacggcgggcgaagacgagcaggccgagcagcaccagcagggagaccagcccgctgaccatcaccagcacatcccacggagcccagccgagcggaatgaacgtcagaggcagcagaccggcgacgatgtcgaacgccagatacttggcgtactggtcaatggccttggcccgcagcacgataagcagcaccacgtcaaagaccagcgaaaccagacacgtgatcggtatgacgaacatggtgacgacatgattcatcgtcgccacaaaccagaccagcgcaatcgccagcatgatatagaaatatcgaaacatgaggcgaagcggccgcggcgcgtgcagaatcgcactgttgatgaacagcacgctgatgatcagcgcggctgccgatgcactggcaatcggtatcggccacgaaaacagatagctgaagaagccatgcagcagcagaatcgcgccggttacaaacgtgatgatctccaccgccaaacgcctcggacgcagatagatctgctgcgcggggaatgcggcgggagaggcctcgccgtgcaattcgttctgacagagtgggcaacgggccatatcgtcggtgaaatcgacgttgcaggcatcgcaatgcttcatgccgacgctcctttctccacatgcgcgccggcgatgttcatacggccgctgatgccctgcgcggcgagaatccgacacaggttcttgatgacgttcagatcatggtagacggtggagatgccgatgctcaggtcgtcgccaaacgagcagaccgtgaaattcaggctggccggtgtggtgaggaagctcaccgaacgcacatggcgcgcgagtcgttcatccaaggtgactcggccaaggttcgagacggtggtcgtggtctcgcggtcggcgatgaaccgggccagctccagcacccagtccttggccggggagggcgcgagacgcagcgccggattcttttccagcgcaatcatgcggttcatatgcgattcgacgcgctcgcgactggtggcatggtcgagctgctcctgcacatggcgggcgatgtcggccaacggctcatcggtcagcaatccactcataccgttgccgtgcgcggtgcgggcgacggactgctggccgtcgccggtcgcgtctgggcccgttgcggaagttttcgcggagtcctcatcggcttcgatatcggccggcgtgtacgccacgtaagtcatgccgtagaagttgcgcacggtctccgacctgaagaaggcgcgcaagtcgaccggaatatccacgcgaatcgcgcgattgcgggcgcgcgagggcatgacgtcgcgaatcgcgcacagtatcgcggcgatgaggtaggaggtgaggctcactccgcactgatgcgctgcaccaagcaccttgctggcgctgacgtgatattccatgaacgtgggcgcgtcccggtcgatggggccggccagccggtagatcttcgtgccgggcgcggcaccggccttgtctttctcgtagtatttgtcgaagctgttttcggctttgtcgctgtccgagccgtcgtaatccgaaggcacgcccggcacgtcgtatcgctcggcgatgtaggcgtgcaacagtgacttgaacaggttgatggcgccgcgaccgtccgaaatgatgtgcgagacctcgagattgacacgattgcggaaataactcacgcggaacagcatgcttttgggcccgtaatgcagtcgcgagcatatcggcagatgttccggctccaccagcggccggccgtccgactgttcgaggtaatgccagaacatgccgttgagcaggtgcacgttgaagctcgggaactgggcgatggcatggtcgagcgcgtgctgcaggatgtccggggcgatgtcgtccgccagctcggccgaatagcggaacacggtctgcgaggagcggccagcctgggaggagtagaacttgccgatgttgtctagtcggtaccaagtacgtcttgccatgcgtcgcctccctccggtgcgttggcggtggtgccggtgccgggagccggcaccagcggtgtgtcgtcgaggaaatgctcgatgatccggtaagtggtggacaccagccctacggccgacgtgttgagcagataaccgtggatgccgtcgtgaatccggtaacaggagacgttgtcgttcaccaattgcagacgacgggcgtacgcttcgtcctcgtctctgagcgggcagtattcggcggacaacaccagcgtgcgcggctgattgctcaggtcatgcgcagtgagcggcgcgaaatacggattggtcaggtcggccacggacgaacggtacatgtcgatgtagtcggccatgtcctgtgcggtgaggatgtagtcggtgccgttggtccgcaccgattcgaacgggctggtctcgggattgtagtcgttgccgaccaccgggtaaagcagcatctgcgtgcgcggcatgaactcgccgcggtcgcgggccatgagcgagacggcggccgcaagattgccgcccgcgctgtcgccaaacagcacgatgctgtcgggatccggtgctgggattgtcgcagatatatcgcccccgccggtgggggctgtcggcgcagccgactgggggtggtcaacatcaacagaaccacccaccccagaaatcggcaattccccagcaaacagctgccgggctacctcatagcaatcctcaacagcagtagggaagcggtattcaggagccagccggtactcgaccgagatcacacggcgttgcagacgtacggccatatgcgcgcaagcctgcgtgtacaggttgatgccgcctgtggtccaaccgccaccgtggaaaaacaggatcgtgccacgcggcgtgactgagggaagttccgtgttggcattgccggaaataccgtcggtgttgccgctcgacgtgctttccttgatgggtattttgggtaggactttgggtaatacggcgggcagaatcgcggatattgccgaggccactggcgtgccattggcggaagattcctccagggcttcgggcaggggcgctccataggcgaccagcggcgtgaacactcgcaatggtacggcatatccatccgccataggcgcgaaggcgtcctcgacacggcatttcggattggcgggtgcctgcttggcgataagctcttccgccacgcgctgcaatttgtacgacttgcccgcgttgggcttgatgtagctggcggccttcatcgcggcgaacaatgcctcgttgatcggcatgacgacaggtcctttcagcggcggattcggtagtgcgaacaccccaaccttagcccatgaccggcatgaacaaaaaagggaaggaacccgagagttccttccctgtgtgccgtatcaggcgcgatacgcgccgattatcaggcggcgaagtattccacgccggcctcgaagatcggctggtacttgttgccgggcacgttgacgtacaggccgttgccggaacgctccgagtgacccatcttgccaaacacgcggccgtccgggctggtgatgccctcgatggcgagcagcgagccgttcgggttcacatctaggtccatgccgggggtgccggtctcgtccacgtactgcgtggcgatctggccgttggccctgagctgggcgagtacctcgtcggaggccacgaagcggccctcgccgtgggagatggccacggtgtggatgtcgccgaccgaagtcttggacagccacggggagaggtcggaggccacgcgcgtgcggaccagtcggctctggtggcggccgatggtgttgaaggtcagcgtcgggcaggcgtcggtcatcggcacgatgtcgccgtacggcaccagacccagcttgacgagcgcctggaagccgttgcagatgccgagcatcaggccgtcgcggttcttcaacaggtcacgcacggcctcggtgacggccggcgcgcggaagaacgcggtgatgaacttggcggaaccgtccggctcgtcgccgccggagaagccgcccgggatcatcacgatctggctcttgttgatctcatcgaccaacgcctgcgtggattcggcgacggcggccggtgtcaggttgttgatgatcagcgtggtcacgtcggcgccggcgcgctcgaaggcggcggcggaatcatactcgcagttgttgcccgggaacaccgggatcaccacatgcggcttggccacggaagagccgacgtacacggtcttcttcggcgcgtggaagtcgatggtctcgacggtcgcgcccttgtcctcgcccttggaacggtacgggaacacggattcgatgccggactcccaagcttcctgcacagcgtccaggtccagcgtctcgccggcggccttgaacacgtactcggaggtggtggtgccgatttcgccgatctcgaccaaattggagacggccggaagcttggcatcgtctgccagctcgacgatgaacgaaccatatgccggggtgaacaggtcgtccacggcgatgctgtcgttcagagtcacgccgatgcggttgccgagcgtcatcttgaacagggcttcggcggtggcgccatagcccggcgtggagacggccagggcatcgtggaagtcggtgagcttctcgatcacggagaacacctcaagcagcgcatccttgtccggggtcagaccgtcggccaggtagcgcggcgcgatgcgcacgatacggtgatcggcgtccttgaattcaggggaggtggcgcgcttcatgttgcccacggccacggcgaaggagatcagcgtcggcggcacgtcgagatcctcgaacgaaccggacatggagtccttgccgccgatggcgccggcgcccaggtccacttgggccatcagtgcgccgagcacggcggccgccggcttgccccagcgttccggctcgtcgcgcagcttctcgaagtactcctggaagctcaggtaggccttctcatgctcgaagccggccgcgaccagcttggccagcgactcgaccacggacaggtaggcgccggtgaactggttcttggacatgatgtacgggttgaagccccacgccatcgccgaagcggtggtggtctcgccgaacaccggcagcttggcgaccatggccatgttcggggtgagctgacgcttgccgccgaacggcatgagcacggtgcccgcgccgatggtggagtcgaagcgctccgaaaggcccttgttggaggccacgttgatgtcggtgaccagcttgttcatacgctcggccagcgtgccctcgccccacggggtctcgtaggactgctgtgcctcgacatgcacggtctggtgcttggaagcgccgttggaggccaggaactcacgggacagattcacgatcttgtcgccgttccaggtcatcaccatgcgcgggtcctcggtcacggtggcgatcaccgtggcttcgaggttctcttcgcgggcgtagatcaggaactcgtccacgtcctcggcggccacgtccacggccatgcgctcctgggattcggagatggccagctcggtgccgtccaggccctcgtatttcttgggcacggtgttgaggtccacgaacaggccgtcggccaactcgccgaccgccacggacacgccacccgcgccgaagtcgttgcagcgcttgatcagacggcaggcatcgccgcggcggaacagacgctgcagcttgcgctccaccggagcgttgcccttctgcacttcggcgccgtcgagttcgagcgattccacgttatgcgccttggacgaaccggtggcgccaccgatgccgtcacggccggtgcggccgcccagcagaatgatcttgtcgccgggggccggggtttcgcggcgcacatggtcggccggagtggcggccacgaccgcacccacctccatgcgtttggccacgtagccggggtggtagatctcgtcgacctgaccggtggccagaccgatctggttgccgtaggagctgtagccggcggcggcggtggtcacgagcttgcgctgggggagcttgccttccagcgtctcggagaccggcacggtcgggtccgcggcgccagtgacgcgcatcgcctgatacacgtaggaacggccggacagaggatcgcggatgcagccgccgatgcaggtggccgcgccaccaaacggttcgatttcggtggggtggttgtgggtctcgttcttgaacaggaacagccagtcctcgtcgtggccgttcacgtcaaccttgaccttgacggtgcaggcgttgatttcctcggactcgtcgaggccggtcaggacgccgttcttcttgagccacttggcgccgatggtgcccatgtccatgaggcagacgggcttggcgtcgcggccgagctcgtggcgcatcgccagataacgctcgaaggcggccttgacggtggcgtcatcgatggtcacttcgtccagctcggtgccgaacgtggtgtgacggcagtggtcggaccagtaggtgtcgatcaccttgatctcggtgatggtgggttcgcggccctcctcgctgaagtacttctggcagaattcgaggtcggccaggtccatggccagaccgcgctcgtcgatgaacttctggccggcttcggcgtccatctcgttgaaaccggcgatggtctcgaccttgccgggcaccggcacctgggtcttcagggtttccttggtctccaggctggcctcgcgggcctcgaccgggttgatcacgtaatgcttgatggtgtccacgtcggcgtcggtcaggtcaccttccagcgcgtacagcttggcggagcggaccgtcgggcgctcgccctgggagatgagctggatgcattcggcggcggagtcggcgcgctggtcgaactggccgggcaggaactcggtggcgaagaccttggctccggcgaagtcgggcaggtcgtaggccacattgtccacctgaggctcgctgaacacggtgggcacggtctggccgaacagctcctgggagatgccttcgacgtcatagcggttcacgatgcgcagggccttgaggccgttcagtccgaggatcgtgcgcagttcgcccgcaagctgctgggcttcgacatcaaagccgggcttcttttccacgtacacgcgaaaaaccatggaaatcctttcttgaaattattgaaaaattgaagaagtgcggtaaaagaacttggctcccctctccgaggggagctgtcagcggagctgactgaggggagttgtcatggcggtgaacgtcttgacctcccctcagtcgcctatcggcgacagctcccctcagagagaggagccagctgtatgtttctgctacctgcacctaaacgacttattcggcgacttcgatgccttcggacttggcgagttcggcgaggcgctcctcgatctcttcgtaggccgggatgatgctgccgagaccacggcggaacaggtccttgtcaaggtgctcgaccttgccggagtggtccttctggtcccacagacggcaggaatccggggtgatctcgtcggccaacagcagcgtgccgtcggtggcgcggcccatttcgatcttgaagtcgaccagcttgacgtcgatcttggcgaagatctcgatcagggcctcgttgatcttgcgggccagcggggcgatctcggcgagatcctcgcgagtgcatacgtcgagggccaccaggtcatcgtcgttgacgaacggatcgtgcagatcatcgttcttcaggaagtactcaagcaccggctccttgagcggcagtccttcctccacgcccagacgggagcagaagtggccggcggccacgttgcgcagcacgatctccaacgggaacatgttcaccttgcgtaccagctggccggtgtcgttcactcgcttgatgagatggctgtcgatgccgcgcttcttgagcaggtcgaagatgatggtggtgatgaggttgttcaggcggcccttgccggtgaagtcttccttcttttcaccatcgccagcggtggcggtgttcttgtattcgacccacagaacctcgggatcgtcggttgcgtacagttgcttggccttgccctcgtagagcttttccagcttctccatgactcacctttcaggagtggaatttctgggtgaactaacggtaaaagggtaccaatcgagggctacaacaacactcggcatgacgctacgatgcggccagcgcatcatacgtcgctgcatcgaacgaccatacgctgttgggatggcggaggcggacggtattggtccgacaatcgactcattgccggtcgcatagtcgttcggagtaacagtatctacgcaagcacgcgaacactcagatgttcgtcaatagacaaaacgtgagtgtacggccgcgcacgcacgataatgggagtgacgaaatggtgcaaggaggttcgtcatgatcgatcatattggtttgtttgtttccgacgccgcacagtacgcggatttctacgagaagctgctggccccgctgggctacgtcaagaaagtggcgtacccgaccgccgtgtgctttgccaatgacgaggatggtgacagcgtttggttggagtctccgaaggacggcaacccggtggtgccgtctcatgtggcgttccgcgccaaggatgaggccgccgtcaaggcgttccatgaggccggtctcgcctctggcggtaccgacaacggcgctccgggcccgcgcccgaactatggccccacgtattacgccgcgttcatccacgacccggacggcaacaatattgaggccatgctgagctgatcaggccgtggactactccacggtaatcgtcaacgcatcggccacacggccggccttggcacgggcgtcggcttcggactcgccgacggccagtgccacggccatgcggcggtggccatgcacttcgggcttggcaaaaatgcgcaggtccgtgccgggttcggccagagcagcggccacatcggtgaactcggcctcaccgtcgccggccaccacaatcgcatggcttgccgccaccgagccggccggaatcgtgagcgccacatgctcgggggtgatcggcaggccgagaatcgcgcgggcgtgcagcgcgaactcgctcagacgctgggaggtcatcgtcaccataccggtatcgtgcggacggggggagacctcgttgaacagaatcgagccgtcggtgagcacgaacagctccacgccgaatacgccccaaccggtttcgccggtcgcctgagccttggccaccaagccttcaacggcggtacgtgcgatgtcgcgcgcccgctcggcctcaccatcgggctcggtagccggctgccaggactcgcggtaatcgccggactcctgacgttggccgatcggcgcgcacgtcacaatgccggcggacgaagaaacggtcagtaccgtcagctcacgctccagcggggcaagcgcctcaacgatcacgcgcgacacatcgccctcatcggcggcgcggcggccctcctgcgcttcggtccaagcggcatcgatggcgtcggcggaacgcaccaccgactggccgtgaccagacgagctcatcaccggcttgaccacgcacggatagccgacttccgaagctccggcgcgcagctcttccagcgagccggcaaaacgatacggtgtagtcggcaagcccaattcttcgtgggccagtacgcgcaggcgctcgcggtccatgcaaatcgcggcgatttcggcgctcggcaccacctgggcgcccgcggccgcagcaccggccagcacatcggtggcgatggcctctacctcgggcacgatgatgtccggcttgatttcatcgaacaatgcctgcaattcggcggcattcgccatatccaacgcgcggtattcatgcgccacctgctgggccggagcgccggcataggagtcagcagcacacacccatgcgcccagtcgcatgagttcaagtgtgacctccttgcccagctcgccagcgcccaaaaacagcacacgggtggggtgcttgcccagcggtgtgcccagcgggtggttggctgcgcgagttgcgggggggacggcggaagtctcggcgggaattgcgggagaggaggcggaagtcacggcagtattcacggcgttctcagtcatacccacattctgccatgacgcgatgatttcggtatgtcgcgtgagcggagtgcctcgcgcggcaaaattacgggcggaatatccggcttcatggggcggtaaattccccatggggcggtaatgagtccatggggcggtttgttggttttgtgaaaccgcggaattaagccgttttgccttaccgccccatgggaatttcaccgccccatggggtaaataccgccccatgggcaggttgccgccccatgaagattcagatgcccgtaacccgccataaatactgcgtatagacatgccattgcgtgcgtaacagagccgtcgtaccttagcaatcaccggccgatgaagtatggggcggtcgggccaacattttgggatgcgacatatagcgaatagcggcgtgccggttccggcgtttcaggctacaagccggcacgctggcaatagtcgaagtacttaacgattccgcctatgcggggctcgaattcggtgacgtacgctcgctgagcctgctggagactccgggcgcgctggacgtggcgctggaacttggctcgctgtccaaaatgtatatggtggccggctggcgcggtggcatggcgattccgccgcattcgtggattggctgctcaacacggccggcgtggcgctgatgccggggtctgcttcggtcaggtgggcgaaggctgggtgcgcatcagtctgctcaagcacaccgccgagttgttccaggtcgtggcccgcgtcgatcgtgcgctgcgaagcgcgtgattcaatattaggcaaaatgcggcagcccataccatttccggcctatccaagcagcgcggccgacgccattgcctcgcggtggtttaggatgaggcaatgcgcgaaaacgggattgaagagagcattgatcgtccgctgactatcgctcttgtggtcgatacggtgggcaatcagggcaacggcacctccaattcggctttgcaatgggctgcggaattggagcggcaaggccatcatgtgaggcttgtcggtataggggcgcccgaatatccggcgcgtgtgaataaggtgccactcgtctcgtgggtggccgccaagcagctcatgcaattcgccgaacccagcgacacgttgttccgcaccgccttccaaggcgtggatgtggtgcatatctatatgccgttcaaattcggccgccgcgccgctaaagtcgcccaccaaatgggcattcccgtgactgctggattccacctgcagccggagaacgtgctgtattcggccggcccgctacgtcgcattcccggtatttccagcttcctgtactggctgttcaagcactggctgtacaagcgcattgaccacatccatgtgcccaccgaaatgaccgcgagcctgttgcgcgcgcacgggtataaagccaagttgcacgtgatttccaatggttattcaccggtgtattcgccgaagaagccggccgatccggatgcctcggctcccgtgccgttccgtgtcgtcgcttccggccgactggccagcgagaaagatcagattacgctgatcaaggcggtgtcgatgtcccgccacgccggcgatattcagctggtgatcgccggtactgggccgctcaagcagtatctcaagttccgcgccgggcgtttgctggcgcgcaaggccgatatcggattccacaagcacgccgatatgcccgatttgttgcgttcgggcgatttgttcgtgcattgttcgattgccgacatcgaatcggtgagcgtgatcgaggcgatggcgtgcggattggtgccggtgatcgccgcgtccgaattgtcggcggccggccagttcgcgctgatcgacgagtcgttgttccccgtgcgggacgcggccctgctggcccgacgcatcgattggtggatcgcacatcaggccgagcgcgccgaatggggcgagaaatacgccgaatacaccaaggcgcattattccgtggaagcctcggtccacaagttcgtggatatggaacgcaaggcgataggggagtaggagccttctcgtttgcggagaggttttccctcagtccgcctgcggcggccagctccctcatcggcgggagctacgaaaaaacctccctctgatgagggaggtggcatcgcgaagcgatgacggagggagggattagcgaagggttttacaacaactcaataagctgatcgacttcttcatgcgtggtggcccagctggtgcagatgcgcatcacggtatgcgtgtcgtcggccttctcggtaaagccgagcttgacctcgcgctccagacggtcgatggtcggctgatccatcgtcacgaaaatctggttggtgggcgcttcgaaagtgagcatgtagcccttggcgcgcagggcctcgcgaatacgatcggccgcctcattggcgttgcgggcgatcttgaagtacagattgtcggtgaataaggcgtcaaactgcgcgcccagcacgaagcccttggccagcaaggcgccgtgctgcttgatgcgggtcaggaagtgcttcggcgtgttgtgcttggtaaacaccacggcctcgccgaacagcgcacccaccttggtaccgccgatgtagaacacgtcggcgatggtcgccagatccgtgagcgtcatgtcggaaccggtggcggtcagcgcgtagccgagtcgcgcgccatccacgaacagcggcatatcgtacttatgcgccacatcggcgatggcctgcagttcggctttggagtagatggtgccatattcggtgctttgcgagacgtacacggatccagggaacaccatgtgctcgtagttgccgtccgcatagaaggtcttgcagaactcgtccagttcggttggatccattttgccgttgtgttggggaatcgtaagcaccttgtggccggagaactcgatggcgccggcctcgtgcacgttcggatggccggaggcgaccgcgaccacgcctgcatacgccggggtgatggtgtcgatgacgacctggttggtctgcgtgccgccgacgaggaaccacacatccgcgtccggctggccgcaggcctcgcggatcttggccttggcctgatcgctcagttcgtcggacccgtagcccgaatacagatggttgttggcttcagccacggcttcaagcactgcgggatgggcggcgcgggagtaatcgttctcaaaagacagcatgacggaccttttgtccttgtgttagatgaattggatatgcccgagtgtacaacgtggcggttcccggcaggagcggggaattcatggagaaaaacaaaacccttccgcgaacggaagggttttactggggtggccaacgcggctcgaacgcgcgaccttctgaaccacaatcagatgctctaccaactgagctatggccaccatggtgtcgtattcagcaagctgaattcgcacaacaggtgaatactatacacaactttgcggatgtgtgctcatcggtgtgtcgcgatggaatcaagcggttggtttcattcttggggccaggctgtgggctgtctcaaatggtgggatgtggacgagtgggtcttgtgtggcgattgatgaaaagtcagggcacacaacggcgtgatggtgcggctggggattgcagagatgattacgtgagcgttcacaatgtgagcattatgtttcatatcaaccgcgacccgcctagtttcatgcgatgttacctacaccgaacaagggaagagaaacaccatggaaaaggttaaagcctttgcagattggctgaccaagtggtttacggtcatcgtcatcgtctgggccgtcttcaactacttcgtgccggccgccagcctgtggggcaaggcgtacaccggctacatgctgggcatcgtgctgttcggcatggggctgaccctgacgctggacgatttcaagcgcatcctcacccagccgatgatggtcatcgtcggcacggtggcccacttcgtcatcatgccgctcgtcgccgtggccctgtgcgcgatcttccacctgtccggcccgctggccgtgggcgtgattctcgtcggctgctgcccgtccggcacctcctccaacgtgatgagctacctgtcccgtggtgacgtggccctcgatgtctccatcggcatcctctccaccctgtgcgccccgttcatgattccgctgctgatgcagctgctggcctcccagtatgtgagcgtgccggtcgaatccctgttcctcaatgccgtcaaggtggtgcttttcccgatcgccctcggcgtgatctgccacatgatcttcggcaagaagatcgagaaggtcacggtggccctgccgatcgtctcccaggtggccatcctgctcatcatcggcgtggtcgtcgccgccaacggtccgaagctgttcgtggccagctccctgatggccattccggtggtcatcctgcacaacctgtgcggctactcgctgggcttcggcttctcgaagctgatgtacaggatctacccgaagggcttccgctacgcgcagcagaaggccatcacgttcgaggtcggcatgcaggactccgccctgggcgccacgctggccctgacctccttcgcgtccaacccgctcgccgccgtgccgtccaccttcttctccgtgtggcacaacatctccggctccatcctgtccagctggtggcgcaaccatgacgaccggcacgagattcattgggattctgacaacggcgagaagggctccgccaagagcaccgtttccgtggcccacccgttcgacgccgacaaggccgccaaggtcgctgcctgaaatcctgagatggtgagaaaggtcgggtaaggcacgactccagtcagtcggtca

SEQ ID NO: 3997 - DNA, 3191 bp, Unknown
  R22_24m  MAG No. k141_53939
aactggcaatcattgactataaagaagtagtacaaacacgctcttgagttctcaaaccaccaccacaccagcaagacaggaaaccaaccagaagaaggaacccgccgcgccgagcggcaacaggtgaataacttacacgcaaccacgccacaacgcaaatcaaagcgcacaagaacccaaggaatcggcataacagcgcggttccttcggcgtgtcgcacagagcccaatttgctctgatagggctagcgtaacccctcgaatgtttccggaaaacatcgaatccattattcggctggcgtgtcgcacgagttttcggactgtcagctccatgttcatcgttcggcaaccacaccaccggcgcacaatcaatgcatggcaacaacgctccatcatcggatttcgttcatgaatcacgggtatacctgtagttatgaccaagaagattgctgtattaaccggggcgggcatttccacgtccgctggcatccctgatttccgcggtccagacggtgtgtggaccaagcatcctgaccaaatgagcgtttacgacatcgatctgtttctgcgtaacaaagaagaccgtgagtactcctggcgctggcagaaggaatcaccagtatggaacgcacagcccggcaccgcgcataaggcgctggtcaagctggaacaagccggcatgctgacgctgctggccacgcagaacttcgatgcgctgcatgagaaggccggcaacagcgacagcgtcatcgtgaacctgcacggcaccatcggcacctcgcattgcatgaagtgccatcaggaatatgccacggcggacatcatggcccgtttggatgaagaacccgatccacattgccatcgcaaactgaagtatcgcggcgatatgccatgcaatggcattatcaaaactgatgtggtgtatttcggtgaggcactgccggacggagcgatggagaagtcgtacagcttggccaccaaagccgacgaactatgggtaatcggatcgacccttgaggtgtacccggcagcgagcattgtgccggtggccgcgcaggcgggcgtgcccatcaccatcatgaatatgggtcacacgcaatatgaccatcttgcgagccgcttgattcatgaggatatcgccgtcgcgctgccgaagttggtggacgagacgattgcggagaacaagtagtcctcagcataacgaaagcgccggtgggtggttaagcaactgatgattgttggttaaccacccaccggcgctttcgcgccacctcccgctagcgggaggtattggagcacacttctgcgcggcctcccgccagcggtattggaatcagtagatgcgcttgggctggaatccagcttccctgagtgccacgaggatgcggtcgatgtgctcggggccgttggtctcgaccgtgacgccgagagacaccgcgttggtgtagtggccggatgccttgaactggtcgtggtcaagctgaatgacgttggcgcgctgctcggcaagcagggtggccaccttgacgagctggcccggagtatccggcagctcgacctcgaagttcatgatgcgaccgcgggcgatcatacctttctgaatcaccgcgcccatggtcaccgtgtcgatgttgccgccggacatgatcggcaccaccacgtgcgggccggtggcggcggcgaacttgcgcgaacgcagattcagatgctccaacgcggccagcgagacggcaccggccgcctcgaccaccagcttgtgcttctcgagcatgagcagaatcatttcgttgatgtcgcgctcggtgacggtgaccagatcatccaggaactcgttgatcagcgcaaacggcagatcgccgggatgcttgaccgcgacgccctcggcggaggtgaccacatggtcagccggagacacacgacccgcggccagcgagtccttccatgccggggagccctccggaatcgcaccgattacgcgcacttcaggcttgaatgtcttgatggcgagcgccacgccggcacccaggccaccgccaccgagcggcacgaccacgtcagtgacgttcggcacgtcttcgaggatctccagaccgatggtgccttggccgcagatgacttcgtaatcgtcgaacggcggcacgtaaatcatgccttccttgtcggcgagctcagcagcgtgggcggcggattcgtcgaacacatcgccgtacagcaccacatcggcgccgtaggccttggtggcatcgaccttcagcggcggggtgatctgcggcatgcagatggtggccttcgcaccacgctcacgggccgcataggccacgccctgggcatggttgcctgcggatgcggtgacgatgccacgggcgatctgctcttcggtgagcgatgcgatcttgttgtacgcgccgcgaatcttgaaggaaccggtgacctgcaggttttccggcttcaggagaatctcatgaccggtcatctcgctcaataccggcgaagggataatttccgtatgacgggcagtccctttgagacgtttggcggccagcttcagttcggctgcatgatcacgctgcagcgccttcaaaacatccttttgttccatagctttccattgtatggcgcggggacaccgaaaacagtggcttatctcgctaacgagcgctcatttacggtaattcccgttcgtaatcagctttcgaggggctgatttggcttcgcggggaggtctatctcctcttcgaggggctgcccgatcgtgcaatgcgtgagtatgacacatcatttgcagcggtattatgcggttttcggagcccggctattcaggcaccaaccccctgaaacggagatagacctccccgcgaagccaaatcagccccttgaaatggagataccgcctagcaacacttataggctgacgacgacgccctcccatggtgcaagctcacggccggcaagagcggccacagcgtgcgcggcgtcatacgtgctgatcaccacgttcgactcggcaaggccatcggccactgccaacagttcggcggattcgcgaggcaaatcaacggttcggccggacatgttgaccacgaccagcagcttctcatcgccgagggtgcgggtgaaggcgtagacatgcgcgtcatccgcatcgagcagatgccagtcgccggccgccacgacaggcatgtcgtggcgcag

SEQ ID NO: 3998 - DNA, 34288 bp, Unknown
  R22_24m  MAG No. k141_54677
aatgcggacctttgttgattgagttgacgtatctacgccggcaaccagtactctcgtcatgcattcctcctcgatgagggtcgcgcttgcaagtttcggcgcgccacaaccaataagttagacgattaaactatactgtattgcagtgtatgattgcaaacggaaacacgcgaaggtgcgtatctggttcaatcgtttgacgcacaatatcattgtgcgatagacggatgtgagcgcctgtgcggcgttcgagactaggggtgcaaggaggtaggagcctatggcaagtctacgcaggatcaatcaggaggatctgcgcaaccataatttgtcggtggttctcgacactttgttgcgcgcggagaaacccatgagcagggccgacttggccaaggaaacgggcctgaccaaggccacgctttcgctgttggcctcgatgctgatcgatagtggcgtggtgcaggaaggcgagccggtcgtctccaccacatatgggcggcccagcacgccgctggagattcatggcgggtccatcgccggcatcggcctgcagatcaacaccgatggctacggttgcctggcactcgatctgaacggcgacactctcggtcaggagtgggtgagtgaggatatgaccggcactgacccgtacgagatttttgccaagctcgatgcgatgaccttcccgttggaaagccgactcaaacgacgtggctgcaaagtggtgggagccgggcttgcgctgccgggcatcgtcaccgacgacatgtggctgttggtggcccgcaatctgggttgggaaaacgtcaacctcacccggttcaacgtggtacgccggctggatgtggtggccggtaacgaagcgaagatggccgccatcgctcagattccggggtatgccaccgaacgtgcgtccttcctgaatgtggtggatcgcacggattcctttatttacctgtctaccgatatcggcatcggcggcgcggtggtgcgtgacggcgaagtggtgatgggctcgcacggattcgccggcgagatcggccatctgtccgtggcgatggatgggccgttgtgcagctgcgggcgccacgggtgccttgaggcgtttgcgggccgtcgcgccttggtcgaggctgccggcattgccgaggatggggatgccaccagcagcgaggccatcgatacattcctccagcgttggcgtgcgggggatccagacgtggccaaagtggtcgatcaggccgctgatgcgctggtttccgccatcgcttccgccgtgaatctggtggatgtcgatacggtgctgttgggcggactgtggacgcacttcggcgacgagctggccaccgtgcttgaaggccggctgcgttcggaaattctgggatacccgaatgtgaagatccgcgtgttcgtgccgccggtggcgctgcatccctcgctatatggcgcggccgaaatgggcttgcgacggttcatcgagaacccgttggggtacatgggggagaagtagcgccgggagatgctgcttgttgtgctggcgggtgcatggcatgggtgcatggcgcgtgtgccggcgttggtgggttcatgctacactttgcaagttggctgttttacgcagcgaacgtggggccgtagctcagtcggttagagcatgcgactcataatcgcccggtccagggttcaagcccctgcggccccactcttttgcgtcgcctcctgcggcggcacagcgcgtcttcacgtccagataggcgcgtacaatcccttaggttccggttcacgtcctgccataggggcatgacgacccgggtcccccgaatccataggagacgtaaaatgcagcagggtatccatcctgattaccaccccgttgaggtgacgtgctcgtgcggcaacaccttcgtgacccgcaccgctggcaaggaagatcacatgttcgttgacgtgtgctctcagtgccacccgttctacaccggcaagcagaagattcttgacaccggtggccgcgttgctcgcttcgagaagcgctacggcaagaagagcaagtagcatacttcacgccagtccgattcgattcggcatgctccggcatacccgatcgaggactggcgtttttgtattctttgacaagttttgttgcagcattgacctgcgcaattgaataatcgaacagaacagcaccatacagaagaaagtgtgttatggcagacgaacagttcccggcggcggcaaccgcgcttgaggagtaccagtccatcgaagaacagatggcgagccccgaagtcgtgtccaacccggacaagctgcgcaagctgggccgtcgtcacgccgaactgggtgccatcgtgggcgcctacaaaacctggttgcaggtgaaggacgatctggcagccgctcaggagatggccggcgaggacgccgacttcgccgaggaagccaagcgtcttgaagccgaactgcccgacgccgaggagaagttgcgtaccgcgctgatcccgcgtgacccggatgatgcacgcgacaccatcatggaaatcaaggctggcaccggcggcgaagaagccgcactgttcgccggcgacctgctgcgcatgtacacccgttacgccgagaagcgtggctggagcgtgaacgtacagtccgagaacaccaccgagctcggcggcgtcaaggacgtacagattgccatccgcgccaagggcacgcccgctcccgaagacggcgtgtgggcttcgatgaagtacgagggcggcgtacaccgtgtgcagcgcatccccgtcaccgaatcgcagggccgtatccagacttccgccgccggcgtcattgtgttccccgaagccgacgaggatgacgacgagatcgagatcgatccgaaagacctgaaaatcgacatcttcatgagctccggccccggcggccagtccgtgaacaccacgtattccgccgtgcgcatgacccacctgcccaccggcatcacagtgaacatgcaggatgagaagtcgcagatccagaaccgcgccgccgcgctgcgtgtgctgaagtctcgcctgctggccatgaaacatgagcaagaggccgccgaagccgccgacatgcgtcactcgcaggtgcgttcgcttgaccgctccgaacgtattcgcacgtacaacttcccggaaaaccgtatcgtcgatcatcgcacgaattacaaggcctacaaccttgacgccgtgctcgatggcgacctgcaggccgtcatcgattccgacatccaagccgacgaagccgaccgtctggccaaccagcagtgatagccgacctgattcgtcaagccgccgcgcagttgcgcgaagccggcatcgagacgcccgaacatgatgccaaactgttgctggccgaggccgtggacgccgaactacgcgatatcgacaaggccatgctgatgggggagggtctcgattcgctggcccccgccggcgggggctgtcgcgcagcgactgggggtggtcaggccgaccccgtcaccaatatccttgccgccttccacgccatgctttcccgacgcgccaaacgcgagccgctccaatacatcaccggccacacgcctttccgctacctcgacctgcaggtgggccccggcgtctttatcccgcgcccggaaaccgaaaccgtagtccaggccggtcttgactggctgacccggcacaacatgatccacccgcgcatggtcgacctgtgcgccggttccggtgccatcggcctgtcgatagtcagcgaagtgcccggcagccaagtatgggccgtcgaattatccccgcgtaccgccgaatggacccggcgcaatctggcggtaaccgcgaaacgatacccctccatcgcctccaattaccaactggaagtcgccgacgccacgtcactggccacactggcgcaactcgacggcaccatcgacatcgtcatcaccaacccgccctacgtgccacaaaccgacatccccgaacaaccagaagtacgcgactgggacccggaactggcgctatacggcggttcggcagacggcacgctcatccctgaacgcattattgagcgcgcctggcgcctgctcaagcccggcggcgtattggttatggagcatgatctcacccaaggcgagcgattagtggcctatgccaaggccacaggtttcgccaccgcctccaccggcaaagattggaccggccgagaccgctatctcttcgccgagaagtagccacaggcgcggggccgccgctgctactgcgcgtaatactgcagggcggaggcgtccgcgtccgtgatttcgcgaatcggacgggccggattgcccacggccacggtgtgcggcggaatatcgcgcgtcaccaccgagccggcaccgatcacgcaaccctcgccaatcgtcaccgggcaacaatccagcacagtgaagttgaagttggcgaacacgcgctcgctggcgcgcggcatacgcagttcgacgggaggcatggtggtggattcagcattgattccgctcattgaacactcctgtaatttcgcgaaagagcatggatgaactcattgtatctacggtctgtgcgtatggggcgaatcggaaaacagcagtacggcaaacgagcgatgatgaactatgcaagtcggggcgcaatggtgcaatggtagattgtgaatacacaggcgaacggaggtgtcgtgagcgtggagggcggaacaacgctgaaagtcacggatgaatcgctggcacaagcggcgcgtgtcatccgggatggtggattggtcgtcattccaacggatacggtatatggagtggcgtgcgatccgcgtaataaggccgccatcgaccgtatctaccggctcaagcgtcgcccacgctataaggcgttgcaggtactgctcgcatccaccgaccagcttgatgaactcggtctcgacctgccgtctccactgaatcgtttgtcggcggcgttcctgcccggcgcgttctcgccgattgccgtagcccggcccgactgcacgttggagactttggccgacaccgccgatggtcgccccggcacgcagggcatccgcatccccaattcggcgctgtgcctcgcgattctcaaggccactggtccgctggccgcgtccagcgccaaccgttccggcgacgaaagcgcacagactgtccaggaggcggttgacgcgttcggcaacgaagtcgacctgtatctggacggcggtcccacccaaggccatgtctccagcaccgtcgtcaaagccgatccgtacgcgcgcgacggcatcgagatcctgcgtgaaggcgtcatcgcccaaaacgtgattcgcaaggccctccacctcaacggcgggggactcggcgcatgagaatctacctactgattgccgccatcgccggtggcgtcacctggctggtgactccgctgattcgccacgtcgccatcgaaatcggtgcggttggcgaggtgcgtgcccgagacgtgcacaccattcccacgccgcgcatgggcggccttggcatgctgatcggttttgccgtggctaccgtattcgccagtcggctgccttttctctcgggattgttcaacggcaattaccagatgtgggtgattcttgccggcggcatcatgatcagtctgctgggcatggccgacgacctgtgggatctcgattggatgctgaaactcgccggccagctgctgatttccgtattcgtggcttgggacggattgcagatcatctcactgcctttgggtggttcgctgattaccgcctcgccgagtctgtccatggcgatcaccgcattcctgatcgtcgcctcgatcaacgcggtcaatttcgttgatggcctcgatggtctggcggccggtatcgtggcgattggtggcatagcgttcgccgcctattcgtatatcatcgcccggtcttccccgagttatgcttcgttggccacgctgatcgacgtgatgatggtgggtatctgcgtgggcttcctgctgcataattggcatcccgccaaactgttcatgggtgattccggttcgatgctgcttggctatctcatcacctgcgcttcgattgtgatgaccggacgtcttgacccggcctcgattcatgccagcatctatctgccggtgttcatgccgattctgctgccggttctggtgttgttcctgcctgtgctcgacatgtgtctggcgattgtgcggcgtttggccaaaggccagtcgcccatgcatccggaccgtatgcacctgcaccatcgcatgctgaagatcgggcattcggtgcgtggcgccgtgctgattctgtggggatgggccgcgttgatcgcattcggttcgctgacgattctgttcttcaaagcgcagcacgtggccgtgggcatggccatcgctgtggtggtgctgaccatagccacgatgtacccctatctgcggcatcgtattcccgagatccaagccgagaacctgacgttcgaatccgcacgtaaaaacgcgcagcatacagtgcctaaatcgcagtctgcagtaggggagagccgggattcgattggctctcaggcagcggattcgatgactgattcgcctgcaaattcgcgggactcgcaggtgggcgaggtgcaggacccggcagcggataagtgagtgctcacaagcgtgtgtcgtgaaggtcagcgcattttcatatagtgtttacatggctacaaaccttgatgaattaaacgcccagtcggcgtatgctccccttcccccgattttcgccaagctcggccttgcctatgacgatgtgttgctgttgccgaacgagacggatgtcattccctccgaagtggacaccagcactcatctgactcgcaagatcgtgatgaaggccccggtcctctccgctgccatggataccgtgaccgagtccgagatggccatcgccatggctcgtaacggtggcatcggtgtgttgcaccgcaatctgtccatcgacgaccaggccgctcaggtcgatgtggtcaagcgttccgagtccggtatgatcaccgacccgctgaccgtcaaccccgaggtcacgctggccgacctcgacaagctgtgcggcaagttccacatctccggtctgccggttgtggacaaggacaacaagctcgtcggcatcatcaccaaccgtgatatgcgcttcatcgcctccgaggattacgacaccctgaaggttaaggatgtcatgaccaaggagaacctggtcactggcccgtccaacatctccaaggacgacgcccaccgtctactcgctcagcacaaggttgagaagctgccgctcgttgacgaggaaggccacctgaccggcctgatcaccgtcaaggacttcgtcaagaccgagcagtacccggacgccaccaaggatgagcagggtcgtctgcgcgtggccgccggcgtcggcttcctcggcgacgcctggcagcgtgcctccgctctgatggaggctggcgtggacgtgctcgtggtcgacaccgccaacggtgaggctcgtctggcactcgacatgatttcccgcctgaagcacgactccgccttcgacggcgtgcagatcatcggcggcaacgtcggcacccgctccggtgctcaggccatgattgaggctggcgcggacgccgtcaaggtcggtattggccccggctccatctgcaccacccgtatcgttgccggtgtcggtgtcccgcagctcaccgccgtgtacgaggccgcccaggcctgccgtgccgctggcgtgccctgcatcgccgacggtggcatccactactccggtgacatcgccaaggccctcgtggccggcgcctcctccgtgatgctcggcggcacgctcgccggctgtgaggaagccccgggcgagaaggtgctcctgcacggcaagcagtacaagctgtaccgtggcatgggctccctcggcgccatggccccgcgcggcaagaagtcctactccaaggaccgctacttccaggccgacgtgacctccagcgacaaggtcgtgccggaaggcgtggaaggcgaagtgccgtaccgcggcccgctgaacgccgtgctctaccagatgctcggtggcctgcaccagtccatgttctacatcggcgcccacaacatcgccgagatgccggagcgtggcaagttcatccgcatcaccgatgccggtctgcgcgaatcgcacccgcacgatatcgtgatgaccgccgaagccccgaactactccggcttccacaacaactgatcggttgatgcccgctagcttgcgctagttaggggttgattccttgtgaaaagggtctgcttatgcaggcccttttcgcgtatgtggctcgagatagcttgtatgcgctggggtatagtctgaactgttctgcataagcgatgaccagcgaagaaaagaggcacaccatggtcgacagccatgacgcggaaacgtacagcgcgaaggactcgcgcctgatttggatcgattgcgagatgaccggacttgacatcttcggcggcgacgaactcgtcgaggtgtctgtggttcccaccgactttgacctgaatgtgctggacgagggcgtggattacgtcatcaagccgtccgagaaggctgtgaaccacatgaacgatttcgtgcgccagatgcacacccgttccggcctgatcaacgagtgggagaatggcctgagcctggccgaggccgagcagaaggtcaccgaatacgtgctgcgcttcacgccggaaggcgtgcgcccgctgctggccggcaacaccatcggctccgacaagaagttcctcgaccactacatgccgggcctcatgagccacctgcattaccgcagcgtggacgtgagcaccttgaaggagctcgcccgccgctggtacccggccgtctacgagaaccgtccgccgaagaacggcggccaccgtgccctcgccgacatcatcgagtccttggacgagttgcgctactaccgtaaggccttcatggcccccgtccccggcccggatgatgccgcctccaaggccatcgccgccgacatcgtggccaccagcattctcaataagtagtccgccgtacttggctcccctccctgaggggagtctagagaggttgatatgcgccaaaccgaagccctagccattctgaacgccggcgcgaacgtgtttctgaccggtgcgcccggtgccggtaagacctatgtcttgaacgagttcatccgccaggctcgggccgacggcgccagcgtggcagtcaccgcgtccacaggcatcgcctccacgcatatcaacggccaaaccatccattcgtggagcggcgtcggcgtggccaccgccctgagcccgagtctgctcaaactcatcaaatcccggcgcaaacgcaagattcaggctacggacatcctcgtcatcgacgaggtctccatgctgcacgcatggctgttcgacatggtcgaccaagtctgccgcgaagtgcgtcgcgacccacgcccgttcggaggcatccaggtcgtgctgtccggcgacttcttccaactgccgccggtttcggtgtccgggcgcaaccgcgacctcatcgcccccacccccgaattcatcgccagtcgcgaacggtatgcccgtgccggcttgaaccccgaaggcttcatcaccgaatcgctggtatggcccgaactcaacccggtaatctgctatctgaccgaacagcaccgtcaggacaccggcgaactgctgaccgtgctcaccgacattcgcgaaggcgacgtgacccagtccgaccgtgacgtgctcgtcacccgtctgggcaaactgcccgagcccggccaggtcgccgtccacctattcccggtgaaccggcaggccgacaatctcaacgacatgcgcctgaaccagatcatgcttgagccgcacgagttccacgccgaaaccgcgggtcccgccaatctggtcgaccgactcaagaagaacatgttggcccccgagcgactggtactcaaggaaggcgcggctgtcatggccctgcgcaacgacaccgatcgccagtacgtcaacggctcgctcggcaccgtgcgcggcttcgcgcaggagaacaagggcggctggccgatcgtggaattcgaaaacggcaacatcgtcaccatgaaacaggccacatgggaaatgatggacggcgacaccgtgctcgcctccgtctcgcaggtgccgttgcgttgcgcgtggggcatcaccatccacaagtcgcaaggcatgacgcttgatcgtgcggtcatggatctgaagcgcaccttcgcgccgggcatgggatatgtggcgttgtcccgcgtcgaatcgctgggcggactgtatttgactggcgtcaacgaacgcatgttcctcgtctcgcccgatgccgtggtgctcgacggcgacctgcgcgaagcctcggcctcggcttccgaccagttggccgatgaaggtgcaagcgcgttcaaacccgccgagccggacgaattcggtgtcaatcccgatgatgacttcgcccaggacgcgttattctgacggtcgatatatcgaacgaccgctaatttgagtgtttctgcacttcgaggggcggattttgagttttcgggacatctacttccgtttcaaggggctgatgtccaagtagacagcgcttaaaaacggcggaatgacgttggtatgaagccgtttctatgtgcgattgagcggatgaccagcccctcgaaatgcaagtagatgtctccaagaggcggaatcggccccttgaagccgaagaagacactgcgaacttgtcttcattgaggaactgaacggctaccatggaataagaggtggtagttatggtgctatccgagatatttcgtggaaacaatgaggttcgcgaggccgcccgggccggtgtgcaaatcgatacggttagtgtggctagtgcgtcagatgcagcaagcgcggcagacggcagcggcaaaatcactggcgcaatacgtccgccagcggtggctggttcgttctaccccgctgaccgcacaacgctcaagcaactcattacccatcaattggattacagtcgagaggttctgcaacagttggagcccacgcttccagcgggagtgccaaaggctgtaatcgtgccgcatgccggttatgtgtattccggcacggcggccgcgcttgcctatgctttgctcgaacgagggcgggggagtgtgactcgcgcggtaatcgtgggaccgactcaccgtgtggccgtgcgaggcgtcgcctgttccacggcagcggcgtttgaaacgccgctgggcactgtgccggtagacattgcagccgagcgtaaggctctgggcctgtctgtcaatgagccattgcgctccggtacacatgcccgtccgggcgcgtcggctcccgcaatgatcgtcaatggcccaacccacgcacaagaacatgcggtagaagtgcagattccgttcctgcaaaccgtgctcggcccagacctcactattgtgccgttgaacgcgggcgatgccacgccacaagaggcgggtgatgtgttgcgtgctttgtggggtggcccggaaaccgtcatcgtgattagttcggatctctcgcactatcatccgcacgaagtcgcccgcgcgttggatgaccagaccattgcggacattgcggctttgcatctgccgattcaccctcgccgggcctgtggcgcatacccgatcaacggccttctggatgtgttaaaaggccgcaaggacatgaagctcttcgagctcggctgttccacttccggcgacgacggcgtggtggcgcttgccggccaacctcgccccgcaatgcgagacgccgacgagccggtagtgggatatgtctcgtttgccgcgtgggaatccaaaccagaagcagatgctccagccggtgcagatgacttaggcgaatcgggaacagcccatggtgatgtgctgctgaaactcgcccgtgccgctatccgggaacggttgcatatcgagcatccaacagccgccgattcgaccgcgtccattcttgccgcaaacccatggctgaacgagtccggtgcctgtttcgttaccctgaccgagggtggccggctacgcgggtgcatcggttcgctggccgcccaccgctcgctcggcaaggacgtgaccgagcacgcagtggatgccgccacccgcgacccacgtttcaacccggtcaccgccgcggaatacccgttgctcaacgtggaggtatccgtcttgggcgcgcccgagccgattaccgtgaactcctgtgacgccgatttgtgcggtaccggctcgaagaccgcgactctggcatcgctgcaatccggacctcagaccgacgccgtcaaacgggacggcagcaacgtcgaacgcccggtacgttcgcgcactgaacttgaggaagtattacgccccggcaaagacggtctgattctcgccgaccgtcgtggccgcagcgccacattcctgccacaagtgtgggatgagctgcccgattcgcgcgatttcgtcgctcacctgctcgccaaagccggtatccgcccgtactacgactggaacgatggcgaaatcgactgtcaacgctacgaggtgaccgcctatgccgagcactaacgcagcaaccatgtcccctcccgctggcgggaggtggcgcgaagcgacggagggtggtcaccgagaatcagagggtggtcaccgggaatcgtgcggtcatacggcgtcagtcacagatgttcgtaaccccgccatagcccgctggcaaacgcaattccacgacggtaccaaccgcgctcgctgcgaactatgcccgcgccgctgcgtcctcaagcccggccaacgcggcttttgcttcgtccgctcaaaccacgacggactcatcgtctccgacacctacggccgcagctccggcttcgccgtggacccagtggaaaagaagccgctcaaccacttccaccccggttccagcgtgctgagttttggcacggctggctgcaattccggttgccgattctgccagaattgggatattgccaaagcccgcagtttcgaccggctcggcgtggaagccagtccggagaaaatcgcgcaggtcgcggccgaccggggcatcgattcggtggcgttcacctataacgatccgatcgtgttcgccgaatatgccatcgacacggccgaagcctgccgagcgctcggcattcatcccatcgccgtgactgccggatacatgagcgccgaagcctggcccgacttctacgccgccatggacgccgccaacatcgatctcaaaggcttcaccgaagaattttattggaaagtgaccggcacgcatctggccgatgtgctcgaaaccatcgactatgcggtcaacgaggcacgcacaccagaaggcgaacacgtgtgggtggagctcaccacgctactcatccctggactcaacgatgacgacgcccagctgcatgctgaatgtacatggatacgcgagcacttgggcccggacgtgccgctgcacttttccgcattccactccagttaccgcatgatggacgtaacgcccaccccgcacgagactctgacccgcgcccgaggcatcgccctcgaagagggactcaattatgtgtacaccggcaacgtgcatgatcgtgaaggcgataccacatattgcccaaaccctgaatgcagggccaagctcgtggaacgcgattggtatcgaatcattgccaaccgtttatctgccggatacagtggcaatgggcactgccccgtatgcaggactgctatcgccggacgttggtaatctgcctcaggtcgcccgcgcgatttagcgcagatcgccaatacgcgcggcgatcgtcctcatcgatttgaggctcgcctcatagcgcgcggctgccacaatcagaatgatgccgcccaaagcaagccacacccaccggtagtggcgggagaattcggcccgccatggccacagcacagtcaccgtgctgacgataagaatcaccgtgccgtagatcaacggtgcttgcagcaaacgcacacccacaatcagcgcggccgctccggacaggccgcttgttccgggaccgacataggcgattgcgcaaatggtggcatggccattggctgttgcgataccggttgtcgcggaactgccgttgggaattgcggggttgcagcagaaaattgcgggccccatgctgggccggttgatacaccggttgctccacgggttccggctgattcccctgttgctcggtcggctgcgtcatcgtgccctcctacccttctagccatcattgttgtacgaatgagtccgaatgccaagatgaaggccggaatagtgcgaatagcaggcgggcttgtcggttcacgcgaatatcttggaacacatgacttccaatacccttcgtatgtcaaccatgttcctgcgcaccctgcgcgaggaccccgctgatgccgatgtcgattcggccaagctgctgcagcgcgccggctatatccgcaaggccgcacccggtatctggacctggctgccgctcggtctgcgcgtgctgaacaagatcgaggccatcatccgcgaggagatcaacggcatcggcgcccaggaagtgcacttcccggccctgctgccgcgcgaaccttacgaggccacccatcgctgggaggagtacggcgacaacatcttccgtttgaaggatcgccacgaggccgattacctgctggcccccacccacgaggagatgttcacccttctggtcaaggacatgtactcctcttacaaagacctgcccgtcaccctgtaccagatccagaccaagtaccgcgacgagttccgtccgcgtgccggcctgatccgtggtcgtgaattcatcatgaaggacgcctactccttcaccatcgatgaagaaggcatgcgcaaggcctactatgacgagcgcggcgcctacgagcgcatcttccagcgtctcgacctgaagtacgtacctgtgttcgccatgtccggcccgatgggtggctccgcatccgaggagttcctggctccgatgccgatcggcgaagataccttcgcgctggcgccttccggcaaggcatggaatgtggaggccctgagcactccggagctgccggaaatcgatgcttccgccactcccgccgcttccaaggaagccaccccggatgccaagaccatcgataacatgattgagcgtgccaacgccgaccacccgcgtactgatggccgtgaatggcaggcttccgacatcctcaagaacgtggtgattaccgtcaagcaccctgaggatgaagagcatgacgagccgtggcgtgaagtgattgtcgtcggcgtgcccggcgaccgtacggtggatatgaagcgactggaagcccagttcgctcccgccgagcttgaggaggccactgaagaagacctgaagcagcaccccgaactggtgccaggctacatcggaccgatggtgcttggcccgcaggccgaggctgctggcgtgaagaacccggttcgctacctggtcgacgcgcacgtggtcaagggttccgcttggttcactggtgccgatgagaacgaggtcgactactacaacctggtgtacggccgtgacttcaaggccgacggcgtggtggaagccgttgaggttcgccacggcgacatgagcccggacggttccggtccgttgagcttcgagcgtggtgtggaaatcggccaggtgttccagctgggtctcaagtactccaaggcactggacctgaaggtgctcgaccagaacggcaaggccgtgccggtgtggatgggctgctatggcatcggtgtttcccgcgtgctggcctgcatcgccgaaacacaccacgacgaagccggcttggcttggccgtccgtgattgccccggctgccgtgcacgtggtggccaccggtaaggacgccgtggcgtttgaaggtgccgagaagctggtctccgagcttgaggccaagggccttgaggttatttacgatgaccgcaagaaggtgtctccgggcgtcaagttcaaggatgccgagctgatcggcgtgccgctggtcgccgtggtcggccgcgattacgtcaacgacggcaccatcgaactgcgcgaccgcaacggcgaaaacaaggtcgccgtgcccgccgccgaagccgccgacgcgctcgccgagcgcttcgccgccctcagctgagtcccacttactcagcctcggcgttaatcgcatcaagcgccattctgctcagtcgcagaatggcgctttgttgtggataaccgaaatttatccacattcttaaaatttcaactgcgtcacagtatccacatttgccagttgcccttgtgcacttcaaacgtcatgcctcacagtggaggtaccgctggggcgtgcaagccggcaatgaagccggagacaggctccggcggtccacatccaaacaacaggccagcaggccgaggaaaggaccgatcatggcaaatcaacaagcagcagtgaccgtcaccggctttgtggccggtgatccgacactaggcggaactgagagtttccgcgtgctgacattccgtatgggcagcacccgcagtcgactcaacccgactaccagacaatgggaggattacggaaccgcatgggtgggcgtcaaagcgttccgtgctttggccgtgaacgccgccagttcggttcgccgcggtgaccgcatcattgtggtcggctcactcatcaccgagcagtggaccaatgagcaaggcgaaccgcgcagtagaaccgttctcgaagccaccaacattgggcatgacctgaccttcggcaccacgtcgctgatcaagccacagcgtgccggtaatgggaacggaggcaatggtggcaacggtaacggcaatgccaatggtgccgccgaaggcatggatggcggaaacgggcaacgagcatcgtcaccgcacatgaggccaacgcaatatagtgtggacggtgccgcatccggtgtgggcattgacccgtatgcgacctcgtcggaatctggccccgtcgaatttggggtcacctccgattccggccaatcgccgtcgccatcaaccgagtcagcggctgcgtccatggccgatgccgtcatgtcgcaaccggacgctggcgctaatcagccacagtccgcagcccaacaaacctacgtcgacggtttcgccgaatcttccgatcccagcgaatccgaattctgagtgccaaccatacatcatgaaaaaccgctgtgttcgcctgtaatcgaggcaagcacagcggttttctcttacataacggggattaccaaatgctcacacggtccttgggcgcgagccacatggcgtcgccttcggtcacgccaaaggcatcgtagaagaggtccacgttgctggcgatgccgttggtgcggaattcggccggagaatgcgggtcgatctgcaggtactgttcggccagctcgtcgcggttcttggtgcgccagatggaggcgtagctcaggaagaagcgctgcaggccggtgaatccgtccatttcgggggcggtatcgagcagtgccttgatggcggcgggggagccgtcttcttcggcgtcgggcttacctgccgccttgccgagcgcgaatgcatacgccttgagcgcgatgttcacgccgcccaaatcgccgatgttctcgccgatggtcagcgcgccgttcacgtgcggcgccttatcaggttcgtcagcgtacttctcggccagctgcagcggcacaaagctgttgtactgggcgatcaatgcgccggtgcgggcctcgaagttcttgcgatcctcgtcggtccaccagttgttgagcttgccgtcgccgtcatactgcgaaccctgatcgtcgaagccatggccgatctcgtgtccgatcactgcgccgataccgccataattcgccgcatcctcggccttcgggtcgaagaacgggggctgcagaatcgcggccgggaacacgatgacgttcatgctcggctcgtagtaggcgttcaccgtctgcggattcatcagccattcgtccttgtcgaccgccttgccgaccttggccagctggtagccggtctcgtacaggttcgcggccttggcgttctcggcgggcagcgcatccgcggagacactcagcgccgaataatcgcgccagtggttggtgtagccgatcttcggcgtgaacttggagatcttctccagagccttggctttggtatcctcgcccagccaatcggaattggtgatggacacgcggtaggcgtcaatcagattggcgaccagctcttccatgcggcgcttcgagctttcggggaagtgcaggcgcacgtattcgcggcccacatcttcaccgcagacgccgttgaccaggctcaccgcgcgcttccaacgatcgcgctgcttcttggcaccggagagcaccttgccgtagaagtcaaagttggtggtgtcgaagtcgcgagacagggaggaggcgaagcccagaatcatgtgaacacgggcccacagcttaaggtcggccagatcggcctcggcccagaacgcatcaagaccagtgaggaagctcggctcgtgcacaatgacgcgcgcgaacacagacttgaaatcgatcggctgagccttggcggccttggtggcgtcataggcggtctgccaggcgtcgatccaggaaccgagatcgaagttcttcagcgtggcggccaaatcggcgtaatcggtggggttgtaggtcttcaccgaatcgcgcgtggccacattgtcccaatggttggcggcgattttcgtttccacgccaaggaagtggcgggccatatcaagtgcggcttcgctgggaaccgtggtgggagcattgctctcgtcatcgccggtgttggccggcagttcatcgccaccgttggattcggcggcgggcgcgtacccggcgttcaccagctgggtggcgaccatcgccacgtatgcttcgcgcacggggacgtagtggtcctcacgatagtaggcttcgtccggcaggcaaaggccggcctgctcaaggtgggcgatattgcggtccgggtcgccggggtcgccgtaaacggccaagccgaacaggtcggggccgccggctgggttgatggtgccgagcacgcgcgtgagagcggccttgtcgatggcggaatcgatgaggtcaagctcatcgcggatcgggtcaaggccggcggcctcgatggcgtcggtgttcaggaacgaatgatacagagcctgcgatttggtggccgggcagtcgtcggcgtcgaggatgtcgcgcacttggttttcggcgtcttcggcgagcttgtcgaaggagccgtagcgcgaacgatcgtcgggtaggcggtaggtgtcgatccatggaccattcacgtagcggaacaggtcattggtcggcttgatgacggaggagaacgatgccgggtcgatgcccgacgtcagcgtttcggtttcgttggtcatggccctaagcctaatcgcggcgggggagaagcgttggtgatgcagatattgcgttatgggtattgcgctgtcagtgaactagacggattgcctaactgtagtgatggttcaaattaggtaacttgcctaacatggtatgtggaacctgaatatggaccttgagttaaggagttacgatgagcaatccaaacgagggtcagtggaatggccagacgggccagcccaaccagagccagccgagccagccgaatccggcgggccaaccgggccaaccgcagtatggcgcgtatgacagcaatcatggcggccaatatcctccgcaaggtgcgccgggagcgcaagacactcagaatcagcaggcgcagaacggccagccacaaggcggaccgaaccagaacccgtactacggcccgtacgcctacaatccgaactatggcccgaacggccagccagcatggggtccggacggtcggcggtatcaggcggacggccaatcgaatagccaagcggacgggcagccgaatggttcatggggcgatcaaagtcaacccggctggcagcagaccaactggtatgtcggcaatttcagtccattccacctgatcgaggaatggctgccggaaaaggccaagaccaagattcgcatcatttacggcgtggtgggcgtggctgccatcgccttgggcgctgcgctgttgttggtgccgaacaagacgctggctttggccgcattgttgctcggcgtgtatttcgtgatttccggcgtggtgcgcatcgtcagcgctctcgtggagccgggtctgccgggcggctggcgtgtgctggacgtgttcgtcggcattctgctgaccttcggaggcgtcgtagtcgtacgaaactacggtatgaccggtcagaccttggcattactcatcaccctgatggtcggtttcggttggattatggaaggcgtgatggctctagtcgaatcatggcgcatcccgcgctccggctgggccatcgcctatgccatcatctcgattatcgccggcttcgtggtgctgatgagcccgctgagctccgccgtattcatgattatcttcggcggatgtgccatggtggtgatggggattacttcagtgattcgcgcgttcacttttggcaagcgcaggaagtgatctcgcgctccagacaatcaatctccggacaatcaatccaaagcgcccgtgcagattatgtatctgccgggcgctttttctcggccttggccgttgataggctactagcggaccctaggcagaccacgggtgatgctctggcggttgaccccgggctgggctagagttgagaacaagtctcaacaaggtagaaagaacctcatgatcgaattgaagacccctcgtgaaatcgaggaaatgaagccggccggccgtttcgtcggcggcattctgaaggaactgcaggagaccaccaaggtgggcaccaatctgctcgaaatcgacgagttcgtccacaagaagatcgtggaccgcaagggcgccgaatcctgctatgttgactacgctcctgacttcggcaccggcccgttcgcccactacatctgcacctccgtcaacgacgccgtgctgcacggtgtgccgtacgattacagcctgaaggacggcgacctcgtctccctcgatctcgccatctccgtggatggctgggtggccgattccgccgtcagcttcgtggtcggcaaagacccggaccccgaagacctgcgcatcatcaagtgcactgaggaagcgctcgccgccgccatcgacgtggccaagcccggcaaccgtctcggcgacatctccaacaccattggcgacatcgcgcgcgaatacggctacccgatcaacctcgagttcggcggtcacggcgtgggccacatcatgcacggcgacccgcacgtaccgaacgacggccgcgcccaccacggctacaagctgcgcgaaggcctggtcatcgccatcgaaccatggttcctcaagaccaccgacgagatcttccaggatccgaaggacggctggaccctgcgtgcctccgacggctcgcgcggtgcccactccgagcacaccatcgccatcaccgagaacggcccgatcatcttcaccgatcgcaccaacctctgattggcgtttggcgtatggcgggtgcctgattggcctgtgatgggcgatcggcatctcatcaaccgtctatatgtttgcggttttcccgcgaattcgagacgtaacaagccgaagtgcgtttgctttgatagcatgagcgcacttcggctttcgtgtatcgaccggtgtctgccggcggtaacacagaagacataaagtaccgaacactagcgttcgcgaacgcgtgaacgttaatgtttggggtaagtggttcatgaagaggaaggcgcgcgaatggcaacggcacaacttgatgtcgattcgaacaagttcaacctgcccgtggtgaaggctagtgcagggccggatggcatcgtcgtttccaagctgcgcaatgacggctgggtaacgctcgaccccggattcctcaccaccgcacagtgcgaatcgaaaatcacctacatcgacggcaagcattcgatcctgcgctaccgtggctaccccatcgagcagttgtgcgagaactccgattttctggaagtggcgtggctgctgcgccacggcgagctgccgagcagggctgagtatgagcagttctgcgcggacatcaaccacaagacgatggttggcgaagacttccgtaccttcatgggttcgttcccgcgctccgctcatccgatgagcgtacttgcctccgccatcaatgcgctggccacgttctatccggacaccactgatatctccgacaccgaccagctcgatgaggccgccaagatcatcatggccaaggcccgcacgattgtgtcgtacatcttccgccgtcgtcgcgatgagccgatgctgtaccccgattacgcgcgcggctatgtagacgacttcctgcgcatgtgcttcgctgtgccgtacgagccgttcgaatctgacccgttgtatgtgcatgctttgggccgtttgctgattattcacgccgatcacgagcagaactgctcgacctcggtggtgcgtatcgccggttccgcccacgccaatctgtattcggcggtggccgctggcgtcaatgccctgtccggaccgttacacggtggcgcgaatgaggccgtactgcgccagctgaaggcgattcgtgattccggcaagtctgtggccgagttcgtgcgtgatgccaaggaggatggccagaagatttccggccttggccaccgtgtatacaagtcgtatgatccgcgtgcggcgattgccaagaagtatcttgagaagatcatggagcgcgaggatacgcagaaactgccgtccgacgagcgtgcgttgttcgatgtggccaccgagcttgaggatattgcgttgaacgacgagtatttcgtatcgcgcaacctgtatccgaacgtcgatttctacacgggcttgatttatcgggcgatcggcttcgatccggccatgttcaccacgctgttcgcactgggccgcattcccggttggattgcgcagtaccgtgagatgctggccgacccgaacaccaagatcggccgcccacgccaggtctacaccggtccggtcgagcgcgatttcatgccgatggacgagcggtgattattggtttgagaaagcgcttcgctggagattccagtgaagcgctttctatatgtacagcgcaaaccagctatgctgcgacggctgcataagaacgagcagggctagttctgaaattgaaataatgtgtgcggtatcgaagcgcaccgagggaaggcgtacggaagtacgtcgaccgaggagcaacgaagataacgctccattatttcaatttcagttcttgtgcagcttggcgttgagctcaattcccaccttgcggtagcgggcttcgatacgtccattcaccgagttgcggatgaacaggatgttgtctttgccggagagctcagcacccttgacgacttcgagcggctcgccggctgcggccttggccttgtcccagatgctgatcttggtgccggcggtgatgtacagaccggcttcgacggtgcagttatcgccgagggagatgccgataccggcgttggcgccgagcagcgagtgctcgccgatggagttgcgcagcttgccgccgccggagagggtgcccatgatggaggcaccgccgccgatatcggaaccgtcgcccacgaccacaccttgcgaaacgcggccttcgaccatggagacgccgagcgtgccggcattgaagttcacgaatccggcgtgcatcacggtggtgccggaagataggtaagcgccgaggcgcacacggtcggcgtcgccgatacgcacgccggtgggcactacgtaatcgatcatgcgcgggaatttatccacaccgaacacgttgacggtggtggcaggagctgcggcaggcagtccggcctgagcagcgaaagcgagagcggcttcggtggaggcgcgttcgacatcggccttgcgtagtgtgaagtcctcaacggcgaaaggaccgtagttggtccacaccacattggcgagctgggcgaagatgccgtcaaggttcagcgtgttcggcttggccatgcgcatgctcatcagatggagtttcaggtaagcgtccgcggcgttgctgatcggctcgtccaactggctgacgacgaataccggcacgcggcggatgccacgggcgtcggcttcatcgtgagccagagtgccgaaattgtggtttggacgatcggcctcggccggtgcctcaccgagattcagttcggggtaccagacgtccagggtggtgccggcggcgtctacgctggccagaccccatccccatgcggtacgctcttcgctcatagttgctccttacatatcgttgcgtttgcgttgcatgtgcatcgcggcatgtgatggttccaccttagcgtcaagtacggctaggcgggggccatagttcgtggaatggcttgaaatcgagttgttcggtaaaaaattaccgaacgtgattggcgatgggatgataggttctccggtgaaattcgctggtgaacaactcggcaaggaggtgtgcgatgtgatgctgcatcattcgggagcataggctgtggccatgcgacgcccggcatcatagagtttgcgcttgagcgaatcgggctcaagaatcactacgcggccatcccaggaatactgcaatgcccaccagaacacggcgcgttcgggagcatcgacgatgacttcgaactgtgtgccgtccggcgaatgtttgatctgagggtcgtcgaaccattcgaacacattgttgagcatggattcgtctcgtacggccatgcggatgcgaatcggggcatcggctacgggatacgggcggtgacgcatgaagttcactgcgtcaaaatcagccggcgctggtttttccagtggaactgtgccgttcctgcctttggcgctgacgttggcgattcggttgaccacgaaaatgcggagattatcctcgccatgtagatggcagatgaggtaataccgtccgttcttgtacaccatctggtaagggtcggcggtgtaggtaattcgacctgcgcccgtacggcttttatgcggtatcagggtgccgtccgggccgtaatcacggtattggaaggttacgccgtggccttcttcaatggcctgattcagttggtcgatggtggataggaactcgccgttgatatgcgtgtaggtggccacgtgctcaaggtaacccactgcttgcccagcggcacctgcgagttcgcggattttaccgatgagatcgtccatggtgtcgaggctgatgcgagacaaggtgaggctgtcgagtagcagtcgcatttcggcggtggataggaatgcgtcaagataccagccgggttgtggattcttgcattcgatgccggcaaggtcgctttcggtgagatgcccgatatgtctgccgagaaattccgtggcggtaagctttttgagctgatttcgtatggttttctcggtcggcagctcgcttggatcttccagctggtgtttacgggcaagttcatcgagtatttgccgcacggtcaggccatgtccaaagtagctgtgacgccacagcacctcgaagatttcgagggtggtgttccctgcataggatttgcgttgcgccggcttgtctgcatccatacattaaggctaccgcgcgcctcgtctaggatagaagtgttggactgaaatgcattcgctggaaaggaggctcgcccatgagcaaagggtatggtgtatttggccatgttcccgataatgcggatgacgatgacctcctgccttatgaggatgatgattccggcgtttcctggggccatgcgttgcgccgtcgcaatccttggaaaaggggaggcgacgaaggtgccgattacgacgatgatcggtatggcgcagatgacacagatggcactaatgaggacaggggtctctttgccggcaagagcagcggtataggcggtatctctggcgaggcaggtggaatgcttgggggcacaggcgctgccggcagtagagccgtaacgtttggtggaacggacagtttgtccgccgccgatgcggtgatgccctatcgtttcaggcaaggacgttccgtatggttcgacgatgaggacgaaggccatttcgccgggtctgcgaagcgtgccgaagcccatgccgtccctatccttgcgttacgcaacgatgtggaatcgtcatcgtcgaataccgtgctcgctcgtgcccgtagcattgcgcgcaaagcggccaccatggttatcaatccggtatacagcgaaaatcatcgaaccgggtatgccgagcttgacggtattctacgtggcaccaccagcccatcgagtaggtatcgtaccagcgtgcaattcgacctcgatacgggagaagccgtcggtggcaagtgctcatgcccggcttacggccgtggctatggcatgtgcaagcacatgattgcgctcgccttcatattctgcgatgatccgcagcgttttgaagggtaccgtgccggggctgtgaggccgtctcggacgctgatcgactatatggagcacgtcgataggcaagatgctcaagccaaagcgcgtcgccgcaatgcgctcatgcgccggttcgatactgcaaaaagacgaaatggcgcaggtggacgacgtacgaatagcggatacggctctcgtgccggcacccgaggcggcgggtatcagggcgatagtgagactgtgggcttggggcaggtgcagcttgttccgatattgagtttcatcgatggcgtgtggagcgtggagttcaagatcggatcgacttccaatgggtccagctatgtactgaaatcgattccgcaatttgtgcttaccatggcgaacggcgactatacggattatgggcagaagcttgcctttacccatacgccggatatgttcgacgatgattcgcgcccactgctgggcttccttgacgacgcgatggccgtgcgtcgtgcggccgagcagcaggaccggtattacgggcatatcgccatcgaccgtcacctgacactttcagcaccggaagtggcccggttgctgtccgtacgtgagggcagaggcgtacagctcgtgttgaacacatggttctccgggcagcctgcatcggtgccggttgatggtggcgagccagattttcttatgcgcattgcgcggcgtgatttcaatacgtatggtccggatgccggatacctgcttgccggagtgccggcggtggaaaccgtgattgatggtggcaaggatgtatggctgttgctcgcctccactaatccggccggtgcggtatccgccatgatggcgggttctcagcgtaaaagcgcagcgggatgccgattcgtccgttgcccgaaacgattgattccgttgcgaggactattgggagacctgtttgaacccgatggcgaggggcaggtcattgccggcgatgacatcgccctgttcgcacgcacgctattgcctcagctggttggtgccggactgttggaggccagtgagattcctcgcgagctggctgaattaagtcctacggaatgcagcctccagttttatctggatcgtgatgagcatggtgtgcaatgcgaggtcaaggcacactacggcgatgccattgtcccgttgctacccgatggcccgacggtgcatgctagggatgagcgttccatccccttgtctcggggcgtgattgggcgtgatttcgacgctgagcatcttgcgattgatgtagtgcgtgaattctttaccatgcctgaccagcgcaagcgcgttgcggccgctactcatcagacggtgaatgggttccgaacgccggccgcgcgaaagaccgccaaacaattcgtgtctgatgcggccactatcgatcgcgatgacaccacgcagattgttcgtctttttgacgagggattgcccgcactgaaggaagtaggggaggtcttcaccacaccggcttttgaccggctgatcgcgcccaagccgccaagcgtcaaagtcggattgtccatcaaaggcaatttggtggagatatcacccctcgctgatgaagtaccgccggacgaagtgggtgccttgctgtcttcgtatcgtcggcgtcaacgattccatcatttgaaggacggcacgctggtcaaactcagcggcgcgaatctcagcacgttggaccgattggccagcgaccttgatctgagcgagcagcagctcaactccgggctgatcgagttgccgggcggtcgagcattcctactggatggtgagctgccggatgacggctccgatgtagtcaaggacgcttcgttcaccgaatacatcgacgatctcaagatcatcgaccctaagtcgtatgaagtgccggatagtctcaagcatattctgcgcccttatcaggtcgaaggcttccaatggctgaacacgttgtgcgacaagggttttggcggcattttggccgacgagatgggtttgggcaaatccgtgcagcttatcgccctgttgctgtcgcgataccacaacgaatctagtggcatgccgaccgctcaaggcatggatgccggtaatgctgttaatagtgaatcagccgtaaccggtcatattactttcgattccgaagatggcgggccgcatccatcattgatcgtgtgcccggcgtccttggtgtacaactggggtgccgaattcgccaagttcgccccgagcttcaacgccgtggtggtggccggtaccaaagccgagcgccgcaccgccatcggccgcgcgttccgggcggatgaacccaccgtgctcatcacctcatacgacctgctgcgccgggatgtcgatgattacaccgccaatgagcaacgtttcaatgtcatggcgctggatgaagcccagtacatcaagaatcacaccacgaagatagccaaagcggtcaaggccgtggccgccgaccatcgtttcgccttgaccggcacgccgatcgagaaccgactctccgaactgtggagcatcttcgacttcctgatgccgggactattgggctcatacaagcgattccatgagcgctacgagttgcccatctccaacgcccgggctgcagatggcagcacggccgaaggtcgggccgccgcacaggtcaatcctgaggccgcccgggtgtctcgccaattgcagtcgttggtgggcgtgttcatcaagcgcaggttgaagtcccaagtgctgaccgatttgccggacaagttggagaccacgctgaccgtgcagcttgccggcgaacagcgcaaactgtatgcggcccacgagcagcggctcagaatgcagctcgaacacagcgaagaagccgatttcaacacgtcgaagattcgcatcctcgccgagctgaccaagttgcgccagatctgctgtgatccaaggctgctgtatgccgatgccaaggatcagtcggccaagcttgccgccatcaccgaactggtggaaacctgcgtgaatgaaggcaagaaggcgctgatcttctcccagttcaccagcttccttgatctgattgccgaacgtttcgacgcgcaaggactacgctactacaccatcaccggatccacgcctaaaaagaagcgtctcgaactcgtcgaccagttcaatgcggacgatacgcccgccttcctgatttcattgaaggccggcaacaccggactgaacctgaccggtgccagcgtggtcatccacgccgatccatggtggaacgctgccgcgcaggatcaggccaccgaccgagcacatcgtatcggccagaccgaagacgtcaacgtgtatcaggtggtggccaaggacaccatcgaagaacgcatcttggagcttcagcataccaagagcgagctcgcccgccagttcaccgatgcttccttgcttgccgacgaagctggcaccggtgccagcgccctcaccgaagcccccgcctccatcgccaccctcaccaaggacgatctcctcaatctgctgggatgagaagatcctgctcggtgctcttgagcttggtgatggaaacagtctgggctttgtggacccgttcgctaagccgagaccggagtcgatagcggtgtggcatggtgcgtgcgtggggagcgtgattcagttgttggctgaggcgattcggacgctgtcgttttgtgctttgttttgccgttgaccaattgaaatgctcgttggtaggagacccccaataaagctccgatttgtcgatacgtgagtccctcgttgcgtagggcccgtgcggcgagtcgggattcggcagccgcttgtgcgttggctttttttgctatttcgcgctgccggaacatttctgttacgtgttgtttggcttgtttcggcaacacaaacgtcaccttgagctccggattgtcgtcgtcgttcatgacagtgatgagatctttagccattggctcgatatcgtcaagtcctttggcctgggtcgaccgttcgatagctggtacctgaacgtaccaatatcggccatcgggttgcacaagcacgtcatagttgctcattgccaccacccctttccgagtttctgctcgctctcgttgatgatatccagcgtggttcgttctgagacttcattatggcgggggatgggtatcctcaacccgtccaggcagtaaacctcatgtctgctgccttgccgtaacaaatagaaatcgagccctcgctgctttgccgcttgccgaagtttcttgatgatgagttttcttcgtgtcatcataactctcaatctcgcactagacaaaatgcgtatgccgaattgccgggtgggagttgtgggtaaacgtagagatgttcattggtccttctttctgttgtctgacgcgtcgttgcgtgcgggtgcatctgacggtatgggatgaggtttctgattggcaagctgaacgggggtatgtggttctagcttccgagttatccacattgataaagtgcttttttaaagtgactttcccgtgttggtcgtggatgctgcgagcaaggcaagaacggtcgatcacgtcgcgatgtgtgtgggtgaatggtgaaagtgattttcgatatttttatattgatattcgatatattatgatggtgacatacggggcagtgcaggttcatccattgatattggattaaggagcatagccatgaacgctggtatcgcattcatctctcgcaaatctcgcaaagcagacgtcgcttggcgctatgccattgcacttggtcggtggcgggggagtcggcgttatgttcgacgtcagtgccgtcattggcagatggtgcaaccgccacgaacacaggggtctgatcgttggccagaatcgccttcaattcctcgtccgtgtatttcttggcaccgcctttgaacagatccggtcggccggcatgatgcacttcgagcacctgccgcagcagttcgtcgatttggggaatatcggccgccgtggccctacgaatcatcatgtcatccatttgattcggtctaatcgtgcagtctcgaccggcagatgatcattgcccgcgataagagacacggacgggcaagatgggtgattgttcgttcaggctttcatcctcgccgcaacgtcacggtagtctggagtgcgtgaatcgcaagaaacagctagtggagaagtatgagcggggcacccgttcgtacacgatgtcgcatattcgtggcaaagacaccaaaatcgaggtgctggtacgcagctatctgtttcgcaagggtttgcgattccgcaagaacgacaagcgttaccccggccacccggatgtagtactgccgaaataccacaccatcgtgttcatcaacggctgtttctggcatatgcatgaaggctgttccaaacattcgatgccgaaatcgaatgtggaattctggcagacgaagctactgcgcaatcacaatcgagacatcgcgcagcgggctgaactggaggccgccggctggcgtgtaattaccgtatgggagtgcgaattaacgaaagccgtgcgtgacgaacgcctcgcacggctgtatgagcagattgttgaaggagatgcagattcagcggaataatttcagctcccctctggaggggagctgaaatcagacctcaaacgggaacttcaggccccaacggtcgcgaatcgcatccatcagctccatgatgcggatggtgtcggcgtgcggcatcgcctcgcattcgatcttgccatccagcagcgcgttggctgcatcggccacctcatactcataaccggtcaactgcgacggcaccgcaacactgcgcacgggcttgtgatcgttgttgtagatatcgatggactcgggattgttgatattggtgaccaccaaatacccttcggtgccccacacgtagccgccgcgatcggaggaaaccagcatcgaactggtggacacggccatcgtgccatcatcgtaatacaacgtggtggaattctgtgcatccacaccggtttcggcggccatcatcgacgtatcgaaatgatccagcgtgcggccatggtcggcaccgatcgccatatccaggaagttcagcggatacacgcccacatcgagcagcgcgccaccggcacaggccggatcggtcatacgtgccttgccggacaccggatagcacaggttggcgctcgccgctttcacctcgccgatctcgccggactcgataacttcgttgatgagcttgcggctgggcatgtagcgcgtccagatggcctccgtgcacagcatgccggtttcctcggccacggccagcgcctcacgcgcctgcccggcgttcgcggtgaacgacttctccaccagcacgttcttgccggctttcatacacaggatcgcctgttcggcgtgcagactgtgcggggtggcgatatacaccagatccacatccgggtccgccgtcaactcctcatacgatccataagccttgtcaaaatgccattggtcggcaaaagcctgcgcgcgcgtaatatcacgggccgctaccgcatacgggtgaatccatgaggaatacagtgaaccttcagccatctgggtcagggtgtcggccatggtgtgagctatgcggcccgcacccagaatcgcgacgttgatcttttcgccgctggcctcgaactcggcgcgtttgccattgaatcgactcattattcctccttgaatacgggttggtacactcaatcgacctacagtgattatagaagaagaaaccttgtcccgtgaggcggatagaaccgaaatatggaaaacgaagcagcgcagcagccccaatctccggccgcgtctccagtcatgtcccgccgagcgcgtgaggccaatcccttccgtgccatggtattcggcgaacaagcagacaagatgatcgcccaaggtatcagcgtcatcaaattaagccttggcgagcccgatttcggcgcgccgcccgccgtacgcgacgccatgcgcgaacagtacgacggccgggccctgccgtacaccgccgccatgggcctacctgaactgcgtcaagccatcgccgacttctaccgcgagcgtcatgaccttgacatcgaccccaagcgtatctgcgtgaccgccggcggttcggccgccctgctgttggccaccgcgctgaccgtggaccccggtgacgatgtgattgtggccgacccctcctacccgtgcaaccgcgaacttgtgcgctcctttgaggggcgggtcatcgacgttccgacctcggccgccacccgcttccacctgaccgccgacctgtgcagccagtactggacaagcaagaccaaggccgtaatgatcacgtcgccgtccaaccccaccggcaccaccatcgacttcaacgtattggacaaggtgtgcaagctggccgccagccgcggcgcatggcgcatcgtggacgaaacctaccttgatttggccgaccgtgagccggacggcaccgaagtcaagtccgtactggcctgcgatcccggtgccatcgtgtgcaacagcttctccaagttcttcggcatgaccggctggcgtctcggctgggctattctgcccgacgaccccaccgtgctggaagcggtcgacgacctggccaccaactactacctgtgcgcccacacgcccacccagcatgcggcgctcgcctgttttacgccggagagtttggccgaatgtgaagctcgtcgtcaggaattgcttgcccgtcg

SEQ ID NO: 3999 - DNA, 7480 bp, Unknown
  R22_24m  MAG No. k141_55760
ccgcaagtattcgagagtcgccagttcggtcgatttcaatgacaatggtgtggacgattacgcggatatcgtggcgggtgcgcgcaaggacgccgaaaaccatccggcttacgattccggctactatcagggcggctatccgccggccgatcgcggggcgtgcaccgtacgtgattcacaacatggcgcagcggcagcgcgaaaacgactacttcgccttcaagaagcacatgacggtcaccgggcactaccgtttcgacgcttcgaaagtgctgtagagcgtactcagggcttggcggtgacggtcggagcggcgtcggcattgccggctttggctccggctgcatcagctgaatcggtgccggccgcactggcgttagcactatcgtcagcgttggcaccgccggctttggccttggcatcagccgcgctcccgccatcgatcaccagtcgcagataatcgcggtcggcggacttgcggcgcggcacgaaccgactgatgatggagtttttcttgccgcggttcttcacgtacaggaagccgaacacggagaacacgaccgcgccgatgaagttgacgataagatcctccatcgtgtcgatcagaccgatgtcgaggtagccgccgaggcccaagtcttggccattgaccgtgacctgggtgatgtcgttgatgcgaatcgcatggttggtgtgcgtggggtcgagcatcaacgagctgatggaatgcacgatggcgtctttctgcatgtcgaatccgaacaactggtccatgccgaattcgaagaactcccagatcacgccgatggtcatggagaagcagaaggagacgatcgccagatacaggggcgaaagctcgaacttcacccggtcggaccggttgagcaggtcgaccagcgagaagccgatcgccgcggcgaggaagccgttcatcgtgtgcaacaccgtgtcccagaacgggaagatctcatagaacgaactgatctcgccaagaatctcggacgagaacacgaacaccagcacgatgacttccagcaccgaaggcagctcgatgcggaactgcacctggatgaacgccggcgccaacagcaacagcaacgtcaggatgcacaggaacacattttcgtagtcgccgttaaagaactggagtattgccatggcgagcaccagcatgcgcagcaccacatagaccgcgaatgagcttttgtgttcgcggatttccatgtctacggctcggctcatggtcttccagcgtacgcgccaggacggtttgcgttgtgcgtcgtgctgttgtgaccgtttccgggtcattcttgcctctttctcgcattgttctcgcgccagtctatccgaacctgcttacaggcaatcggcaagaacgggcgatagtctggccgcatgaaccgaatggaaaccgatgctgcctcgattgtggaccgcacgaatcatgcggcgatgctcgatagggccattgtgccggcggcacgccaccgcgtgtgctgattgcagtgctcgccgtgctgctgtaccgccgtatgggcatgattacaccgctgatcgtggctcatggcatgtatgacgtctccgccgccatgaccaatctgaccggaatcgccggctcctcatggccactggtcgtagggctggcaatcatggccatgccggtggtttgggctatcgtgaggtgtgcgagataggctttgtaccggttggcagcaaatcaaaccagcgagacaacggaatgaacgaagcgaaaggaacggtatctgatgactccgattgaattgtcaacccgacgccgggttacgggactgacttcggatgagttcgccaggctgttcgtctctttgcaacgcgatgtggacggcgaagccgcgcattggagcgccacggacgtcgaatcctgggagctggtcggcccgccggtgaccgccgaacagcatcttatcgacacgttcgccgcggccaacgaattcgtggccacgcttgcggaccgtctgtaccacacgatcatgccagtcacggaagaatcggtcatcaccgcatacgctgatgacctcacattctgggcatcgcatccggaccttggcggagtgccgtgcgcattatggaacatcgccgcactgcaggcggccgaatgggcccgcaaggaaaccggcatcgcctgtgaactagacgtgcgcgaaccgctggtgtgacagctgagctcaaacatgggcgtaggtaacggcatggtttgaggactatggtgttgcgttaccggtcggaaaggatatgatggtggggcgtcatagcaaaaaagcgcgtggacagtcgaggagacatgcgcgaaagccctccgtttggagtgaaattcgcggctatctgctgacggtgatcgaggtgatgctggtcgtgttgctgggacgcaccttcgtgttcaacgtctatgtgattccatcccgtagcatggaagacacgttgcaaatcggcgaccgcgtatttgcctcgcgattgactccgagactctttgcactgcaccgtggcgacatcatcgtgttcaaagatcccgcagactggatggagggggagcagcttcccaccaatctgatgtcgataatcgacagcaatcgttacctaatcaaacgtgtcatcggtctgcccggcgataccgtcgcctgcaagggatccggggagcccatcacggtcaacggcaaacccattgatgaaagcgcttatcttaagtccggcgtgaatccaagcgacagtcctttttccgtaaccgttactgacggcaacgtgttcgtgcttggtgataatcgctccaattccagagattctcgataccatcttgacgacggcaacaatgggctagtgccatacgacgatatccaaggtgtggcgttgttccgcttctggccatttacgagaatcggcttgctcaattgagtttggcgtgaatacgcaagttgacatgtgtcgcacggcccggtgcatcctgcagtcggaccgtttccggaaccctccccccgaaatctgacgaccctcctgtctctcagctatcgtacagctccgatacgggaaacgtgcgggtgattccataacgactacgtatttcaggaagtgacgtgtatcacattatggtcatgtgttcagtgccgcagataggcgaagtttattcatgagccgaatagggccggtgaagcgggctctcactgcgttcataatacggcatatcgtgaacggcgttatcatcacagtcaggccgaattaaaggaggctcggtcatggtcgccgcatccacggcattcagcccgtcaagcacgatgacggccagtttggtggaatcgactggcctgcccagtgccgctattcctgtgcgcgaggatggtaacaacggcaacggcgacagtagtgccgatggcagcggcgacgacggcggcatggtcagatcgctgagcctgtggaactacttcaccatgggattcggcgcaatcatcggcaccgtatgggtgctgctggtcggtgactggatgatcgtcggcggtggcccggtcgaggcgatgatcgccttcgtgctgggcgccgtgtttctgctgccgatcggctcgacgtccggcgcggttaccatggtcgggtcgtttctgcccggagtgctggtgatgacgccgctcttctacaccggtttcgacacgattccgcagagtgccgaagaggcaagcgaaggccttgactggaagaagttcggtatggtcatctcagcttcgctgctggccgccggcttaatcatcattggcctgcaggtgctgccgttctccccggccgcgctcaaacccacatcatgggcaatcgtggcggtgtggatttgctgggtctggcattgcgttggatcagtgcacgttcacggcgcgaatagcggtgcgccggtaggtcgcgagccgttcagtcgcgcgcgacccaaagcgtatcgaggtcgtcggcctcggtcgcttttttgcgcttgcgtacccactgttgcaggaaatacgccccatagcaggccacgatgaacacgagctcggccacgagcgcgaaccgttgctccacgtcgaaaatcaccaatacgaacgatgcggtgcacaggatgaacgccgcccaagacacgtacggatagccgggcgtgcggtatttgagttcgctggtggaatggccggactccagccaacggcgacggaacacgatctggcagtaggcgatggcgatccacaccaccacggcggacaggccggaaagcgccaccagcaccaggtacacagtcgaggcggcgatcacggaagacaggagcgccagcaggccaccggccatcgcggcgcacaaggcgagcatcggcacgccgcgacggttcgttttggcgaaccagcgcggaatcatgccttcgttgcccatcgaccacaccatgcgcgtggaggcgtacaggccggaattcgaggcggagagcacggccgtgagcaccacgaagttcatgatgtctcccgcataggggatgcctatgccgttgaacacgagcacgaacgggctttcgcccacgccggccttgcgccacggaatcagcgcgcacatcacggtgatcgagccgatgaagaacagcgccagacgccacagggtggtgtggatggctttcggcacggcggtttgtgggtccctcgtctcaccggcggtcacgccgatgagttcggtgccggagaacgcgaagttgacggtcagaatcgtggcgaacaccggcatgaagccgttggggaagacgccgtccttgatgagattgccgaacatcggggcatgttggtagccggcgaccgggatgacgccgaagatggcgagcgatccgatgacgatgaacgcgcagatggcgaacaccttgatggaggcgaaccagaactccgcctcggcgaagaaacgcaccgacaaggcgttcagggtgaagatgagtgtgatgcacgccgcgctccacgcccatgtgggactgttcgggaaccagcgctgcatgagcagcccggcggcggtgaactcggatccgagcgccaccgtccatgtgagccagtactggatcgcgatcacgaagccggtgccagggccgatgaacttctcggcatacacatggaaggagccggtcaccggcatggccacggacagttcgccgagcgtgagcatgaccaggtagacgatcagcgcgccgatgccatacgccagaatggtgccgatggggcccgcctgctggatggtgtatccggagctcaggaacaggccggtgccgatcacgccgcccaacgagatcatctgcaggtggcgggattccatgccgcgcttcaggttggtatgtagggcgtgctcgtctttgccatcatgtgacgactcggactggctggtttgcgctggttggttcatctgttccgaatggcttcgacggccatccgtctgaatctgcggttcctgttgcgaggacggcgattgtgccgccgtgtcggtgtcgggctgactcatgtttctctctttgccatgcgtgcgttccataggcgtcgtcgtgacggcccggaatagtatacccgcactgaggatatagctgcgctgcatgatgctgagtcaaaatcagcttcaaggggctgatttggcgtttgccggaggtctacttccgtttcaaggggctgttcaactggcggaacgcagatagaaatggcattgttctatcactattccgccgtttttaaccagtggctactttggcatcagccccttgaaacggaagtagatgttccgcaaagtcaaaatcagccccttgaaacggagataggcactcgcagcggctacttcaccttctggatacgcagcacgaacacggcagcgtacacggccatgacgatggagatggcgaacgccggcgtgtaggtgccggtcgtggtcttgaccacggaggtgatggtggggccgactgcttggccgagcgtggtggccaagctgaggatgccgaggtccttgtcggcctcttccttgttcggcaacacgtcgacgttgagtgcctggtcgatggccgagtacacgccatagccgaagccggcgatgcccgcgtacaggtacatgcccgtgacactcggcatgatccacggggtgcggcgtcccatcttggaacgcgtgtggtcggagaggttgccgaacacgaggttggaaaccaggcccacgatggcggtgaccgagttcaacgtgccgactgccgcatccgggttagcgacgccgatgtccttgaacagctggggggcagcacggtggccaccacgtacaggccgctgctccacagaagaccgaaagccagaaacccgacagtaaatcgaatgttgtttgttttgatgtgtccttggacatgtctgtcagcctcctatggtgattgcgtgccgttgtatggcgattgtagaccggctcggattggcggttttccgggctttttgagcgtgtggtagcggccgtatgcgccgttgcaatattgatcttgtgaacggttaatgtactcggggctcaaaatatattccagcgtgcggcgcgtttcttgtttaaggaaagtaattcgaaaaaagcagtcgatgcatggccgtatcaggtgccgtatggcgagcggcgtatggaaaaagtgtctccgtcgggttgtgatgagcatctatgagattgacgtatgtcgtcaggggcagcaattggcatgtgcgggtggatttgcggctcaaagatggggaaacgatatgagactggcgatggcgcagatggcgatgaccgacaatatcgacgaaaacgccgatagggccttggcctactacgatcaggccggcgaggccggtgccgatctgttgttcttccctgagatacagttctccccgttcttcccccagtatgagaaccgcgatgcgtcgcgatatctcatggacctgaccgaccgtcacgtcgccgcattacagaacaaggccctgcaacacggcatgtacgtttcatcgaacctgtacctcaaagcccaggacggccacaactacgacgcttcgctatggatcaacgaacaaggccatatcagcggcatctcgaccatggtgcacatcctgcaagcagaacgcttctatgaatgcgactattatgcgccctcccgagacggattccacgtgttcgagaccccgttcggcaagatcggcatcgtcatctgcttcgaccgtcacatgccggaaagcatccgtacatgcgcattgcgcggtgccgatctggtcatcatcccgactgcgaacatcagcgccgaaccattggagatgttcctgtgggagattcgcgtccaggtcatgcagaaccaggtggccatcgccatgtgcaaccgggtcggcaaggagggcgatgtggcgttcgccggccaatcagtggtggtggacccgtacggcaacgtcgtcagcgagactgatgaccatgaacagttgattatcaccgacatcgatctcacacaaaccgc

SEQ ID NO: 4000 - DNA, 12818 bp, Unknown
  R22_24m  MAG No. k141_56442
tccggtgcgcggggccggcgatgtggcaccggccggtccacggccccgtcttgagacgctccggccggtacggccggtaggattcgttctcgttggacgggaaccatgtgttgcgtttgattccgcggctgaccgtggaggtgtgtctgccgatcaggccggcgatccgccgtatgctcgtcccgttgccgatctctatccggatgatccgccgttcctcttccgacaggtgcgaatacacttgacccaaggcgcgacaccccttcactggttatctggacaatctccaatttaaagggtgttgcactttcatctagacaacgggtgccaattttcattggcatccatatgatacgattaacttatcagatgtctgatgtctcgatatcgagacgtacgacaacccatcacaagaccgaggcgacgagcatggcaccatggcagacaacggatttcccacacggcgcgggcaccgtcatcgccgaattctccgtacgtgcggacgggccgatctggcgggcgcaggtccccgccaccgccgacggaattcccactgccgccccatacctttgcctggccgtgcgtgacgggcacctcacgctgacggcgcggtccctgtccccggacccggccgacccaaatgcgcagtcccacgtcagcctcgacatcgaagacgccttcggcctcgatcctggaacgatacacgaggccgcattgaccttcggcgcgttcggcacgcgcatctacctggacggataccaatgctttgcctgcgccggcaatctcaatccctcacgggtccacccatcgggcgcattcgacctcggctcacccaatgccattgcttgcaatgcgttcctcgtcgaccccgtggattgggacgccgtccgcatcgccgagcatgccgcggcggccaagccggatatcgtcttcgcctcggaccggctctcccccagggataccgatcgcatcgccctggcggatgcgggcagcgtccatgcgagattccgcctgcgcggccgcggacagcatggcacgatcctcgcggccggcgtcgatggaagcgagcgcatgaccgtcgccatcggcgccggaggactgacgctggccatgcgggacgaatccggagcgggcatcgcatgccacgcgccgggccattgggatgacggaggctggcacgatctggccgtccgctcctcgcgcggcgccgttgacctctttatggacggcgtcagcgtgctgcaccagccgggccagatgtggttcgcggatctggccggtccacgccacggccgaaaaggcatcgacgctttcaccgtggggcgcaatatcgccggggtgcggctcatgggcgaggtcagccgtggaggcctgtacgtccacgcgcttaccgacgggcagatcgcacggctcgctcacactcccccgatggtcaccacggcgctgttcgacgcgggatacgccgggtcggccagctatcgcataccctcgctgatccgcaccgtccgcggcacgctgatcgccggggccgaccagcgaacggcgatcagcaacgacgcccccaaccacatcaacttcgtcatccgcaggtcaaccgacggcgggcgcaactggatgccgatgcagacggtcatcgacatgcccggacgcgaggacgggctggacggggccagcgcgctcgactcctgctccgtagtggaccggagcatcggacgcatcacggtattgatcgatctcaatcccggaggcatcggcctgaccaactgcgagcgcggcatcggcgtgaaccgcgacggcgttctgcgtctgcgggacgctcagggcaatgagaccacgctggacgccgtggccgacgccggcgacgtgtggcgaagtcccatgcatgccgacccgtcgcaacgctggcatgcggttcccacctgctacatcgcgcagatccattccgacgacgacggcgagacctggtcaccgccattcctcattgacgcaatggtcaaagaggaatggatgcatttcatgggcgtatgcccgggaaccggcatccagctggacaaggggccatatgccggtcgtctgctcatgccgttctattgcagcgggcagagccgcgcccactattccggcggagcactgatcagcgacgacggaggcgaaacctggcgacgcggacgcatgatcaacgaggggcgcgagatcaacgggaccgtcgtcgatccagccaccatgcgcgacgacgacgcaacgaccagcgaaacgacgttcgtacagcgcgcggacggcgacgtagtggcgtttttccgcaaccagcacgccagcggacgcgtgggcaaggcggtcagccacgatggcggcgatacctgggacgagcttgagttcgatcccgccttgccggagatcttcagccagccgaacgcccttgcggtgccgcagcttggcactgacgcggtgctgttcgccaacgccagccagatgatgccataccggggacggggcatggtgcgactgagcgaggacggcggacggacctggacgggcagcctgtgcgtgcacccccatcatcatgtctatcaatgcatggcaatatgtgaaacgacgcacgacgtagaatgtgaaggttcacaattgggactattgtgggaaatagagacgacgggggtttacattacgcatatcccccttgcatggttttcacatggccacgataagggcgtcgcggccaaccatacggacgacaaggagtcatcatgaacggcacagcagaccgagccacggcgggctcacgcgcaacggatacggaacccgacgcgccgcaaggccaatacagtacgcaggagctggccgcgctggcgcgcctgtccctgggcaactggtcgaccacgcaggtctcttcccgcagccgatgcgacgagacgatggacgcgatcaagtcgtacatactgcgcgaacgtctgcaaccgggcgacgtgctgcccaccgaaacgcagctgtgcgacaccatcggggcgtcccggtcgtcggtgcgcgaggccgtgcgcaagctcgaggcgctgaacatcgtcaaggtggagcacggcaagggcaccttcgtcggttccctgtcgctggaccctatggtggaaacgctcgccttccggtcgatggcgtcggtcggcaagaatttcaccgatctgcaggacgtggtcgaactgcggcgcttcctcgacctgggatgcgccgaggaggtctgcgcgtccctggcgggaaccgagcagccgcgcctgacggaacttgccgagcgcatgagcgccgaagccaaggaaggcaagacgttcaccgggctcgacatcgaatttcacaggggaattctcgattcgctcaacaacaccgtggccaagcagatggtccgctccctgtggctcgtgcacatggccgtgctcccccagctcggactggcggtttccagcgaacttgaccgtaccgccgacgcccatcaccgcatgctcaacgcggcgctggccggcaatgtggacgactaccgcgaggccgtgttcgaccattacgagccgatcgaatcgattctcaagcgtcgcatcgtccaggagcagtaaacccgaaaccgcgggccgattggcgcgggcaatccagtcggcccgaccgacatgcgacacgccccttcaaaaagtaacccgttacacgatccgacggcccgcgcaccacaccgcggtcacggtgagcgtgccgggattggtgagcagcaggtcggcggcgtagccgggggccaccaggcccagcggcgcgccggttacggggttcggccgatcaaggccgagcgcatgcgccggggtgagcgtggcggcttcgagcgcgtcggtcaggcccatgccgagctcgcgcacggcgcgctgcaccgccacttcgaggatcagcgtcgagccggcgatcgcgccgttcgacaccagccgggcgtggccgcccaccacgttgacgtccagcgcgcccagtttgtaggcgccgtccgcacaaccggtggcggccatcgcgtcggtgacgaacgcaatgcgatgcggcgcgaaacccagtgccaggcgaagcgcgggattggccacgtggaagccgtcgttgatcagctcgatcgtgacgcgcggatcctcgaccgcggccggaatcgggccgggctcgcggtggtggatgccgttcatcgcgttgaacatgtgcgtcatgatgcccgcgccggcgtcgatcgcccggcgtgcgacgtcatagtcggcgtcacagtgtcccacggcggggaccacgccggccgcggcgaagcgccggatcgcgtccatgccgcattcgcgctcgggggcgatggtgatctgccttagcgtgccgtcggcggcctcaagcagacgctccacgcgctccggggtcggatcgcacaggcagttcgggtcatgcgcccccttgcgggccaacgccaggaacggcccctccagatgcgagccgagcacgtcgggccgcgttgccatcacggacctgacgcattcgaggttccgcgccatcacatccagcggattggtgatcagtgagagcacctggcgggtggtgccgtgcagcatgtggtacgcgcgcgccacggcgatgccctcggcaccgtcgtcgaacgaacgctcccaggcgccatgcgcatggatgtccacgtagccgggcgtcacgagcatgccgccggcatcgacctcggcgacctggtccccgccgctgagatgggcgatgcgggtttcaaggtcagcgtcgctcgtgcccacggcgtcgattacgccgtccgtcacgctcacccatgcgttgagctgcacgccacgcgcatcggccttgactgcattgcgaatgacgaaggttcccaccctggcggcgagcgcatccgcgaccatcgtcgcctgatagcgtttttgcatctgcgtttcctcagatcttctgccaggcgggcttgtgctcgtaggaataccggtagtagtccttgccgcgcagtttcgaggcggccgcctcgtccacgatgatcgtagcgtgcgggtgcagctgcagggcggatgccgggcagtacgagctcacgccgccctccacggtctccgcgaccgcctcggccttgcccgcgccgaacgcgagcagcacgaggtggcgggccttcatgatcgtgccgatgccctgcgtgatgcagtgcgtgggcacctggttgatgtcgttgtcgaagaagcgcgcgttgtcgatgcgggtccgctcggtcagcgtcttgacgcgagtgcccgaggcaagcgacgatccgggctcgttgaagcccacgtgcccgtcggtaccgatgcccagaatctgtacgtcgatgccgcccgcggcctcgatcgccgcgtcatatgccgcaccggcgccggcgaccttgtcgccgtcctccagcgcggtgccgttcagcgcgtcgcccggcacgtgcaccttggccgggtccagtcccagcggctcgaccaccgtgcggtggatggtcgcatggtacgactcggggtgcgtcagcggcaggccaatgtactcgtcgagcgcgaaaccgcgcaccctggatacgtcgattccctcgtccctgacgattgtcgcgagcgcccggtacgccgccagcgggctcgagcccgtggccagtcccagcaccgcgtccggcttggccttgatcagatcggccacgcaacggccatacagttcgccggcctcctgctcggatttgacgatgatcacttcagccatggcaattcctttcgtatgagcctattggcgttgcgccgcacgaacgccgccacgcgcttgcatgcgggcgggcattcgcgcaacgcatatggttgtgcggcaatcaggcctcagtggaggcggaaacctcttcgggggtgcgttccagcttcatgccgcactcctcgagcacggtggcgatgcgtttcacattctcgcccttgagcggcagcaccggatcaggcatctggttggtgtcgaacacgcccagcagcgccattgcggtcttgaaggcgcccactccggagccgaagcccgccacgccctgcggcacggtgacgatgcgcatcagcgcggccagccagtcctgctccttcctgaccgtggcccagtcgccggcttcggcggccttccacatgcgtacgtagccggtggcctccacgttggccaggcccggcacggagccgtcggcgccggccatgtaggcaccgtcgaccacaacctcctggcccgtcagcagcgtgagcggatggccggccttggcgttgtcgtccacaaggaagcggaaggccacgtcgtcgttcgaggagtccttgacgcctgcgagcacgccgtccctgcccagcttgaccagcaggtcgcccggcagcttggtatgcacgcacaccgggatgtcgtaggcgaacagcggcaggtccggcacggcggcgtgaatcaggcggaagtggcgctccacctcggccatgccgcccagggcatagaacgggcacgtggccacgatggcggacgcgccgagctccttggcctccttcgcatgctcgatcacgcggttggtttcggtgtcgatgcagccgacgaacaccggcacgcggccgtccacgacctgaatcacggtctggatgatctcgcggcgacgcgcatcggtgctgaacgccacctcgccggacgagccgagcgtgaacaggccgtcgacgccggcgtcgatcatgcggttgatcgagcgggcgaagctggccttgtccacttcgccggaagcggtgagcggggtgacgacggggggaatgaccccgcggaattgggttgccatgatgatgtgtcccttctttgaggattgtctttgaggattaaaaatggactgctgaaattattcggcgttggaatcgggcgaacgcgatttcaacgcgaggaaggcctcacgcgcattcggccgcggtgggatgcagcagcgagggcgccgcgtccatgaggatcctggtgtacccgtcctgcgggttgcgcatcacgtccatcgtcttgccgcgttccacgacggtgccgtggttcatgaccatcacctcgtcggagatgtagcggacggtttggatgtcgtggctgatgaacaccatcgacaggccgagcgtcctcttgaggtccgagagcaggttgaggatctgtgcgcgcaccgagacgtccagcgcggaggtgggctcgtcggcgatgatcgcgtccggcttgagcgacagggcgcgggcgatggcgacacgctggcgctgcccgccggacagctgcccgggcagggcgcccagcaccgaggtgggcaggccgaccatgcggatcagctcgtgggcgcgcctgtcgcgctcctccttggaaccgagcttgtggaccaccagcgggtcgagcagctggtcgatgacgctcatgcgggcgttcagcgcagtcgccgggtcctggaagaccacggagaccacgcggccgatgtccatgcgctccttggcggtgcggtgggtgacgtcctggcccttgaacagcaccttgccgctggtggcctgctgcaagccgcacatcacgttggccgtggtggacttgccgcagccggactcgccgacgatgccgatggtctggccgggcatgagcttcaggttcaccttgttgaccgcggtgatcctgttcttgtggaacagccccgatccggcgcgggtggtgaacaccacctcgacgtccctgagctcgatgatcggaacgttgggatccttcctgggggtttcggcggcgtggctcatcgggcacctccttcctgggtggaaactgtcgccgcggcgggcgtgacgtcggcatcggccggcagggcggcgtaatagtgatgcgtgccgggcacccgttcgaagatcgggcgcgtgttgaggccaacgtccgggtggctggagcggggagcgaagcgatcgcccttggggaagtcggccggggacggcacggttccgggcacctggtgcaggcgcttggcccctgcctcgatcgaggtgaccgagccgagcaggccgcgggtgtactcgtggcggggatcggtgaggatctccttggtgaagccctgctcgaccacctggccggcgtacatcacggtgatggaatgcgccaccttggccacgagggcgagatcgtgcgagacgaagatcatcgcgaagccgagcttttcgcgcagttcgttgagcaggtcgatgacctgcttctgcaccgtgacgtcgagcgcggtggtcggttcgtcggcgatgatgagcttggggtcgcgggtcagggccatggcgatgagcacgcgctggcgctggccgccggagagctcgtgcgggtaggattccagcgtgcgcttgggatcgaggcccacgagctcgagcagttcctcggcggagcgggtgccgccgcgggaggtgagctgcttcatctgcgacttgatcagcatcgaggggttgagcgaggagagggcgtcctggtagaccatggcgatctcgtggccgcgcagggcgttgtgctccttgggatccatgccgacgaggttcttgccgtcgaacaggatctcgccgctgatctcggccttcgggtccagcaggcccatgatggccagcgaggtgatcgacttgccgcagccggactcgcccacgaggcccatggtctcgccgggacgcacagagaagctcacgtggtccaccacgttcacgtcgccgtggcgcgggaacttgatgcacaaatccttgacctcgatgaccggggcggccgtgctcgtcggctcgaaccggtcggtgcgcttaagttcggcctccttgagtgcggcgagggaatcggccagggattcggcctgctccctgtaggcggcgactgggtcggtcaggaggcgatcctccctgcgctcggcctcggcgtcggcggcggacttggtcaccggggccgtcggggcggccaccatggcgtcggtgatgccctcggacaggatgttgaggcacagcacggtgatcatgatcgccagacccgggaacatggcctgccaccagtagccgaagatcacgccggccttggcggaggacaggatgttaccccaggtcggggtgggctcgggaatgcccgcgttgatgaaggacagcgacgcctcgaacacgatcgcgtcggcgacggacagggtggtgaacaccatgaccggggcggcgatgttgcgggtgacgtgcttgaagaggatccacggggcgcgggcgccggagacaatgaccgcgcgcacgtagtccttgccgtactcgctgatgatgttcgccctgacgatgcgggcgatctgcggcacgtagagcacgccgatcgagatgatgatgccgaccatcgactggccgaggatcgagacgaacacggcggcgagcgcgatgccgggcacggacatgaacacgtcgatgacgcgcatgatgagctcggagatccacgtgcgggtcacggcggcaagcgcgccgatcagtgagccgacgatgagcgcgaagacgatcgagctcaggccgatgaccagcgagtagcgggcaccgtagagcacgcgggagagcacgtcgcgaccgagattgtcggtgccgaaccagtgttcgccggtgggcgcctggtagctcatcgtgatctcgagcggatcgtgcggggaaaggacgggtgcgaagacggcgcagacgatgagcagcgcgatcaccacgaaggagatcttgcttcccacggtcatcttgctgaagcgattgaatttgacgccgggcctgcttgcggcctcggccgccttgttcttgccgaatagcatcgtcacaccgtcctgattcgcgggttgatcagcacatagagcagatcaacgatgatgttgatgatgatgaacgcgagggccacgacgagcaccacgccctggacgagcatcggctggttgccgttgatgccgtcgaacatcgcggtgcccatgccgggcagggcgaagatgacctcgatgacgatcgcgccgcccatcaggtagccgatcttcatgccgagggtggtgactggggtgatcagcgcgttgcggaacacgttgcgcgagacgaccacgctcttgggcacgcccgcgccgatggcggtgcgcacgtagtccttgtcgagctcctcgaccatcgaggtgcggatgatgcgggtcagctggccggccacgggcaggccgagggcgaaggacggcatggccatgcgggccaggtacgcgccggggtcctgcgtgaacgggacgaggtcgccggagccggggagccacgccatcttgatctgcagcacgtagatcagcagcacaccgagccagaaggacggggtggcgatggcgatgatcgaaaccacgcggatgatctggtcgacccaggtgtcgcggtacagggcggcgagcacgccgaacacgatggcgaacacgatggcgatgatcaggccgatgaaggtcagctgcagtgtgacggggaacgcctgggccacgcgggccgcgacggaatccttgttgacgccgtacacgcccatgtcgccgtggaacaagccgacgatgtagttgaagaactgctgccaccacggcaggtcataccccatctcgtggcggaaggcggccagcgcctcgggggtggagttctcgccaagcgccgcgacggcgggatcgtactgggagaaggacatcaggaagaacaccaaaaaggtgaccccgagtgccatgaacggcaaggcgatcagacgcctgcccaacagtcgtaacagattgctcactgtaaaagctcctatgcgtgcgccatcggcggttcagatgcgccgcgggcggggccggggcatccgcacgttcgcaggacgccccggttgccttgccgtccgttcggttcagccggtgatggcatatgtggattgcgtcagttcagcttggccttgaccaggttgatgccggtggagccaatggcctcccaagaggagaacgcgcccttcctgacggccgtggttgtcttgcgatggaacagcgggtagagcggcagctcttcggagagcaggtcgaagcactggttccagtactcctgtcgttcggaatcggaagaagcggcagtggccttgtccatcagctcatgtagctggttgtagccgtcagagcccttccagaaggagcgctgcttggtccaggcgttgtcgccgtaccaccagttcatcagcaggtcggggtcgttgccgaacacagagggatcgccgggggcgaggaccatcgagtagtcagcgtcgtccttgtccgtgatggacgggtacagcgcggaggacttcatcgactggatgtcgacgttcatgccgatctcggccaaatcgttcttgatctgcggtgcgagctgggtgatccaggaatggtcggtggtgtacagcgtgaagctgatcggcgtggtgaccccggcttcggcgagcagttccttggccttggccgtgtccttggtgtagacgttcttcgcctggtggtagtactgcgaatccttgggcaggaagctcgtggccgcttcggcctggccgctcatctggttggagatcagcttgtccacgtcgatcgcgtagaacacggcctggcgcacgcgcttgtcgtcgaacggctttttcttggtgttgaacatcaggaacggcaggttgaagccctgcgcggtcttcagctcggagccggacgactggagggtctggagcgcctgggccgggaccatttccatgatgtcggtcttgccgccctgcatggcggtgacgcgggcggtgtcgtccacggtcacgttccacaccatgttcttggcctgggccgggtaggagccgttgtacaggtcgttcctctcgaatttgacctgctggtcggtgatctcggcgtacttccacgggccggagccgatgggcttgttcttcaggtcggcatcgctcatggacgacgggactatctggatcaacgccagtcgctgcttgaagagcgggaacgccttcttgagcttgaacgtcacttgggtgtcggacttcgcctcgacggaatcgatgaagtcaagcatcgaaatgtacagcgagccggtggcggtggtgcgctggtaggagctgaccacgtcattggcggtgacggcggtaccgtcggagaacttggcgccgtcgcgcagggtgaccacgtactcggtgtcggagaccttctccggatcgcccttggcaagagcggcatagggcttgtaggtgctgtagtccagcgcgtacagcggttcggtgacgtgccagttcgcggccatcggcagggcgccggaggtggtggacgggctgaagtcgcggctcgcataggcaacctgggcggtaatggtgtccgccacggcagttccggtcttcgcggcggtctgggtgccgccaccgcatccggacagcagcatcaggctggcgacggccgcggccacggcggccttgaactttccgtttctcttgatcatgcgatctcctcatcattgagtgaatttcgaatcaccgtccgacagacgacgcgatcctttcctaattgcttcattgaccgttccccggcctgcgtccgcttcggcctttccgcgttacggcggaccattgcggtttgtgcgggactcctgcggggaaccaccaacatcgttgtcgaacctccttaatggtaagacgtctgatgtctgatttcaaatcggcgtgttgaggaattcactcgtcaaggcccctccgcgctgatctgcctatacttcaccagccttgaatatcggcaatatttcgggcttcgccgaccgttatcgttccgaaaatgtttgtttaccattctgcaataagacatctgacgtctgttaacataacggcaa

SEQ ID NO: 4001 - DNA, 3625 bp, Unknown
  R22_24m  MAG No. k141_57057
ccggtggcgcaggagttgtgcggttttcttgccggccgcgtgtgatgtgtattgtgtacgcggcgatgctggtcgtatggtggtgtcatgccgttctttgagaggtcgtcagggcccacgcgtcatattttcaagtatggtccgtctcgtatttattgttacgatcggccggattcgctgttgatgccggtgggtgcccggcgcacgtacaggtcattgctgaagtgggagcggaagttgccctgtgccacgccgttggatgggatcgcgcgtgatctgggtgctttctggctgttggaccagtggttcacggtcggtctgcatgggtgggccgaatcgatgatcagctccagcatatcggatcgcaatcgtacgttctgccagtccgtgttccgtgcgtccgatgccgcgaaccccaagtatgtgccgttattgcaggaacatcgcgatatgctgttcgaccgggtgcgcggtggtgtggcggggttggatccgtctgcgatggattatgtcgggtttcgcgcggcccgttgccgtgcggggcttgcggattggctgttcggcccggatcgggggatactgctcaatgatgttccgggcactggcgcgtggaacacggacccgttcccgcctgatggctggcgcgagcagctgggctggacgccgccggtttagtatgccgcacgccatctgtacagtctgtacggcatcgttgggggcctcgtcatgtccggtccggtatctggtttgccgggcctgggcatctgctgctcgtccttgttccctttcttgacaatgacaggggctttggctgaacagaatgtgggagtatgcttagtttcttgtagggggttcttttattgaagctcctcggcgtaatcgaccaatgacggcgtgagccgggaagagttaaggagatgggccatggcagaacatatttccgctgaagccggcgcgcttgcgaagggccagcaggccgttgcggaggcgaggcagggcatccagcagaagatcaccagggttcgtggcgagatcgagcagatgggatcgtactggtccggtgacgcggcgaccgctttcacccgcatggtgaatgcttgggatgagaagacttccagcatcaacaaccagctgaaccagctggagcagtccctgcggtccacggagcaggagcaggagcgttacgagcaggagacccagcagtccacctcgaagatcgccagcatgctgagctgattggttcggggaaacaagtatcaggcagataaggaaagcaaggaaatattatggctattggttcttttgccgtgaatccggctcaggtgcaggccctgtccgagagcattcgtaatggtgctaacggcattcagcagaagctggatgatctggacgccaaggtcagccagctgaagcagaactgggatggttccgcgcagcaggcgtatgctcaggcgcagagcaagtggaacgccgatttgaacgatgtgcgcaacattcttgcgcagatcgcttcggccactgctgagatttcgagtggctacaccgccagcgaccgcaaggccgccggtttcttcggctgattgagccgattctttgatgtgctgtgtttgccgttccattgcggtgttggtgtgggacggcaaacgcgtgtatatgcggtggatgcgttgatgtgagtggacgggggagaaccatggcggaagagattcgttacgatgccgatgaggccaatcgactggcggcacgcttggaaacagcatcggagtcagtcaacgattccgcgagtgagacttatggcgtgaaggtgactggaggatggaaagatccacacaccaagcgaatcaatgaggtattggcccgcagcgtcgcagtaattcgtgaagaccggacgcgctattcgcagaatatggctgactatggtaagcgtttggcggatgctactgcccatacctcgagattcgaagaaagcattcagactcaattgcaaaacaagcaaaatgagattgagtcatttgaagtacatgagatttaaatagttgctgttatcttgacgttgtgcagcgctgcgaaaagaggagtaatgaccacagatagacctgtcttctccgtgtgttcgggggtgttggcggcttctttgttgttggtgttgtcgccgtccgcgtatgcggatgatatgggtggcttgtggccggtgaaggacagtgcggttgtctcggcgcatgaggctggtctggatggttcgggtgtgaagatcggtgtgctggacactcgtgttgtttcggattatccagggttgtcggacgcgacgaacatcgaataccggttggggtcgttcgtcaatgcgactaccgacgaaccggatgagtgtctgataaaaggtgtaccgcttcagaagacagtcacttccaaagaggggaatctctattcgtcgcatggcacttacatgctcacatggctggtgggcaatggcaagagttgggatgccagccaaggggtgacgggcttggtgccgaagtccgatgttctgtttctcacgataggacaagatacttcggacggcatcaaaatgatcactccttgtgatggggctgctatgtcggatatcgacaaggacgttagtaccgcggtcgactggggcgcacgcatcatcaacatgtcaaatggcggtggcgtaggagattatggtaatgatgggatgctcaaggcgctacgccatggcgtgatcattgttgcgggccgttcgaatgacaaggagactgacgctattgtcaatggcagcagcacggatgtgatgatcggcgaccctagagagcggagttctttcccaggtgtgatccgcaacaacgaggtcggtcccgacgggcagatcgccggcatttcggatgtggctgatgcgaacgtgaacatcctttccccgggtgatcaggtgcttcatcagcgcattaattcgaaattcatttcggtgggtacgggaggtacgtcgactggttcggctgtgttgtctgggtatttggcgttgactgtgcagaagtggccggacgcgacgggcaatcagattctgcagtcgttggtgcgtaacacgaagggcaatgattcgggtgaggcgaagctggacccagagcataagaggggttatggccaggtcgatccgggcaggctcctgacggtggatccgacgcagtatccggatgtgaatccgattttggaggcgcaggtgaccactgcgtcgaagctgtcggatgatcgttcgaagtggtatacgcaggattgctccacgaaccctgacggcgtaggcagcctgctcgactcgtatcccgttttttgccaggccggtgagattggcagggagtatgagcgtcagaaagccgcgtggaagaaggtggagcagtgcaggtctgatggcggttcggattgcatgaggtattccgccaccgcgaccgcggacgagactgaaggcaagtctgatggcaagtctgacggcaggaccgtgctgccgggtaccggtgacgggaaggatggcgtgaagtcgtccggtgtgccggtgtgggtgtggctggccgccggtggcgtgggtatcgccgtggtggctggtggcatcgtgttggcggtggtgttgtcgaagcgc

SEQ ID NO: 4002 - DNA, 27242 bp, Unknown
  R22_24m  MAG No. k141_57911
aacccggaagctaaggcctggcacggcgatggtactgcacccgacagggtgtgggagagtagcacgccgccgcaccacacgtacaggaagcccctcggagcacacgccccaaggggcttcccctatatccgaaaccggccccggcccggacccgcacgggcaccgggacctccccgcatacccatgagacccacgcccgggaccattcccggccagccccgacggcgaggccgaacggcgcggcgcgtccgcgaccgtgggagcccgacgcccaggccccccggtccgccgcgcagacagctcccctccagaggggagccagaaactggcttggttatggggtcgctctacactggcttctgctatgcattacttcacccctaaacgttgcgccacgtcgaataaaatcatgtaccacgataaggcgcaggctcagcgtgccgctgatcaaagcctgatcgagcgtggagccgagctatgggtgtaccgttgcgaatattgcggatgctggcacctcacacatcgcgatccacaatccagttaccggcatgtaccgctgaaccagcaactcaagccacacagtcgtaaaaagggctacaagccacgtagacgttagcgtcagaagctccacaggcctcgccaacgccgtatctgaggcaggttacggtccaaacacgccaggtcgtaggctgctaagcgttcagggcgctcggacacactccgtccaacactcacatcaccttggtgctttcaaggttgcggataacccaatcgttgaagcgaattaccggcttgcgcaacataagtcccaacagcaatgagggaacaaggaacagtgccagtttgcccatggaaacccagtattccatgccgaatgagcccgccatggccgaatgcatcgcatccaccgcataggggaacagtagccatttagaaacgacctggaagaacgtcggcagtgtttcaatggggaatgtgccgccggaaccggctacctgcataaccagcagtactacggcaatggctttgccgatatcaccgaacgatagggccagcgtatacacaatattcgagaacaccagtgcagacaaccacccgaccatcaaaaactgaatcggatgctcacactgcacgccgagatagaacatatcgcccaggcacaccagcgtaccttgcagcaaagcaaggaaaccgaaaatcatgtatcggccgaaatattcgtggtgcaagcgtaaaccgaactgccgcgcattgccggaagactcggcacgcggcttcttcagcacatccaacgcggcggccggtccggcaatccgcccggcaatcatggcctcgcgaagacccactcccgaaccgagcggcagatcattgcccaaccctaagatacgggccttctcatggtcggaaatcgatactttcaacatggcgaccagaatgatcgcaccgacccagatagacagaatcgtgtagaacggagccatcgcggaaccatagttggcaacgggatagagcgcgatgcggtcgaccgctacgggtgccgccagcatggaagcaatggcatcgggcttcgcagaggaaatcacagacaggtcgttggtgccgccactggtgatagaggcgagttgggaagacaagttgtcgagtttcttcgccgaacgggtcaaagcgctagctgcgtcagtcaaggccgactggatatccgtcaggctgtctgaaacgccgccagaaagacctgacacgctgctgacggtcgacgcaagcccgtcgattacggaacttgcctgcgtggccacttcgtccatggacgaggtcagattgttcagttgcggtttcagcgtgctcttgtacgtgtctgaagcctgagtaatcgattgtttggcggcggcgatttgtgatttcagatctcgacgcgctgtatcggcatcggcagtaccatttgctatgtgcgtggccgcatcgcccaacgcggtggcggcttgctgcatgctctgctgcgcctttgtggcttggtctgcagccgcgttcagttgagcggcaacggtatctccgcccacgggcagtgaagccgcttgtttggcgagatctcgtaaagcggcggcatactttccaaagctgtcggcctgagcctccactttggattgcatatcggtcagcttgtttgatatctgcgaggattgtgagcccacatcggcaaaagcggcatcgatctgcttggcaatggtgtcgtaggatgaaccggcctgctgcaatgccgtaccgacgccatcggtggctccggacaatgccttgtcgaggctggagacgccgttgcgggtctgtttcaacgcctttttggttgtggccgcagctgagcctgttgatcccagcagcttatcggtggaatcaatgatgctgttggcggccccgagcagattggcataggaatccatctgcgacgcagtgccggtcaaacgagacgacatggtggcaatatgactggaggcgttgttgacgtactgctccatttgcgggctttgcgcgtaatcggccacgttggaaaccaaatccagcgccacgctcgccaaggtcttcacaaatgtctggtcgatggtcgtggccacggtggtagcaccctggtcggtgatatgcggagcgatcggattgattttctcattgagatagtattcgagcttggcgtgcttgatcttcggtgaaaacagcgtcatcatatcggagctgaagctctttggaataatcagcgcggcatagtattcgcctgagttcacgccatcgatggccttagcacgatccacaaactgccagtcaaggtcatgattggccctgagcgtattggtcacggtttcgccgacgttgatggtgatcggcatcagatcggacttatagcccttatccacgtttgccacggcgaccttcaaggccttggtgttgccgtacgggtcccagctggcggcgatgttgtaccaggcgtacagtgccggcacaatcaccaatcccatagccacgattacggcgatcacattgcgggtggcttggcgcacgtcacgtacgaatattttccagataagcttcatcgtgcgcctccttgcccagactgaccggactgaccggactgctcgaactgtgcggtgtgcgcagtcggctcggcggcctgatcgccgaacagtgtgagtcgttcagtggtttcgccgatatccggattgctgcccatcgccgcttcgtgacgtccgtggccgtggaaacgccgccacacatatccgttgagcatcacattgcggaactcgtcggcactcatggcactgacgccaagctgcatggcgtaggtttcgcgtgcgtattcaaccacaatgagataggcgtcgataagaataatcgacagaatccaggaggtcagcatggcgatcttctcttgggtgacgaacagcagtaccaggaatacgaacgggagtacggtcagcaatgtcagaccggcaacgatcatctttgggtaccgcgcgaagaaccggtgcgcgcgatgagcgatgatatcgcgcagttccttgctgtcggacaccgtgcggaatacggagttcaagctcacctgttcgttcaccatgctgttgtgctcggtgatcatcaggtcggtatctcccaaacgatggtcgaacagcgcgttcaggttcatcgcataccggcgtacgacaagtcccacgaaaagcgccgccggcagataccagaacaggtgcagcatgtcgagccagtaatggttcgcgtacaggccggcgatcgggccgcgcatcgcgttgatgccgtaggtaaagggcagccatgggtgcagttcgcggaagaagttcggcatcatttcaatcggatacaggccggaggcaccgggtatctgcacaatgaccagaattacggcgatggctttgccgatatggcggaacgccacggccagcgcgtaaataatgttgatgtagacgaacgaacagaagattccggccaagatgaacagcagcggatgctcgcattggatgccgagcaccagatcgccaatggtggcgatgatggcttgcaggaatccgatggtgaccagcagcagccagcggccaagatatgcttgcgtagcggtgatacggcgaatgcctttgcggtcgacctcaagcttgtagatggcaatcagcacgaaaccgcctacccacagtgccagattcgtgtagaacggggtgactgcggacccgtaattgtcggtggcgtacacgactttcgtggtcagggtgacgggattgcccatgaactcgccgaatcccttgtcatccagatgcagcgtatcccggattttctggtaagcggcggaactatcgagcgtggcgatatcggtgcgtacggtggcgacatcgctggccgcctggcgcagcgaatcctgcgtgctgctgatggtggttttcgtttggttcagggtatcgacaagctggtcgaacagcccgtcggcctgatccaaggtgccggacaacgaagtcaacgtgccatccagcgtgccgttcagggcggcgaaactgttcaatgatgaggtgagcgacggcattacggtgccggtcagcgagccgcgcgcggtattcagcgccgcgatgccgccggtggtggtgttggtcatggctccggaaaggttcgtggtggcgtctttgccggagctgatgaactgtgtggtgtcggtatggaaggtgttgagctgtgtctgctgtttgctgatcaatgagtcgagcgcatcgatttgtttccagatgttctggccgaccgggtcggtggtgtctttgccgatgccggctttggtcagcgcgtctttcagatcgctgattgacgtttgggtggcgttcagtggggccgaaagtgtgttggtgatggtgtcgacggagttctgcgcgctgttgaaggagccggtgatgctgccggcggcgttgttgacgtggacggccagtccggagagttgtgctgaactgctgtcgagcgcgccgaccagtgtggtggagaaggcttgtgacccggcctgtgtttccgccaacagtgtgccggactggcgggaggcattctgcgcggccgcgacggtctgcttgagtgaggcggtggtctgtttggcgtcggcgagaatcgtgtctgattgggccagcgtgtcctgtaagtcggtgagtgaatcctgaacggtgttcagcgtggacatcaccgtattgagatcatcgatcgtatcgtgctggactttgccagtggcttggccgagatcgtctccggtttcggaaatggccgaggcaacggtggtggctaccgtggtgacgaaggcggagttgatctgctcatcgatggtggtggcgccggtgtcggtgattttcggcgcgatcgcgttcttcttctcgttgacgtaatacttgattttcggctgtttggaggttccggtcaccgattcgaccaagctggcgctgaaatccttgggcagcacgatggctgcatagtatccgccggtctccacgccgtggacggcctgttcctcattgtctacgaagcgccagccgagttcgtcgttctgcttgagtttcttgacgacctgccggcccgcatcgagatggccgaccagatcgttggtggtgccttggtcttcattggctacggccacttgcagattgccggtggctgaatagggatcccagttggcgagaatgttgaaccatgcgtacagcgagggcagcattgctacgccgagcgtcaccacaacggcaacgggattgcgtaagatacgtctgcaatcgcgtagaaagacttgccaaaccgtccgcatccagtccctcttttccggttcgtagtcattgcggccacatgcagtctattcccaccactggtgcggatactgctggtttggcgggttttcttgcaaaactggccgttggttgtccgcataatgggactgatatgtgaacgtttgttgatggtgcgacaccggcgggatggttgtgcaattttgccggtatccggtgatgaaatgttgaggtgttggaactgagtcgtcgcagtgctgagaccgagacgactcagtgacgagcctatccgaggctatctcgttggttctggtctcactgatccagacggaagccctgagcggcggccttgtcgagcagtgtctgatggctgacatcctgccgactgatcgtggcgacctgatcgctgaaagcgtccaccggacggtcggcttggcgcagatcgtagtaccggtgaacttcctcgtcgaaggcgggcagctggtcgagtacgccatcggcgtcagccgggtaggtgttctcgaagaactgcatcgtgcgcggcatgcgcggcttgacggtcgggttctgatcgggcttgccgatggccagacccagcaccggatatgtgtattccggcagattcagcacgtcgataaggccggggatgttgttgagcagagagccgagaatcacgcagcccagttccagcgaataggcggcggtctccatggcgtgcagggccagcactgcgtcgttctgagcttgggtgaagcgatagctgtacttgagatggaattcgtcggaagcgggatcgatgcccttgcgttcggcgatgcgtgcgttgcggtgctcgtcgatgacgaacacgtacagcaacggcgcggtggcgatatacggctgatggccgaattcggcgagcttggctttggtggccgggtcggtgatacggatggcggaccagtcgttaaggaactggctggacgcggcatgttgggcgacggtttcgagcgtggcgcgggtatcgtcgtcgatggcctcgtccttgaacttacggatggagcggcggcccagaagagcttcgattgttgcgttggtaacctggctttattgtcgcacggcaggcgccggacgccacggtggattacctcacagtgaaatgccgatattgtgtggcggaactgtgctggactgatggttcctgtcgattgactgatggttccttgacgaaattccagcgatgagtcatcagtcagccagcagaaaccatcatccaaccgggggattagcggctgggcttgcgatggcggtggtcgacgaacgccttggagccccgatccgacagctgcgaaaccactgcgccgagtgcggccgaaacggcggcgaatgccagactcattgccagactttgcggcgcgtctgccgccagtcccttgcgcagattgcgtttgcttgtgcccttgtcccatatcatctggaatgctttgccggcaaccaagcctgccagcgctgggaccgccgacttgatgagcttgtcgcccagagaatcagggtcgttgagccggtcctcgcgcagcctgttgaccttctcgtcgatgcggtgcaggctgtcgaccgcgcggtcggcgctggaggggaagtcggtgttcgtttcgtcgctcatgactctcagtctaatagcatctcaatcatctcagcgcaaaagatgggcgttaatggtggagtcatgaacgagcgcagactagagtggaggcatgagcgaacagaacgtgaacggcaccgttgccgtcgagaactctcgtggcggcaatggatttttggtgttgctgcgccacggccagaccgtgtggagcgaatccgggcagcataccgggcgcacggacatcccgttgaccgcggtcggcgagcagcaggcagcggatgccggaaggcgcctgcgcgaggccttccccgaaggattcagccagggctgtgtgttttccagtccgctgaagcgggcgtgccaaaccgctgaattggctggttttgcggaccacggtgtgttggacggcatcgctgaatgggattacggccgagccgaggggcgtacgcgccagcaggtgagtgaggccagcggttttgaatgggatgtgtggcgtgacgggccgcgctcgctgacgcccacgctggagggcgactgggtcgagaccttgccttcgggcgaacaggtgccggtccatgccgggcctggcgagacgctggaagaagcggcggcacgcgccaagagcgccatcgacgagattacgccgctgctgaaagacggccataatgtgctgttggtggctcatgcgcacatcctgcgcatcctcacctcgcaatggctgggcgtggacccgcatttcgcacggttgctgcgtttggatacggcgcactactcggtgctcagcgtctataagggagataacgtcatcgaacggtggaacgcctagccccggttgcgctgcgattgcgctggcctgcccgctgctgcgggcgggcctttattgtttgtggcggggattgcggtatgtcgataaatgatttgcaaacgatagcgtcggcgtgttgtttttttgatgggtataagtggcaatcgattgccatgaaagatatgttagcgctctcatgattgcgaacgcttgcattgcgataatgaggcaaaaatgactgaattaatgggatatttgttgacaatggcctgaaaatgatgatttatgacgcgccgatattgctatcgtttgcaaaaagaagcaaaccgttgcacaatagtgcatgtcgatagtcgtaaaggtgcgtgctagcgtacctgtcccgaccggggacggccgggtcgacgatgaaagagaaaggttcgatgatgaatcgtacagtcaagtcagcagtcgcgatggcggctgtcgctgcgatgtccctcggcgctttggcggcctgcggaagctcgacctccggcgatgacgccaagggcaaggtctactacctgaatttcaagccggaagcggctgatcagtggaccgctctggccaaggaatacaccaaggaaaagggcgttgaggtcaaggtgcagaccgcggcctccggtacctacgagcagaccctgaagtccgaaatcgccaaaaccgaagccccgaccttgttccaggtcaacggcccggtcggctaccagaactggaagaagtacaccgccgacatgtccaatacggatgtgtacaaggagctcaccaaccaagatgtggccctgaaggatggcgacaaggtggtcggcgtgccgtacgtgatggaaacctacggcctgatctacaacaaggacatcctcaacaagtacttcgcgctggatggcgccaaggccacgtccatggacgaaatcgacaacttcgacaccctgaaggccgtggccgacgacatgcaggcccgcaaggacgagctcggcatcaagggcgcgttcacctccgccggcttcgactccagctccgactggcgcttcaagacccacctggccaatctgccgctttactacgagttcaaggacgacaacgtcaccgagcagccggccaagatcaagggcacctacctgccgaactacaagaagatcttcgacctgtacatcaccgactccaccaccgaccccacccagctgagcgccaagaccggcgatgatgcgaactccgagttcgcgctcggcgaggccgccttctaccagaacggcacctgggcctggaccgacctgcagaaggccggcatgaccgccgatcaggtaggcatgatgccgatctacatcggcgtcaagggcgaggagaagcagggtctgaccaccggttccgagaactactggtgcatcaatgacaaggcctccgacgccgacaagaaggccaccgaggacttcctcaagtgggtgatcacctctgataccggcaagaaggccctctctcaggacatgggcttcaccaccccgttcaagaccttcgatgacgtcaaaagcgacaacccgctgaccgaggccgccgtggaagaccaggagtccggcaagacccaggtttcttggaacttcaccatgatgccgtccgaggaatggaagaacaaggtcggccaggcgctgctcgagtacgcgcagggcaccggcaagtgggatgccgtcaagaccgccttcgtggacggttgggcttccgaatacgaggcctcgcactgagtctcatagagtcccatagccgataagcaacaatccgcggcgcccctgcctttccttctccaggggcgccgctttgtattgctgagtctcgcacaaaatcgtccgccgcagaaaagtgtgaggcacgcacccgctcaatcgcacgctgtggggccatgaatcggcgatttttcgccattctccacaatgtgcgattgagcgttattgtgcggttgcctcacgctttttctatggtgggctttgttgtgtgagcctacttaacgcgggaggtggaggagcggaccttcagctgggccgggaacacgatgtagggttgctcaatcggcttttcgtcaatgagatcgagcgtcatgcgggctgccacgcgggccatttccaccggatcctggcggatggtggtcaggccgatatcgccggtgtagaaactatcgtcgtagccgaccagcgagacgtcgccgggcacggagaatccattgcgctccagctggaacataagcggcaaagcgatgccatcctcctggcatgcgatggcggtgggcatctcgtcttggctcatgagttggtcgaccacgtcgctgatttcataacgtccatcgtcatcgaccttgcagacgatgacctgcggctcgatgccttccctgcggcagcaggcggtgaatgagtcgaatcggctttgcacggagaagctcagcgacacctcgcgattggtgctgatataggtgatgcggcgatgtccgagattgataagatggcgggcggccagcgtggagccctgcacgtcgtcgatattgacggcggcggtaaagccgcgggcttcgggctcgactgaattgatgccgacgatcggcacgccgaccgaagccagttgcgcgatttcgttgttgtcgatatcgaaagacgccacaatcacggcatcggcgttacggcgtaccggcaacatctcgaagaattccttgcgctcctcgatgctggaaatctggaataccgaaatatcgtagccctgcgtgtgcagcacctcgttgagcccctcgatgaccgaggcggtgaaccacaggcggatatggccgctcatcagtactgcgatgcgcagggcgcggccggatttcagggccgcagccgagcgggagagtgagaaattgagtttgtcggcgatggcgagcacgcgctcgcgggtcttggccgacaccagatccggcctggtgaaggaacgtgagacggtggagatggagacgccggcctcgcgggcgacatcctgaatgctcgtagccattgcagcccccttgcgttgaatggaaaatcgcaatacacatgcacaactgactacagtgtacatgctgattgattgatttgcggcgatgacaacgattgtattacaaacgtttgcaaagtgtctatgacggcgtcagattggctttatatagccattatcttagttgaaagaagattgctggagctggagtatgctcgagattgaaacgctgaaaatgacaacgtttgacatataatgattcgacgtttactatgaacataggcttgaacgagaacaggccgtgcatgcggttctcgatcggcaggctcgcattgagttgaactccgcagccggcgcacgatgcagtgtcgcaacgcagcggactcaaggaggaggaaaagtcatgatcagcatggctggcaaggcgatacgcagatggtgggcgctgttcgcgctccccacattcgccgcattcatcatcgggttcctggtgcccttcatcatgggcatctacttaagcttctgcgaattcaccaccgttaccgacggtgaatgggtggggcttaagaactacggcaaagcgctgaaggacaaggaattcctgcacgcgctcggcttctccaccgcgttcaccatcgtgaccaccatcgtgatcaacgtgatcgccttcgccatcgcctacatgctgaccaaggcgatcaagggctccacgctgttccgctcggtattcttcatgccgaaccttatcggcggcatcatcctgggctacatctggctgctgctcctgaacggcgtactggcccactggggccgcgccctgacctataaggcgtcctacgggttctggggcttggtcatcctggtgtgctggcagcagatcggctacatgatgatcatctacatcgccggcctgcaagccctgcccaccgatgtgctggaggccgcggccgtggacggcgccaacggacggcagaccatgttccgcatcatcatcccgctgatgatgccgtccatcaccgtgtgctccttcctgaccgtgaccaacggtttcaagctctacgatcagaacctcgcattgaccaacggtgcgccgagcaacatgtctgaaggtctggcgctgaacatcacccgcaccttctacggccgtatgggctgggaaggcgtcggccaggcgaaggccgtgctgttcttcatcctggtcgcggtcatcgccctgattcagaacaagctcaccacgagcaaggaggtggcagcctgatgaacgagaacaagcctgtgaagcatggcgcattatggaccgtgctgtttgccgtcgtctccctgttctgggttttcccgatcgtcctggtgctgatcaactccttcaagcagaaggcgtacatctccaagaacgccttctccctgcctgccggcaaggcgttcgtgggacttgagaactatgtgcgcggcatcgagaccacgcagtttttcgcctccttcggctggacgctgcttatcaccgtcggctcggtggtgctgattctggtgtgcacctcgatgtgcgcatggtggatcgtgcgcgtgaacaactgggctgcgaagctgctctacaccctgttcctgttcaacatgatcgtgccgttccagatggtgatgttcaccctctccaagatcgccgacatgctgaagctcaataccccgtggggcctgtgcatcgtgtacctcggtttcggggccggtctggccgtgttcatcttcaccggcgtgatcaagggcatcccgcaggagcttgaggagtccgccatgatcgacggcgcgtcagtgccgcgcatcttcttccagatcgtggtgccgatcatgaagccgtcgatcgtctcggtggccatcctcgaagccatgtggatctggaacgattacctgctgccgtacctgacgctcgacctcggcaagtacaagaccatctcggtcgccgtgcaatacctcaagggcggctacggttccgtggatatgggcgccatgatggcctgcctggtgctggcaatcatccccatcatcgtcttctacttggtatgccagaagtatatagtctctggtgtcatggcgggagccgtcaagggctgacgactcgcgtcgtcagcccatggctggaagcccagtgggcttccagcaggctccaggctgagccgcgacagcggcgaagctaatgatgagcctcgtcgtaggcgagtccgtaattgcagggccgaaggcggagccgtcaagggctgagctccaccaatccggctcccctctttgaggggagccgtcggcggaagccgactgaggggagtatcctgagctccatcaagtctcccctcagtcatctgcgatgacagctcccctcagagaggggagccacaggcgacacaaggagtagttgatgaactggctggcaccggactcgaaattcatgcgcgcgtggagcaatcttgttgacggcgtatggatcaacattctgatgctggtcacttcgattccgctcatcaccatcggtgcggccctgaccgccggccatgatgcttgccgccgctccatcgagggcgagggcaaaggcgtaaccgccaactacttcaagtcattcaaagccaacttcatcaaagccacactgctgtggctgccgttcttggtggtgctgattgcactggtctggtcatggatcgtcctgcagatcacgccgctgctcatcatcaaattcgcgctgaccatcctctggcttatcggcttcgaatgggtgttcgcgcttcaggcacgcttcgagaacaccgtggccggcaccttgaagaacgccttcatcttcggcatctcccacatcgcgatgaccgtggccctggtcatcgtggatgccgtgttcgtggcgctgctggtggccagctggttctacatgcccggtggactgttcctgctggtgattcttggttacggcaccgtgctgatgctccatatccccgtcaccgagcgtgttttcaatccatatctcattgactaggcgggttctctcgcgaatatgcggcgatcttcgaggtctgagcgttctctgtccacgcaagcgcggtaaagataacaaattgataacagtttggggcggctggcggagcggggtgccgattgaggggtattagtgattggcttggaaggggggctttggcatacggggagtgttcgtgctgggcggttgccccctgtaagtgcttatatacataaggaatctggcacactgagtctcagtgccgtaatggtatcatcgcaaataatgtttgcgttcacgtagaggcgaacgagacacccgacaagtgggtcgaggcaaaggacaaggagagatgcggtgaagcattggaagaagatggcagcatcgttgattgcaatatcaacgatggtggcagtagttccgacgacgtatgccatggaatcggaagattcccaaccacagacaaccgataccgcgacagtgcagactactaaggctgctgaaccgacgctgctcgccagctgggacttcacgggcaaaaacggcaccacgaacagcgcgattgccgattcgaccggcaagtacaacctgacgctgaaggacggcgccaagatcgaacagtacggtgaccgcagcaacaacgaggcgctctcactgcgcggcgatggccagtacgcccagatcgatgaccagctgttcaaggatgcgggcgactccttcactctggagttcgcgtccaagactcgtcacgacgacagcggcaagttcttctcgttcatcgtcggcaaggacggctcgaacgacgccaacaccaccgatcaggccaacgccaacaagtacctgatgttctacaacagcaagaccgccatcaagggcgttatctccaacaacaactggggtaacgaacagggatccaaggtcaccgtttccggcaacgacaacagctgggccgattacaagattgtcgtggacggcaccaaccttgccgtgttccgcaacaatgccctgatcattttcaaggccaacaccggcatcaagatgagcgatctcggtgcgaccaccgcctacatcggcaagtcgttctactccgtcgatgagtactggaatggtgcaatggatgatatcgaggtctacaggggcgctgacctgaccatgccgaccgccgttgcgatttccggtaccggtgtggtgaacaacaagctcaccctgattgagaaggactccaccaagctcaccgccaccgtcactccggacgacgccgtgagcaagaacgtcacctggtcctcctccgatgagtccgtggccaaggtcgccgcagacggtactgtaaccggcgtcaaggctggtactgccaccatcaccgccaccactgagctgggtggtgtgaaggccgaactgcccgtcaccgttgagccgatgaacgcccagaacgccgccgcagccgacctcgatgccgcgattgctgcgctgaaagttccggcggccgagaatctgccgctagtcgccaagggcaccaagaacggctcggcgattacgtggaagtcctcggacgagaagctcattacgtccactaacgagaagtacgaaaacaagaccactggtgccgatgacccgtatcgtggtgctggcatcatcaatcgtccggactacggcgacggtgattccaagccggttacgctgaccgccaccgcttcctacaacggcggtgagaaggtcaccaagaccatcgaggtcactgtcaaggagaagacccgcatcgcgcctgacaccggctatgcggccgtcacttttgagagcgacagcaacggtggagaaaaggcctgggtggcttccactgagaagaacgatttcttcacgtttaagactcgcaacaatggccaggcggtacttaccaatgatgcagacacgggtggcttgcgtgacatgttcgtgctgcgttcccacgaaggcgacaagtactacctgattgccactgatctcaaggtctcgtcaatgggctggagccagaaccaggttaacggttctcggaaagttgaggtctacgagtccaccgatatgatgaactggacccgtaccaacggcgacggcaacggcggcatcaccatcaacacgccgaacgccggtatgacctgggcgccggaagcttactgggatgatgacctgaacgcttacgtggtgttcttctcttcccgcatgttcactgatgacacccgtaccactccggtcaagaacgacaaaaccggcaatagctcctatgctcaggtgcgttacgccatcacccgcgacttcgtgaacttcaccgagccgcagatgtggcaggacaccggctactcgcgcattgattccaccgtgcgtaagatcggtggctactactaccgattcaccaagaatgagcagggcggtgccgctggcgattacatcaccactggtaagagcatcttccttgagcgttccaaggtgctgactgcaccgaccaccgaggcatctccgggtcaggacccgaacaccggttggcagctgctcgagcaggcgttgctgccgttcgaaggaccagagaccatcaagctcaacaaggatgacgaactcaacacgaaggacgacgacggctacattctgctgtccgacaacttcgcctaccgtgcatttatgaccacgggtgccgagctttccaagaccacgtgggacaacccgatgaccaagcgttacccggacttcaacaacgaaaagaagccggtcaaagccgagccgggcgctcagggctacatcactcagggtgctaacggcggtctgccggacaaggtgcgtcacggtgcgttcgtgaacgtgcctgagtctgtgctcaaggtgacgaagtcctggaccgctgccaacccgacgcacatcgaggctgttgactccaccaccaaggccgtgtacaacgccggcacccgcgagctcaccgccacggtgaccgccgccgataagggcacgctcgccggttcggtgaagttctctgctggcgactggtccaagaccgtgaagctcgacgccgaaggcaaggccactgtgaccctcccggccagcgtctctggcactgttgcggttgcttacgacggctacaccgatggtttggtcaatccatccgatactacggttgacggcattgaacagggcaaggtcgatttggctgagctcaacaagcagatcgccgccgccgaagcgctcaaggaatccgactacacggccgattcctgggccaagcttgccgccgcgctgaagactgccaaggccgcgctcgccgctgagaatcagggcgaggtcgataccgccgcagccgaccttaagaccgcaatcgaagccctgcagaaggctccgaccaatccgggcgaaggtgacggagataagggcgacggcaataagccgactaccccgaccaccggcgacaagaccaacgtcaacaagcccggcagcgcgctgagcaataccggtacggccgtgctcggcctgggtggtgccgtggtagcactcgccatcgccggcatctccctaaccctctggcgcaagcgtcgcgcctgagctgctacggcaaccaagcccccctctgacgagggggggctgtcagccgaaggctgactgggggagagaccgcggcgaagccaccgaaagaacggcatggccttcggccgattctgtatcccgcgactgccgccgcaggtctctcccccgactgcctaacggcggccacctcgaacgcaattaaggaccagctttcagctggcttcatatttgctcactgtcgttcgccttcgcctaaaaacgactctggcgttttcttcacggctcagctcatcagagggcggccacaaaacttcgctccataactgaaggcgcaaccacaatcaaccctatcaatgaggagaaacatgggaaagctgatacgaaaggcaaccggactcacggtcggcgtggcaacactgctcgctggtctggtgctgccgatgacggccagtgccgagagcgcatcgccaatcgatgccagtccgatcatccactattcattcgataacgcactgacgtccaagaccatcgccaacgagggcagcgcggccaacagcgatgccaccctatccggcgacgccacggtggccaatggccagatcaacctgaccggctcgcaaaccattagcgtgccgaccacggccatcgccggtaagaaggacgtcaccgtctccatctggctcaagaacaattacggcaacggcaataccgccgccgcgtacatcggcgcggccaagaccggcaattatccggccaacggttactggctgctcaacccggccaacccgagtggctacgcgaaatccgtaatgaccaatgccactgcggccgacccgaataacagcccgtggggcaccgaagtcggccctggatcgacgaacgccgccatcaccggcaccaaggccaccagcgatttggctctgtacaccaccgtcatcaacggcaccaacagcactatgagcttctacctcaacggcaagcaggttggagacgccacctacgccattccggccggtggcctgaccaattacggcgatctcgtcgcctacattggcaagtcctcctacgctgacccgaactccaagctcgacgtggacgattacgccgtatacgacactgccatcagcgccgcagacgtgaccaagctgtatgacgttcaggtgctcgacaaggccgaggccgctgtcaaggccgctgtgcccgcatccgctaccgaggacttcaccctgccgaccagcgccgctggtgtgagcgtcgcgtggaagtcggacaacgcagccatcgccgttgacaacgccaccggcaaggccacggtcactcgtccggccgcaaccgcagctgatgccgaggtgaccctcaccgccacgttcggcaacaacgccaaaaccgccgcctacacggtcctcgtgccgaagcagctctccgatgccgagcaagccaaggccgaccttgacgccatcaccatcgaggactccgacgacatccgtagcaacttctccgtgcccaccaagggcgacaacggttcgaccatctcgtggggagtgaccggtggcaaggatatcgccacactaggcgaaggcgtgagcgacaaatctcgaacggtcactgttaagcgccctgccgccggtagcgatgccgccactgtgacgctcaaagccactgccaagtacgataccgccactgaaactaagaccttcaccgtcaccattcagccgatgcctgccgccgaagagaaggacgaggcctacgtgtgggcgttcttcaccggcgagggcgtgggcggcgagaaaatcagcctcgcggcctccaagggcaacgatgcgctcgactggaacacgctgaacaacggcacgccgatattcacttccgagtttggcgagaagggtttgcgcgatccgttcatcatgaagtccaaggacggcgacaagttctacatgctcgccaccgatctgaagattgacggtcgtgcccccctcaacgggctgaatggctttgctggtgcacaggctaacggttccaagtacattgagatctggaagtccgacgatctggtcaactggtccaagcaaagccacgtcaaagtgagctctgattacgcaggcaacacttgggcgcctgaggcctactacgacgaggaaatcggcaagtacgtggtctattgggcctcgaacctgtacgacaacaccgacgagaacagccgcaagcagctgacctacaaccgcatggtgtacgtcaccaccgatgacttcgtcaacttctccgacccgacagtgtggattgacgttgatcgccgaggcggtgtaggcagtggatccatcgatgtgaccgtgcaaaaggtaggggatacctactaccgcatctacaaagatgaaaacacgatgtctttgcgtcaggagaagtccacagatttgactgccgcaattggtggtgccggcgtgaagaactacgccgatgcgcttaagggtagtgcatggagcgaagttgccacgaacatcggtaaaggccaggctaacggttacggtaaaaccttcacttccggcgaaggtccatcgctattcaaggccaacgatggcgatgtgaacggctaccagtactacctgttcgccgaccagccgagctatcatcaaggtccaaaccactatgtgccgatggcgactgaggatatcgccagcggtcagtggaccgttatcggcaataagatgcctgaggcgaacttcccgaccaattccgatggcggcaagccgcgccacggaaccgtgctgcccgtgacccgcgcccagtaccagaaggtgctggaggcatacgccccggctgtggctgtgaagtccgttgacgcgctgtctgccgagacaacggttggtgtggctccgacgctgccggagaccgcgcatctgactcatgcggacggttccgtttctgacgttgcagttgagtgggatgccattgacgcatctttctacgccaagaccggcaccttcaccgtcaagggcatcacccaagacgattcccgtatgccggttgaggctaccgtcattgtgaacggcatcgacctctccaaggcgaccgtcaccgtcgaacccaacgagttcaccgcagacggcgctgccaaggaaccagccgtgaccgttgtactcgatggcgcgacgctcaaggaaggcgccgactacacggtggcctatacgaacaacgtcgaacctggcactgccacagtgaccgtaaccggcgctggcaagtactccggtactgtctcggcaacgttcaccatcaaggccgccgagcccggctccacgctggacaagtccaagttgcaggcgcttgtcgataaggtgaagggctataacaaggctgattaccagtctggttgggatgctttcgccgtcgcgctcgccgacgcgcagcaggtgttgcagaactccaccgaccagcaggaagtggacaaggcgctgtctcggctccagtccgccgtcgacaagctggtcaagaagtccggcgattccggcaagaccgatggcaaggatgacggcacgcaaaagcccgccgccaagccgggcagcgctctgtccaacaccggcgcctcggtgttcggtgtgggtatcaccgcggtcatactgctcgccgccgccggcgccgcctacgccttccgcaagcgccgcgcctgaactgtttgcagcgtagaccaagccccttctggatgagtcgagctgtgaagcaagcagcctactggattgtttgcttcatggcgcggccccatcagaggggcgtatcgcacgttcgtccgacgacgctgtcggacgcataggctctatagccccatagctccaatagccattaccgaacttcaccactcaacatctagatctgctgcgcgacaagcagtatcaccgcgcgcaaagaggaaaccaatgacaaccaaaccatcgataggcaaacgcctgctcggcgcgatgctggcagtgccgatggcgctcgccggcatgggaatcggcgcgaccacggcggtcgcggccgataccgttccgaccaataatctcatcgccgcctacgacttcaccacgaagccaagtgacggcaagaccgtggccaacagtgcgccgaacgctacgcttggcgcggccgaagtacagaactccgccgactcgctttgggccgatgatgccctcaccctttccggcggcgccaagaccggcaccggcgactgggtcaagctgccctcgaatctgctgtccggcaaggacgccgccacggtgcagttggaggtcaaagcggattccagcatgctcaatgctttccatttcctgtggaacatcggtaacgacagctccgatacggagtatttcttcgccacgctcaactgcggcagttcgcgtaacccgctcgtcggcctgaaatcgggcggtacggagacgctcgtgcagtccagctcctgcgtggccaaggccgaccaatggttgtcggtgaccgccaccattgatggcaccgccgcgaaactgtacatcgacggcacgcaggtggcatccggcaccgtgccggccaaactgtccagcgtcaaggaccagtcgctcaacaccatcggccgttcgccgtggcccgacaacctgttcaagggcgcggtctcgaacttccgcgtatacgatgccgcgctcaccgccgatcaggtcgccgcgatcagcactgccgatgcctcaattcatgccggtgaactcaccggttccgtgctgaacggcatcatcatccccacgacggtcgacggtccgttcatttcgctgcccactgcgaacggcgtgacgtgggcgtcctccgatagcagcgtcatcgcgactgacggcacggtcaaccagcccgccaagggcgaggcagccaagactgtcacgctgaccgccgccgtcacggtccgtggccagaccgctacgaaggaattcacggtcacggtcaacccgaccacgaaaactgccgctgaacagctcaaggaagtcgcggccggctacgtgatcccgtccgtcgtgcgttccggagacgccctcccggcggctgtgaatggcactaccgccacggttacgtccactaaggacgtagccgtcgaggatggcaagatcaccatcgatggcgacgaggccacgaccggtaccatcaccgtcgagttctccaagaacggtctcgccggcatcgagcccattaccaaggccttcaccgtaaaggtgctgcccgccgcgaagtccgcgaccatcgccgcctacgatcgcaacgccaccggcgagaatgaggccaacaacggcgacgtcgcctacagcatgcacctcgcgctgcagaacgccgacggctcgtacaccccgtacaacgagaattacggcattttcttcgcacgctcgccgaaggcgcagaagctcaacgagaacctcgacggcaatgactatcgcagtctcaaggatccgagcctgttccgcatggccgacggcacctatggcgtgatttccgtgcgtaccaaccgcggcaccgccaccggtgactccaccgcgaagtccagcgtgctcatcgccacctccgaagacctgctcacctatagcgaacaggagaactccggttccatcgtcgaccttggcgagaccaacggcgtcaacgctccgtacgccgtgtacgacaccgccagcaagcagtatgttgtcggctgggccgatgacaacggcgtggccaagtacaccacgttcgattcgctcaagggctccacatccaagcacggcagcgtactgtacggttccgtcgccaagtccggcgtactcgccgccgacggtgtacagggcatcgcgaacttccgctccggtgccaccatcgcggtggacgaggcgaccgtcaaggcgctcaacacccgttacggccgctctgagaacaccggcacgagcaatctcactgacatcaccgtcgagaaaggttcctcgattgatgagatgacctcgcagctgccgaagaacgtggacctcacttactccgacggttctaccggctccctgccgatttcctcatggaacactgagggtatagatctgacgaaggtgggtgattacactgtcaccggcaccgtcaagcagaccgaataccagattccgttcgccgaggaccgcgccgatccatcggtgtataagtggcagtggacgcatgaggtcgacggcaaggaagtcaccgaaaccaagttcctgatgatcgcttccaacgacatccaaggtgatgtcacttggcagcatggttcgccccacatgccgttccgcatggccgacacgatttccggtctcgccgacgagccgggcaacccgaatgccctgattcagtcgaacggctacaacaacaaggaggtgtcgctgctcaaggctggcgacaaggactccgagggtaatgccatcatgcacagcttctgggctccagaaattcatgagattgatggtaggctcacgattctgttcatggccggatacggcaacacatggtccaacggcaagtcggtgtacatgcagctcaagcaggatgccgacggtcatgacctcgacccgaccgaccccgataactggactgtgccgacaccgatctaccgcaatgacgcctcgctgctcaacggtaacaagcagctcgcagccaccgcgtccggcggagtgggcatgtcgctcgacatgacctatttccaggatgccgacggcaggtcctactacgcctggcagcagctcggcgccacctacatcgccacgatggatccgaaggacccggcccatgtgaccagctccccggtgcgcatcgttaccccggagtatgcgtggaacgccgccatagccgaaggtccgaacgtgaccatgcgtgatggcaagctgtacctcatgttctccggttccggcgtaggcaagacctacaccaccggtttggccgtggctgatgccgccggctccgacctgaccgacccggccagctggacggcgctcaactacccgattcagaagtccggtccattcaatggcgagatgcagctcggcaccggtcacggcatgtggagcgaggacgaggacggcaaccagatctacgtgttccatgcttatgctacgaagaacctcggctccgtgaatgccaccggccgcgacatgttcgtacgccgcgtgcactgggctgccgacggtatgccggtgttcgacatgagctcttccgaggagctggcgaacaagatcgtttccgttacggtgcatgtggttgacgatgcggttgcggtcgataagtctggtttgtccaaggcgcttgcgtccgccaagcagctgcacgggtccgactacaccgccgcctcgtggaaggcgtttgccacgatgctggcctccgctgagaaggtctatgccgacgatactgctacgcagaaggacgtcgatgacacgaccgtcgcgttggttaaggcgcaggctgcgttagtgaagattgatggttccgattcaggcgatggctcgggcgattcgactaagccgagcgacggttcgagcgtcgatgcgggcgataagacgggcaacaatcttggtttgtccaagaccggtgcggctgtgcttagtcttagcggcgtagccgtggcgcttgctgtcgccggtatcgctctgactctccagcgcaagcgtcgcgcctgagtggccatcaagctccccccccctctgacgggccgagccgtatagcgaacagcccagtgggctgttcgtaggcgagggtgagccgataggcgaaccgacaagctgcgggcaaagcccgtccttgattgcgggacgggctcccggcgaagccatgtggggaagagacttacgacctgtgaacaacattcgcgttctactgattgccttcccgaaaaggaatccacccctccaaaagtgaacgctcacactaaaattgtaagtacttacaactaaagatgcggccctgcagcgccccagtccctcaaaaacggtgtcgttcgaggggggcagagcggtgcatggccgcatgagaacacagttcgcgctggcaaacggagcagcttcgtcagcgcgaaaaaggtgcggaacccggccgataaaggggcggtcgatcatcgcacgataacaatttgggcctttcgctgtttgtggtgggtggttgtggtgtggggtgatgccggcgggtgggttggaggcatggatacctcttgcctgttcaccgccgcattgcagttgcgggggccttggaaggtcgggtccgtggatttcagggacgcgggcgacggcgggcggggactgcacatcatgatcggcttcgagcccggcgtgcgcttccattgccccgagacgggctgccggggggcgcctgtccggtgcatgacacgagggagcgcgtgtggcgacacctgaacttcttccagtacaaggcgttcatccacgccgccatgccccgcgtcacgtgccccgagcacggggtgaggacggtgcccgccccgtgggccaggcccggcagcgggttcacgctcctgttcgaggcgtgggccgtggagatggcccggcacctgccggtgagcacgctcgccgggcagttggacgagaccgacacccgcctgtggcggttcatctcgcattacgtggacgaggcgaggggactcgaggaccacacgggcgtggaggccatcggcgtcgacgggaccagccgcaagggccgcaactgcatcaccgtgatcgccggcctggtcgagcacgacgtgaccgacgtgaccccgggcagggactcgaccacggtcgaacggttcgccggggacttcatggaccacgacggggtgcctgggcgcgtgcggctcgtcacctgcggcatgagccgcgggttccagaaggacatccgcgagcacctgccccatgtcaggcggatcatcgacaagttccacgtggccaggcacgccaacgaggccgtcgacaaggtcaggaaggccgaggggcgggagaacgggctgttgaagaggacgaagtacctgtggctcgggaacgaggcggccctctccgacctgcggctggagaccaagcgcggcctcacgcggcagcggctgaagaccgcccgcgcgtgccggatgcgcgaggtcctgcagggcatctgcatggacagccgcccgccggggcatgggtcaggctataccgcctgtgctcgtggatgatacactcgaggctcgaacccgtgaaggaacccgcccgtctgatccgccgccgcttcgccgaggtcgtcgcgtacttcgagcacccgtacgccaacgccgtccttgagggtgccgacagcgtcgtccggaacgtgaagagacgggcccgcggcttccgtgacatggactacttcgccaccatggtctacctgacctgcggcagctcgacctcaaagccgtcaccacctccccctcagtgagagttttttgcaaattggcccgtacccgcacctcgtcacagcttgtataatcacgattatactaatcgtgatacaataaatcgtgatgcgatagaaatacgccggcgtatggcataaaggaggcgggcagca

SEQ ID NO: 4003 - DNA, 2521 bp, Unknown
  R22_24m  MAG No. k141_58344
gaactgccggtggtcgacgagtcgaagctgtccgaccagctcgatgcgttgcagccgtcaatcgaacacgctcctgtcatcctcaacgaacgactgttgcgatagaccaaaccggtcgagttcgccaataaaaaggaccttccgggttgcgcactgtgaggaggcgtggaaggctgctattgacttgaatcctattatgcaaccgtgactgcgtgcctgttcatgttccagtccggttgtgtgatggacaagtgcggtatgaaggccgtttgcatatccacacatggttttgatgtctcagctgtccagagcgaaggtgatggaatcccgtcctagaaccgccgcgttacatgcgcgactggcggcagcatcgcggtggccagggcgaacgtcaccgccaggaccgcgcccgccgggtagacgctgtacgcccagccgtatgcgatctgtccgaggggctgggcgcacatgctcgcggagagcgcgagcgacatcaccttgccggtcatgttctcggggcagcccatctggatcgccggcacggcgatgaggttcgcgagggtgatggcgatcatggttccgcaggtgctcgccgtgagcaccgcgagtcgcatcactccacctgcgggaatcgtcatggcgagcgcctggggcaggatggtgagcgagaaggcggcgatcgccatcgggaatcgccgcatggacagcgacctcgcgacccgcccaccgacgagcgcgccgagcagtccggatgctcccacgagaccatatgcaaggccgtacgccgtggagccgaaccccagtacggtccgcgccatgtaagggaagccgacctccgcataccccgtcaccaggaagttgagcgcggcgcagatcaacaccagatgcagcacatgaggacgttcgcgggtgaggaaacgtccggccgcgcgcaggtcgtcgaccgcggtgacgcggccggcgtcgccgcggtcgggagcgccgagccggatgaaacactccacgacggcggccgcaccgaaccccacgatcgtgaggcccatcatgggcatcgcaccaaccgccgcgtacagcacgccgccgagcacggcgggaacgagcgtgctcgtctggttcactacgttcaccacggccatcgcgcgacgcatcacatcctcgccatgggagcggaacatctgcggcagcgccgcctgcaccgtaggcgtctccatcgcgtcaagcacggcgagcaccacctgcatcacggctatcgccgccagattgaaaccggcggccgaaaagatcgccacgcagacgagcaccgtcacggcggaaagcgcgtcaagcgccaccatgacggtccgacggttcgtacgatccgccatcacgccgccaaggggcgagagcagaatcgtgggcaggatgctcgcagtaagaatggaggcgaacgccgccgccgagccggtcttgtcaagcacccacatggacatggcaaaccgcagcataaggttggcgaagagcgatattccgagacccgcgacgagcaggcggaagtcgcgtgtgcgaagaggatcagcggcttggcttctttgtggttgggtcgtgcattcgtatgcgttcgtcatcgtggattcctttcttgtgattggccacggccatttatacaaaccgaccgtcggtctgttatggtgatgacaatacgcccaaggaaaagggcgcggaagcgcttcgacatctgtggcgtcaggatgtgcaagaagcggtgcacccgggcgcgtctcctatgcggacgccgtatcctcttccggcgtcagggccgtgagctcttcggtcgtccgcaggatgagcgtctcgtcgaacactggcacgccgatggcgtcgagcatcgtggcgaggcagcggatgcggtgttccatgccggcatgatcggcggggtagaagcagggcatgagccagtagttgccgaggagcgagagcagttgcgccgcctcctcggggtatgccgtgggaatggagccgtcctgcacgcccatatcgatgagcgagcggaaggactccggcagtctcgtcgaccagaagcgcatgttcgccgtaaagaacgcaggatccttgagcagcgccagctgggaacggaccaggtccagatgatcgggggcgtccacagcggaaacgatgagcgcgcgcagcttctcaagcgcactcatgtccttgcgctcgatgagtttgtcgagaagacgcgcggttacggcccactcgtcggcgttcagccggtcgagaatcgcctccttcgatttgaagtggtggtagagcccgcccttggacagtcccaggtcgttcaggatgtcctggatggacgtcttctcgtagcccttttcagcgaagagcctgcgggcggaatcgaggattcgtcgttcggtgtctccggaatgcatatcgtgcgccatgcggatggcctgcctttcgttcatgtccccgtcaagcatacagaccgtcggtcggtctgtcaaatgatcgaggaagtcacccctgcgatgcgattgaa
